United States Patent Application Publication US 2025/0297208 A1 - sequence listing, part 12

SEQ ID NO: 2260 - DNA, 33781 bp, Xanthophyllomyces dendrorhous
gagaaaggaatacaagaggatgtgatggtcggaggtgggtggtgtgttgtgcgttcgcgtcgtcagttacaaacgggtaaccccgtacgcgttccttttgatcagaaaccatcatcatctgcaacctcgtctacacggatagctcatgagtgtcatcaatcaaaacccctcccctttgtctcctccgcagaatcctaagcagacaccaagacctaaacacactccgaaggtccggaaacctaatcagagcaagacccttcgtggccgaccgacggatccaccgcatactcggctatcaaagaccttggcttacttacttcgacatggtgccgagaaggaaggcctaggaattagaccggacggttacctcccggtcaatgagcttgtttgtctcttcgtatttctagcttggcccggttccagatggctgtacgtgtagataagctgatatatggatatctatttgggccttacctttttggccggttctacatatggttcaaaccaaagggtagattgcgcatcctgcgctcgccttgaatagtgttacgttcgagtccatccgacagattgtcttggacgatgtgaagactcgatatgctctaatcttcgctcaagacatatcctcatcagcggaggcgacgacgctggtaccactggaggagagggacccaatggccgacgagcaggatgggcgttggtggatccgagcgaaccaaggacattcattagaaatgaaagagttagagaaagacatgcgaattgtcactactgtcgaccaggccggactagccgttcatgggacggacgagaaactctggaatgctatctgtgcgtctgttccgttttgacgtcgacatgtttggaatgcacgtatgtgtggatattgagcttatatgcgtcgaatgttttggataaacagacgaacaaggtctttccaagatgacccggcagcatattcacttggcgctcgccttgccttcccaaaagtctccttcgacgatttcatcagaggcaggttcgaatcaggagagctcggatcccggcttaggatctggtccagtgcaaaagatcacttctggaattcgtccttcggcaaatctttacatctatatagatgtacctcttctcctatctggtgagctttcttgttcttgtaattaaccttggtagaagagtgtgacgcaaagaattggtcaaatggactgattgtcttggattgaccgcttccagaaaacgttcctctattcctttcggacaacaatgtcttgctaactccgggagaccctgtcacaccagggattctacctaggaaatactttctccgggccatccggaagaacggggagatcgtatgggaacgacctaaatgataatgatttgtgtttgtgtagattctttcatgcggagagaagtttgtccaaatcagctgtatctcgacctgatggtaaagcaaccaaacggctgagatgtgaacgaaattaagatgtacagcgtcacaagttctttgcctttttattttcgtagtctccacataataaagattgaaatatagtaagaaagtcattgaataggaacacaacattgagcctatgattgttcacaacacaacataacaaggaaaacatgtcagtattgtttctaaaccaagcaggattcgacattgttgagagcgaggatagggtaggtgaatcagaaaagtcgaatatcgtcaacgctccgcccaatctataaaccagagacccctttcggagcaactggagaccgaacggaactcgaagaagaggtgccagagagcaggtcgcagaagagcaacactcgtcatttaaaacggaggtgatttagagatgttgggcttgaaaattgaagacttacgtcaagacacagcgagagaactgatagggatgggtgtgcgatagaacgaaaagacatgaagttgtgggctgaatttatatacgtgcttatataatcaatcagggccggtttgcaatacgtacgagcctcaggactggtgagaataaccctaaccgatggtgatcgacatgtggcccttctggatttaaataccctcagaccatagacaaccagatcccatgtactacggatttggtttgtgttaggcgcgtgagctgtacaggtgattagctagctatagggtgtgcactatgctatggatgagaaaggatgcccaggttgtgtatgactctcaaactacagaggtactgagcaaaggcagtatgcccacgatacaacccacaccgaatagccacaaggaagaagagatcactggatgtattaggagcgcatgcgctgtgtgactatgagttgtggcagaggatctgtgagtccctggttacagacgtgtaacgccatagttacatccaaatacctataagaagtcgccctgcctccgacagggaaaccttatttttcttcaactgttcagcaacacgtaataaccctgctcgccggctttcctttcaacgggggagaactcaatggtggcgtcgggtcgctagtggatgcgagaaggagaccaacgttcatcatcaccaaatcgacgattttcttcttgaagaacgaacgccgaggcggtaaagaatgttgggatatctcttgaattatccaagtttgtttcgagtgtgggacattttatatgatgcgacaaggatatcaagaacgttgacaaaggatccaagctcacgagactatgctatggatgagaaaggatgcctaggttgtgtacgactttcaaactacagagatactgaacaaagacagtgtgcccatgatgcagaccacacggaagggccacaagcaagaacagatcactggatgtgttaggagcatcgacaggaacgagcgttgataggtgttcagctgtcaaagggaggttcgcagacacagccggttgagttcagggcggaactcgagcaggcacacaagcgatcgacatcttgccctgatgacgttctctcaagcatctccagccaccacgagagaggaagtatctgagttcacagacagagagaggaagctgacggtgcctcgctgttcctatatctctttgcctctttggtgcttgctctcagacttggtgaaacagagatgtaaatgcgccgcgcaacatactgcacttgtcccttcaccgggaagagaacccgggaagagaatgctggtacttgacaatcctatcgccgctgctctgatcactgaagctgaggctggtgacgttgaggtgatttgtgctctaagagcactccagtccaaaagggccatgtatcgaccaccatcggtggagatcactctcaccatgccttaggggcataggaaataagacaatcgaaataaagtcacgtgaccctcgacgcaaaccgaccctgacgaagacgcacggacccttgctcctcgaccgcttgggcgaaaattcctggacatttttcctcctttttctccttttctctttttcccaccaagccgtcaagatgtccgcctcccacgccgcctccatctccaagaagcgaaagttcgttgccgacggagttttccaggccgagatcaacgagttcttcactcgagagctcgccgaggaaggttactctggatgtgaggtccgagttacccacgccaggactgaggtttgtgctcttgagttttttttcttctctgtatgtgacccaactgacaacctgtattctttttctgtttttctctcttcgatacagatcatcatccgagccacccacacccaggaggtcctcggagagaagggacgacgaatccgagagcttactgctcttgtccagaagcgattcaaggtgggaatttttccctctcttttcgcccgatcgatcggcgtgtagtactagaatacgagaacagtggaaagtttgacaataagaaaacgtacttacgattcttcctctgttgaattctacttagttccccgagaactctctcgagctttacgccgagaaggttcaggctcgaggactttccgccgtcgctcaggccgagtccctccgatacaagcttcttggaggacttgccgtccgacgagcctgctacggagtccttcgattcgttatggagtctggagctaagggttgcgaggttgttgtctccggtaagctgcgagctgcccgagccaagtccatgaaggttagtctttaccttagcttcttttgtattgcgggcgtcacacgagcagcttcttaccgattggctttctttcctttgctcctgctcttcatagttcaccgatggtttcatgatccactctggtcagcccgctcgagacttcgttgactctgccgtccgacacgtcctcctccgacagggagttttgggtatcaaggtcaagatcatgaaggcttgggatcccgaaggcaagctcggacccaagaagccccttcctgatgcggttcacatcctcgagcccaaggaggaggcccccgtcaacatctcttccgagtcccgaaacgctccccccgcccctgccgcacaggaggccgcccctgctgctgaggctgctgaggagccctcccccgctgaggctgctgagcagaccgctgagcccgctggcgagtggtaaattactctttagtagagtgatttattgatttttctgtgcaccactaccatctctcagagcttctttatttctatagtgttcgagaatttcatggtctcccacgacacaacacacatttcacataacgttattctcttttgattttcaaaccttcacgatgtctacggtcttttccactcttccgtgttattcttttccgttaacaaaagcgaactctgcagtaaacacatcgtaagaaagccagatgtatccaacataagacccaggaaagacacgtcaaacggaactggcaaaagaactttggaaacgccctatggatgagatgcaggaacgcgaaacaaagctctcttctcctgttcattccttactcttgtattgatagacactggcgagcccagcgaggaaggccaagagagatcgacagagtgaaagatccagatcttgctcttcttcttctcctttaatatccgactttctcactttcgcctgttcgtctatccggagaagtctctctcacaaacggattgtacggaccagaaaacgaatgaacgaacgaatgaatgagtggatttagctttcaatagacatacttcgatcaaacgctcagatgtttgcgcaacaagtcacctctcatgtgtgctccatttgtacgtgttttctgttcctttctttctcttcaaagtagacgacgaggaaggatatgcagaaccgacaaagtttaccaatacattaaagaagagaccaaacaaacaaaacgaactctccttcctcttctttctcctcgcctccaagcaaagaggaagtcaaaaagaaagacctagagggatggaggtctctaaagatgaaggatttagtattctccgagcttgatatcgtgcacaccgtccttgtctaccaggcgaactctcacttctcccaggtccaccacaagtcctattgtgttccgtttcgttttgttttgccatcatcagccaagccacaatcattagctttccagacatatccttagaagcggagatcagaatgaaagagggagggcgagaagaatgacatatgcttcttgacctcgttcaaacacatcttgagaacttccacgcctctctccctctccatctcttcttcccaatgagcatctagcgtagcgagcgcaaagtatgcaccatatccatgagcggcatagggcacagtggcaagcgtgcctagataatcaatccaatgaagatgaggcttcccgcttgggacgtcgaatccaccaagaaggagattgacagagtatgggtttcgagatcggagagattgagcaagagaccgacgaatccatgaggcggctgatgccagtcggagttcggcgtgggttcttaattgtgatcaaaaggatagcgtgtagaggaacgttctttcagatgtcagtatgacaaagacaaatgcatcaggtcaaatatgcaacagaaaccagacgaaccgcatatgatgaagtcgaatattcctctcaacaaactctgcgaattgaattgtatcacctaacaaaaccaccaacagagaaaaatcgcgatccaacatgagagcagagtgtaaatatttagccatgagaacactaatcgtgattcctcccaatcaaccaagtacgaatgaaattcaaagtggataggacccgaaagagaaagggatatgtgagacatacctggctctccactgtatgccatcagtagatgcggactgagcgtcttgatcttgtcctcatcagatttcatcttgacgactgattcgatcgttcagatttcgtacgttccccaaagtgcaagagatagatgatcaaagagatcatcagctagccgtcttgatgaaggaacagaggagatcttcttttgaggttcatcagaagagaggaggacgaaatagaaacttgaacgaacttgatctggaagctgtcgagtccgaagcgatgagaacatagtcttttccaatgataccaaacgagcactcttcattcaggaaagatccgtgtcacatatcgaccgttcatttatttacccatccatcaattggacgcacacacgagaaattgagaagacacacaattgtcagttcaacagaccatcgaaaccaggaaagatgtcgcaaaactctgtagatttgataggcaacgtacccatgatgatgtataggttgagttaaagagggtatctttcgagtcagagtgatgtatacctcgagatgatggtcggtaagtaggaaagcgagcggcagagatgggatggaaagaatgtgagtgtagagaagacgtggagatttaaccctaacaattcttaattctgccacagtgttttccatccgtcgacgcttcatcctgggcgtatcgaagaggacggaacctcagcatttgtttggtttgattcgaagtttcttgtgtatgatataaacagggaagttctcagtgacaaataagagcaggtttccgtctggagcaatatggttgcatgtatgatcttctcatgacgaaatgaaagtatcaggttcaggtttttgccagggaaatcaagaaaagggagaagagcatgatcatctgtcttgcttctgcctctttcatctacaaagataccaagctcctctctcaaagacatatgacgaaacctatccagccgttcctccacacatccatggcttgagtctcttttttcagtttctacttagtggtggagtatttgaaagagattttaaagagtctgttttagtggttcttcttcctctccgtccttgggtttctcttcggtcgactcggtgttgttcaaaggaggtttcttgtccgaatctgaggaggatgcagaggaggggtctggagtcgtatgtagtcagaggcaaagatcacccgacaggagagatacaacgaaagaaagacaaaagagaaagaacgaacgtgagtggaggttgtcttggggtttcttgcaatgaagacagagaaataaagaggtgccagagtagagagaggacaggaaaagaaaatggaaaggggaatgatctctcagggagtcgggtatgaatgtagaaagcgatgaaggagagacagagaagagggaggagaatgtcgaaaagagaaaggaagcgctctgggttttctctatttctttccctccaaccaatcggccactcgacctgctacctttcctacccatccggaagattcttcagctgtcttctgagaagatgaagattgatccctagctgacgatccactcgatccagcgtttgctgaagaagacgacggtgatgatgacgagccgcgagacgaaggggaagaagtcgacgagaaaggctcggattgaggctgagaatacttacctgtggaagatgaagacgaagttgaagtagttgggttgggcgtaggagatggggtgggtttcgaagagttgtatgacgccttagtagaagaaggtaatgtctcggcgtatgcttccaagatcgctcgttggttggcggtgagagacctgaaagagaaagagaacacaaacccggttagttggttagttatctatataatctcaaggagaaacaagagcgggctctgcttacctaggaacctcaaggtgataactgacgacgagatcacctcgctttccacttctcgacaaagcgctgactacacctttgttgctcaagacaacttcctctccatgttgtgttccactatgcaccctaagctcgacatctccctcaagcgtcgggaccttggctcgaccacctagcaaagcgacgtggactggaatctttgcgacgtgatgaaggtggttaccctgtcgacggaaaatgtttgatggtcggacggaaactcggatgataagatcaccggcagggccgctaccagaaagaggaaggtcaccggcagcggtcattcgaagttgcatgtcgttctcaacacctgccagagaaagagaagaagatattggtaagaattcttcgatagaaacatacaagatatccaaagagaaacaaaagaattgtcaactgaccagctgggacagacacgttctggacctttttgactctcatctttccggttcctccacagcctccacaacccttaccaggtggaatgaccgaaccagcgccaccacaatctgggcaagtgctcttcattgcgaagccactctggataacaaacgtctttgcacccgttcctccgcaacctccgcactgcgttctctttgccccggccttcattccgtttcctttgcacgttccacattctaccaccgggttggtcgtcaccgtctttgtcgttccctgacaggactccataaagtcgatcacaatcgaagtctcgagatcgtctcctttgattggtcgaccgctgggtccacctcgtcctccaccggaacctccgcctccaaagttaccgaatagagattcgaacaagtcggcagttccacctctacccataccggcaccgaaggaaccgctgaagtcttggaaacctccgaacccaccgaatgggttacctccggctccaccagatggatcgaacgaaggatcctgagaggcagaaccgtaggtatcgaacgccgcacgtttcttgtcatccgagagaagctttagaatgacgaacgatgtcaaactttgtcagtatagaaagcaaggcttacacgaaagaaaaatgaggatgagaaaagaacctacatcgtacgccgcctgaatttctacaaacttctccttggcgcccttctctttgttttggtcgggatggtactttttggcaagctggaagaaagtatatcattgatcattgaatgagagagaaagcaacgatgggtgagttgactttccttaccctgtgaaaagagtgaacagcaagagagtcgggagaagtcccgatagaaaagaacgcacttggtagtagctcttcttaatatctcctacacttgctttcttatcaaccccaagaacgtcataagggttcttggctgccagttgaggtctcgacgaatggaaagacctctaaaagacataaagaaaaaaatgggaaggggaacaaggagcaaacaccatggtcagtatttgtgatcgaaaagaaaagattgatgcatgtgagaaacggactttgaaggatggtcctctgacagaggagctagatcgagctttgttggaaatcggccggaaagaagagtgaatggaggaaggaccggaggtgtacgaccgagtggatgagtaggcgcgaatggaattagcggcaacgaccgaggacggcttgaagagccgggcgtaaggcgccaaacaaatggaggccatcgcgaataagcaaaactaagcaacaaaggagtaagagagctgagagagtggtgagctagaagcagtgaacgctgagttgctatgaatgcgagcgtgcgtatacgagtagagaggtgttgctcctgatgaatgcgatagaaggtgttggctgcctgatgggctttggagaaaaatctagaaaaatcaaggtatttgaaaatcaattatgtattcaaattacttgtcctccttcttaaccagacctctccttctcacaatcgtccatcatcgccttggatgttttctgcgctattcgttcgttcgtacgcatctggaagggctttcttctggaggagatcttcaagttgtcgcagtgcggttcatccactgacggaagagagtagacagcgagacagaaagaaggaatatagctggtcatgaactctagtccagccgattcaaataatattcaaatacccaggcggcctcgttcaaacgggatttcctgttcggctgcctccgtcttttccggcctatctttttttccttgctcttttcttacgctgaacatacacacacacacactctccctcttaaagaccgctctcttcccctcataatcttggatcaatcatgtcgacctctgagtctacgaagaagactacgttcgttcttgggtccagacggtctccactcgcgctcgcccagacggatcttgttaaggaggctctacagaaattatatccggattattcatttcccattgtcaagatggagacagcaggagatctaaaccagtgagtattttagtgtgtagagatttctgtagatcaactctcacaaaaattatctgttgctccaatatccgtatcgtcaaaatttgctctcgaatcacccaggactcaggcgctgtctacgttggcgacgttgcccggaggaaaaggtctctggacggaggatcttgaagcaaagcttatccgagacgaaattgatatcgtggttcactctttgaaggatatccctacggttctcgctcccgagtttgagctggcggcagtgatggatcgagcaagtccgtttgacgcgttgattgtcaaaaaaggatctccttacaagtcgctgggtgatctgccagatggcgcggtggtaggaactagctcgatcagaagggtcgctcagttgagcagaaacttcccgaagctgaagttcagggatttggtacgttcttttctttgttcattttctatgccctttcttctcttttctttgtttgttgtcttgttcggaaacttatacggacttgcccttgttcaattcctattggctataattctcagaggggaaacctgtcagtcgtgtcatttccatgtttcacttgttttacaccttgagactaatttttttttgtctgtctttcaatatatgcacagtggaacgcggttccgaaagttggatgagcctgaatccttcgcagatcaaccggcgtacgccgatttgactgtcaaccctttagacgccatgatcctcgctcaagctggtctcgatcgactagatctgtccgcccgatccacctcgttgatcactcctcccgaactctattacgcggtcggacaaggcgcgcttggaatcgagatacggtcgaacgactcagtcactagagagatcttgtcggatgtttgccattggcagacctggtacagaattgcttccgagcgaggatgtcttcgaacgctggaagggggttgctccgttcctgtcggtgtggaatccttcctgatggagactgacggtggagagggaaagcagggtaaattaacgctgacgggaacagtgacgagcgtagacggttcgaagcatgtgtcattcaagttggccgatcaggtggttagctcatttgaacaggccgaacaggtcggtgtgaaggtggccgagggtctgattgagcgaggtgccggtggaattctgaaggaaatcgaggcaaacaagcaggctagcttggcttcaaagtgattcaagcggcttaaaagatcgaatatgtatatatatagagagagaaggaaaagaatagataacttcatggaataaaacagactctttctcgtgctgagggcttaactcatagagatgtttatatcttattgtctcgagcgtgaatctgttggcaactgtgtagtagtactgcaagaccaactaatctttaaagctagggttaacgtcgaaaggcaagctgttatgtcttcctctatatcgtttatcttctcactccttgcgacacccaatcggatgagatcgtccgagagaggaaagaacggatgggcaagcaacccagccgaatcccgatgtccaaccgatgagagacacaatgacgtttgtgttttgggttgagtgtgtgttctcaccaaactgtgtatcaagaggcagagcattcaaggctgatgagggtctaaagactctcgatctgcttagtcagctcatcggccgcccatcgatcggcatctgtttaatgaccaacgcgtcatatatggcgcgtcaacacgcgcccacacgcgccgcgggacgtgttttcacgcgatctgacgcgtctcgacgcgttcgtaaatgagcatgcacgcgtgtaaatgagcgacacgcgtgcgcacaggcctcgtgccgcgcccacacggcttttttttttctctcctcctccctctcgttcttgttccggtcttgtttctctttctgtcctcttcctcttctttctcccaacatccatctctctctgtgtcttatcgaacaccttcctctctttcatttccctactttcaagcacccatacacacctacacacatacccacgctcattcaatcgatcatgcctaccgctatccctgctatcgacaacgccatcagcgctgtggccgaaaagtttgacctcgcctcgttgaacgtggtcggtggaggaaagccatcgagagaggacctcgctaagcggttcgtcggtgatctcgactgtgaggagaaggacgagcctctgttgcaggctacgtgagttttactctttggtttcttgattttccttccaaatcttctgttttctcgtgttgttgtggcatttttcccacggtccgcagaaacaacagatgctgatacattcgttttcccttccttttcgttttcacttgttgatcgttttcttccttggctttccttctcttcttttcccgtaaattcctctgtcacttatctttctcacgctatcttcttctgtcctctccacccctttctcctccttcgttatgtcttggtctccctcagcgagagacgattcgtgctcttccccatccagtacaaagaggttagctccacctttcgttcgatcatgtacacgttcattcattcctccttaagtagccatcctaacttgtttcttcttcaccttgtttctgttatcagatatggcaagcttacaagaaggctgaggcctcattctggactgccgagggtaagttctaatcctgttttaccttttctttattgcttcacggaccgtcgttgttctttgcggcctagtctcgccgagcttagtagttcgataaatacctctgctgacgtttcattccatgctgtttggttgtaacaaccgtagagatggatctgtcaaaggattccaacgactgggagaacaagctcaacgataacgaggtttgtctcgttttgtctcttccaacacccaatttcattaacttgtctcaccgactctatttctatcgactctacagcgacactttatctctcacgtcttggccttcttcagtagcagtgatggagtcgtgaacgagaatctgctcgagcgattctcccaggaagtacagtctgccgaggcccgatgcttttacggattccagatcatgatgtacgtcacagtgtcttctctacatacaagccacttgtctatcgatcgatcgatctgacgcctaggtacatggattctgaaaacagggagaacatccactcggagacttactctttgctcattgatacctacatcaaagacaacgatcagcgagactacctcttcaacgctcttgacaacagttcgtccttctctcttctaggcgcatacgcttgcaaagacgctttgattgaccattctcttctcttgtatcggtcgcttccgctcacagttccctgcatccgaaaaaaaggtgactgggctctaaagtggatttcgtccaagacctcgacctttgccgagcgactggtcgccttcgctgccgttgagggtatcttcttttctggatcgttcgcctcgatcttctggctcaagaagcgagaactcatgcctggattgacgttttcgaatgagttgatctcgagggacgagggtcttcacaccgactgtatgtttctttctttcgtcaggcttgttgttgcatcttcatgaagtgctaattctgttttgatctgacgatcagtcgcctgcttgttgttccaccatcttcgacgacgatgccacccggacgttattgaggctatcatccgagaggccgttgagattgagcaagaatttttgagcgatgctttgccggtatcccttattggtgtacgtaaccccttgacgatctgcttgttccttactttgctccctctttggcttcttaactaattcttcctttcgatgtatcacagatgaactgcacgctcatgtgccagtacattgagtttgtggccgacaggttgctcgtcgcacttggaaaccccaagttctaccactctaagaaccctttcgacttcatggagatgatctcgcttaccggaaagaccaatttcgtcagtttctctttctcttgtttttgaccttcttacatcccatatgtataacgaactaacgccattcatctcttgcggttcttgaaatcacagttcgagaagaaggtctcggattacgcaaagtctggtgtgaaccagtctgtgggagacgggaaagtacacgacccttcggccgccaagacgtttaccatcgacgaggatttctaaatcacgaaaaaactcgacaacaaaacacgtccatcccttctccttcttgcctttgcttcttctcataactcttcttcgtcaaatcgatctgcagagtcgacatccgttctgaacggaatcgtacatctatctacccagtttagattcggacctgttcttttcattctgcattctacctttctgtcatatatgtttccttcctcaaccagtttatagtgctaccttcctacacattcacctatctcgttaaaccatcattcccatctcaatctgtcttatttcttttcatttgattcgtttgaccttgacgataacttcttttggtgggaataaaatcccctcctcctttgcttcgtttctttctttctgacgtttgtccgttcggtctcgtcttctgtattaaatataaaaagaaaattaattataacggacgatgtgaacccggattgagagtgcaaactatccatattgacggaggatgggacagaggaaagacgcaaatggaagatcatgaaggatcaggtcaacgttggctcatgattctttcgattctctgcttgttcatcctcaacttcgtctcaagatcatcatagctgtctcgtaagagaaacgagagtatgaaaccgtgctccgagcgcttcatccttctcaaccttcagcttgtcttgagaaagactgtgaaaacgacaatgacgatggtgatgatgacaacagccaagagaaagaaaaaagttcgaacataatatctgtacgacgatcaaaaaaaagaagaaaaagatcttttcatatccccgtctacgccaaggggagagatgacaaaagaacgacgtttatctagaggaaactaaaccaaaacggaaagaagcgctctactttccgtcggtaccggccgaatcgccagggacgacgacaggagtggcctgttcgttgttgactggcttcatcgcggggaacaactgaacaagacaaaaggtcgcgaacggagggaatggggtatgagaaaacgccgcaaggacaaagagaaactctcttacgaggaatgaaaaagaaagaaaatgggaaaggaaggaatacgtacgaggacctccttgatgttggaagaatcagtgaggaacatgaccaatcggtcgatacccattccccaaccggccgtcggaggcaaaccatgctcaagacttatgtcaagaagcaacataaagcgtagagaggtatcagatccaccgttcaagtattgcgaaaaagaagagagaaaagaaagaacattcacttacgcgttgatgaaagtctcgtcgacaccctgagcttcgtcatcaccctgatccttctgtctggtctgctcctcgaatcgctccctctggtcgaacggatcgttcaactcggtgtaggcgttgcagatctccttggtggcgacgaaagcctcgaatcgctcacagagtcccggtctggatcggtgcttcttggcgaggggagacatcacctgggggtgaccgacgatgaaggacggattgatacactgaacctcgatgtactctccgacaagcttgtccaaaagtcgagcgtttgtcctgggttcgctgcagtcaacgttgtgcttggtgcagagttccctgaggaacttgttggcctcctcggtgtgaagggtctctccgggagggaacttgacgtccaacttggcctccaactctttgatcatatcgaatcgcttccaaggagccttgaaatcaatcgtgtactccttcttgccctcaccctgtccctctgggtggaaaacaaccttagtctctcccttgttgaggtacttgaccataccctcgaccaacgtctcggtcatctccatcaggtcaaacatgtcggcgtaggccatgtagaactcacagatcgagaactcggggttgtgagtcaaatcgatctgctcgtttcggaagactcgtccgatctcgtacactcggtcaagacctccgacgacgagctgcttgaggtagagctcaggggcgattcgcatgaagaggtcgagcttaagatcgttgtggtgagtgacgaacggcttggcggtagctcctcctgcggtcatggacatcatcggggtctcgacctgaataacgaacaaaaacgatgtgagaaacgtgttcaatcgcggcacatgagaacgaaaagtcacagtttcaaagacgaacctccataaagccgagagagtccaagtactttcggatgtagttgaccaccttggctcgagtggtgaagatgtctcggacgttctggttgagcatcaagtcaaggtatcgctttcggtacctaatctcgacgtccttaagaccgtaatgggcagtgggaagctggtgcaagttaggggtcaagagagtcatgctggagggagagatagagatggcaccggtcttggttcggataggggatccagtgacaccaacgatgtctcctcgtcggaagaggtcgtgagtcttgatgaactcctcaggggaaggagcgtacctgaaatgagagtaaggtaagaaggagttgccgttagcaacgccaaatccttttgaatcctgacaaagttttcccatttggcgaaaatgattgagctcggtgcccggaaggaaagattcaactcactcagcctgggcgcagatttggagctattcagtcaagagagaaaaatgcaacaggggatcatggtagattagcgccaaattcctcgtatacatcttcttccttcctcgtcctcgggacaacaaacaaccaaccttctgtccttcggcgtggagatcgtagaatcgaagaccctttccggcatctcgcatgttgtggattcgtccagccaacgagacctgaacgagttgcacgaagaagaaagagaacacatagtcagaacacgtctctaaacatcgttctcgagggctcaacgaataacacgtaccgtgatatcgtctaatcgaacgttcttctcagtgatcttggggtcgtaagtctcaatgaacgaaggcacagagatcgacacatggaacttgtgagggtaagggttggggtcctgagactctcgaagggccttgatggttcgggttcgtaggtcgtaatattgctgtcggatgtatccagatacatgacccaaatattagatatagtgtgcgcgatgtaggatagagcatggaaagcgaaagaaagacgaacagtaggatcgagctcggcctcgtcgttcttcttagccttggtgttggcaggcttgggaggagcagcggaggcagcagcctccttcttggcggccttttctcgctccttgataagctgcttgagcttactgtgaatgtttcatattggtagaaaagaaacaagccggtagggcaagcagtaaagaagatagagcatcaaggagtctctgtcagccgttgatcatcatgttgtgcgaacgaccatgagacgagtcatcttgctcccgataggagaagggcagcatctatcggtctcgctcttgagaagaaatactggacaggagttttgacctcgtaggccgaggagagttccaccagtatctctctctggattgcaagaacactggcttctcacaaaacaagacaaatagaaagaacccatcggtcatacgatgctcttacctcttggagaccatctctcccgtaacggggtccttctggaggttcggtgccgcagcggtggatgcaggctcagacatatgaaacgttcttgtggtagataggactacgggacggagggatctgttggttgcgagctttgtgaatagatgaagagcacggaaaggggctagattcatccaatgtcgatggagggctgactgtgtgagtggttggatttgaggcaagagtaaaaaaagaagtaggaaaaaaagaagcaagacccttagatagaaattccgtataatccagataacattcaagtgttattcaagtatcctccttcctcttgctcccttcacacacaatcctacacgacctacaactcactcagacacacaacgatggccttccttcttgcacctagagcggttgcttcggcttccaggtcgttctcgaccagcctgccagtctcggtcacgaacattcatgcgcctttccgaaggatgggaaaccctagaaagtctcagacgatggaaaagatgaacccagtcgatcgttcgtcttttaccgcttttttcctttctcgacttcttctctcctttgtgtttcttcactggcttgtcagcatggattcagtctgacatatgtcctgctgttttggattctgttcttttacagaggctaccattggagcagatgtttccgccaatctgaggagtttcgatcgaggaaacgtccgtcctttgtcctttttttgttcctttctcttgataaactgaagactagctcttactgacctccttgtattatcttccttcttgccctttctatcctcctctctcttcatccatctccagatcatgtctcccgaagatttctctcagcaaggccgagccgctctgaaacctatcaagcgagtcaaacaggccctcggcccaccccgagcgatagccgagctgattgatccgttccatcgactggacattgatcctcggaaagaatacctcaatgcccgactgctttccactttccagacagagatcggaaggatcaaaggaagggcagagaccggactgacgatattggctcagaggaggctcggaaaggccttaaagcgagctaagaacatgggtttggtctgtaagtctgaacaaagtttgattctgataagggcatctgtacatgcacccgtacacatatcatatacaacatcccactaacagtatttgtctctccttttctttcgctacttcacagctcgatggaccagaaacgactcgtttgcgccaatggtcgagcgaccgcgtcgttgatcattcccatcctcccttgtaacaaaatgaaaccctcctctctagaggaaaatctcccctttctcaaaactatatcaatgaattgatttataatgattgacccgtcttgacgtgtttcgttcaagagagagaaaaaatatgtttcttattatattcatacgcatcggaggagggaaaagggaggggtggagagagatgtgtatgagagcaaaagtctgggtgctctgttatcaaatccaatagttacatgtccaaatagtctacaggggtttaaacagaggtcgtgtcagcgccaacaatgttcaccgttgtttttttctttctttttaatgtaagagaagaagaaagaacgaacccttgatctctcgctctgttaactttctaaacacctgcttgatcctctctccgtttcgaacctcgagatcctccgccttaggcacagttaccacacccacctcaatcgtcttttccgtcatctcgccctcgaacccttctttcagcgtcaagagcgctgtgtggatagcgtcctccaacgagatgtcatcgttataactggttcgtttggccaagatcaaataagagagacgtcacacgatttagaatagatcctagcgatcagatgagtacaagggaaaaaactgagaagacgacgcaccgtttctccaagaacgtctttgcgttcaccatgttcttgcccattgcacttgccttccaggcccagaacgaaccagacggatcaacctgatagagcgacggccctcggtgggcgtcccatcctgccacaagtagagaaactccgaacggtcggactccactgtatgatttgagaatttccatatcagtttagcccgttccctctgacctgactaagccgcctgttcaattaagagtgagggggaaatctcggacgtacccagactgagtagccttctgcatgatcgttgcaacctcctggacgagcacctttgtgggtgggtactcgttgtaaatcttccagtaagcctgggcggcctgtctagcttttgtaacaagtactctgaagtccggtcccatcccagagtagacgattccaatgtttgggcagatgactgagatcttttccaaggcagagtcatcgacaaggattgagggtgatttcttctcggttaatagcacaattccattggtggctgagataaatattagaagaaaaaagcaagttgagcatagaaataacagaccgtccgttggaacgaatcgagacaaacctttgacacccagagaggttccaccgccgttaacgaccgccaaagcatgctcaatttggacgagctacgaataaacgacatgatgtgttgttcgcttgctgtcagtgtttgtgaacgatagacttcttatgacgtgacgataaagatgaagcaacctcaaacgaaacgtacctttcctgacggactgaaagtagtcagcgagaaactatttcgcaggaagcagaggacgaacaaggaacggtcagtgagactgtacgatacagagagtctaagctcgaattccaagcattccgagggcgaaacaactccttcgcgtcgtcggagacctccagcaagacgatctagtcgattgatgatcggtagacgaccagaccaactggattctttctgtcgacgtgatctggatgaaaacaagaaccggactgacctgtactgtcctcctcctcctggtgcagccattgtcaagtaagagtgagtgagtgcgtgtgtaagagcgtgtgtgtgccggaagagagagagatcgttggatctatagcaagggtggacgtttggatggaacggctggaagagatgaaagatggaaatgacaggtgtcgtggatgtaaccatgggcgataatggttacgtttacttcgtgtgaacaggggagtgactaaccatctatttaaccctaacctgcagctttagcacttcccggcccatcctccatcctccattctcacacattggacctcaacctcgagtagtatgtcttcaaggtagatgatctgaaggcagctcttgctctcggcagctccttggttattgtgttcttgagaatctcttttattgctgctctaattgcaccatgtggtctatcctttggggttcttgttcgcctctttgtgaatatgattgagcttcaaagccatgctccttcttctatcacaaaccttgatctgaattctgtacaagtatcttcccaataaaatcggagtgcagctcgcttggatctggcttcgattcctgaatcaccctcttgcgctgagtgaagaattccagcggttcccatctgggtcttctcaacagtccggagttggccggtcggttcggactgggcgtaaccaattcacagccaaagatttcagaacatttcgtgctttccttccattctcatcatcagtctttgccatcctttctctcaaacaaacgtatacacacttcctcgacattacttatcggacaaggacatccgtagaatccctcctcaatgacacatctgtccggaaaagccgaaaagacgacaaatgagcttgtagagcagcttcagcggatcgctgcagaatcaaaattaatcaaaggcacgccttacacctaccctgccttaccttcctctacccttctctcttctaccccagtcctagtcccatcttcctctagtacgcctccatcatcggaaactcctgtctctcaggcagaagacctgtcgacgtctggctcagaatgctccaggcaacaccatctggtctcgtggaaagttcaagaagaggtctacagaaaccctccgttcgaattgcccactatggctagaggtctcttcacagaacggcacgaaggccaacatcgcatcgtcgctagaggatacgaaaagtttttcaatgtcggagagatgagttatacaaatgtgagtgattagttgttgggttgatggtcggatttctcatataccgtatacttgggcatggctcgaatgtcctttctgacgacaacttttggactgctctcctcaaacattcagtgggattctttagaggaaaccacccaggcgccatactacctaacgctaaagtccaacggatgtctcatccttctctctgccatcgaagaagaagtactgttggtgacgagtaagcatgccttgggtgacatgctcgacggcgagcgagtcagccataaccgaatggggttcgtttcatctagctttttcttcttaccatgagagctcatgtgtgtatgagtgtgcgcgcgtacacatgtttcctctcaaccgcttcttcatgttctccacaccatttttggatgaaacttactgattcagcagttcggttctctccttttaaataacttgtcctcaggcgtatatgggtcgaaaagcatctgagtagagtcggcaagaccgagaaagagctggccaaggttttatgggagaagcaattaacaggtgtagctgaggtgagatttgcctcgtgtttatttccccaatgatcctttctatcctcttctccttactctatctaacgcccatctaaatcttttaaatcgtgccatcagctatgcgatgactcattcgaagaacatgttctctcctacccatcccatttgactgggctccaccttcacggtctgaaccacaacactccttcattctccaccttatcaccctatgaggtggcctcattcgctcgtgaatgggggtttatcgaaacaaaaatagtagagaaggcaacgttacgagaggctagagagtttgcgcaggacatagagacaaaagaagagtttgatggggaaaagattgaaggattcgtcgttaggtgtacggtgaaacccggaccagaaccgaaaactgccatacaacagggcatggaaaagttggctgtcgttgattcatccgacgatcagtcggctctttcttccgctgccgcccaagatgccaaacgtcgcaccatctccccgccttatccccctggatcgacattctttttcaaaatcaaattcgatcaaccgtacctactataccgaaacttccgagaaatcaccaagatcctccttcccctcttatctcctgccacgccgaaaactgcgaacgattcgtcctccgtgacttctatcaaaccgacgaaacaaccaaaggtttcctcctccagactttcttccccagaagcagtcgtttatgaagcttggtgtcgacgaacgatgcgctccgatccgaacctgttctccgggattgcagtaggaagaggaatcatcgatgtccgaaaccgattcttggattggattacgtcggatgatgaaggtaaagagacgttgagaagggaaaaaggtaatccaaaatggctaaaaatcgggaggaacgctggcggcgagaaggccggcgatggaaagaggaagggaaagggaaagggagaggaagacatcgacaaggacggcgcacaggcagagtggaaggagaggggaaagaacggatggggaaagacaatgctggttccagtggcggttcctgggtgtggtaagatccgtctcgcatgccttaaaaatcatcattagcacactctttccctctctttaactgatcatattcgccgtccgtttctttcatctttcttttcatctcgcacgataggcaaaacgactcttgctgttgcgctgcgtgaattgtttggattcgcacatacacagagcgataacatcgcagctaaaaagacaggaccactcttcaacaaggcggtaggcgatctgctgaataccaagggctgtcaagtcgtgatcgctgatcggtgagtgactggactgtctattgttcgagtttggcattcgatcggcttcaattgaccaagttgatcgacgctgtttctatatactgtgattggcttcgtcatgcgtctgaattcatatattgcagtaacaaccacctatctcaacatcgaaaagaactcgctaccactgcgctcaaagcggaccacaaagatcaacgatcgcttcctaccagactcatcggcttgtactggcccatcaaaggatttcaagcaccggcttcgaccaacgaggtaaccagattatgttcctcccgaatcacctctcgaggagataatcacccatgtctccgtccagatccaaacaatcttgccgcgcacgaggtaatcctgaagactcatttcttactcacagccgatccactgttggaccaagagctggacgacatcatccggcttgacgttcggtcttcgccggaagaaacgctcgacattgctctcaacgggttgaccaagctgttaggtctggagaggcctgacgaaccagccatcaagcacgccctcaaaatggctagagagtatagcgcagaaattagcctatcaccggttgtgccagcaaagatcataccccctagatattacgcaattgcacctgaagttgacatccgacagatcgtccaacaaatcctagacgaccatctcgttcagagcccacaaacgagtatagagtttccaaccgatcctcgaacgttcttgttcaatctggtgaatgattatcggatcaccgtccgaccgcatatcactctttgccatgaaacagaggtcgctgctgagcgggaggggattcctgaaacagattggaagaccaaggctgggccgatggcaatttgttggaaccaatgtcgagggatctctcagatcccaactttacccctcttctcattcgaaatcacccatctggtttgggacgatagggtcatggcactcgctgtggatcagatcgaaccaccggtggagataccgaatttgagactgaagatcccagaggaagagatggagggttctcatttcactgttggaacaagagacccggaagtcaatgcgtacgaggccagaggactcgtgaaggattttaagagaggtacttataggaaagaaatgggagtcattgagttaaagaaaaggattgagggtcacggtagagtgcttggcttatcgtgatatcagaatttgggggttgtgcgtctgtatctaattttccttgggatgaattgggatgatactttcacaagtaacaatcatgaatatatctgggggaacagacgaaacagtcagtatgagcgcaaagaaagcgagaaagaaaggaagaggggcgaaaaagatgaacgtcatattggaggcgcaaaagatagaaaggttaaaatatcgaataatctgccggtcatcatcttcaaaccatccatcacccaagtcgacctcgttgtgattgatctgtacccgaacgatatcctctaccaactatggccgcccttcgtatgccatgccctcgcctttctgtccttctcaaccgatccctagttcaatccaaacatctccgatcgtttcacatctctccggccgctcggtcaagtcttcctccttcgtctacaccagtgaccgatccctcccggccgacagctcggtcggggcctatcccgataccttccgccagtcaagctcagccaaaaagaccccggtggatgggtgggaagatagagatgaggatatttggggcctgcttcggagtcttgatagtcgttggtacctacacattgtacgtcctttgtttgtctcgtctatgttcggatcagacggtcgatcgtgaggatagagcatagctgagcatctctctttgtctttatttcttctctccttcgtgcgcatcgctcgtatgtttcgttcttgtagatacacttatgtccagatgtacaagacatggccaaaagagatcagagaatatctccgtcaggccatcaaatcaggcgaggcagaagattgggttcggtctgaacgtgcctttggaaagtacggtccagtatgattgacttgaccttccttcctagctgcttttgcttgcttacttgctcacgatcgatttaactccgatgatacttgttgtacatttctagagccttgaacgcggcccgttcgatggatcctccgctaccactacttcataccacaggaatagcagtcgcacaaacccatctgctactcacccgactttatgcacctcaacgagcgtaccccgttcttcggaccgcattgtccgacttggatgaggcgactgagagactaacgggcgccgaacgacagcgactcgtcggcgtgctctacaagttggccgaggtggccgaaaagctgggcaaagtagaggatgaagagatgtatctgacgagagctgtggaggagggtttaaggggcgtgatggaacgacggaaggagatcaagaagacgctcgacgaggtgaatcagcagagtggaggaggtagggaggaagagttggaacccgttccgatgccctcttggttgagccggaccgatctaggagcttgtctggacaaattaggagagttctacatgaaacaaggaaactccgagtcagtccttttttcttgctggtctttccagaacctgtcgttcatgaagctttgcttttcggttcgaaaactgagccgtctcttggctttgcctttactaatcatcattattgccaaccttctaatgttgtagctacgccgccccactctatctacatgcgattaacacgatcctccctcctacaccggatgaaccgagtaagaacgacggcatccctactgaagaccgttgccgaggtgagaccttttcacattatttccatctcatcagttacacatctcttccctctacaatatgcacttgtgttgatcatgtttgatatggtttcgtcttcatctgaaacttgacagctgccatggtaggactttgcttttctttgcccatctcacaactaccaactctcaaccctaacgttgatgccgagactgagattaaagctaacatcgacatcaacccgttctgatgaaacacagatgatgaacaatttgtcgaacgtccttacactcaagccgacgagcgagaatctccaagcggctctcacatgggccgaccgatcgctctccactgtccggactgctcggaaggtctcacccgaatttaatactctgatatccggcgaggacagagttggagacggcgggaaagatgaaaaggagagcgccaagtcgagggagtggagagagagaagaaggatgtgtgaaggtgtggaaggcgtcgctttgttcaacctgggcgtcttgcaggaggtgagttccttatctccttttgtgatctggttgagctgtcgttgttcttcccgtgaggagaagggagacttgcgcagcaccgcactgacttgagctcgatacccgatgggggggggtttcccgtatgatgaacatatgcacacagatgaacaaggaatacacctcatcgatcgaaacacttcaaaaggcccttgccttctcaagatctgtcggattcgctaagggagtccaagaggcgcaagacgcgttgaacagagtcaagactctgcgggccaaggcaagctcaaaggagaaggataccaagaagggaaaagggttctggtgaaatagatagatgtgtcttttctgcatctcattgtgtctatgtcattgtcaaacgaattgaaatgtatcgaatttcaagcaagcgcccaagtttattcatgcatcgaaggaagatcgaccgagcaaacaccttatagacacatatacacgttcaggctacgcttatgcgaccaaggcggaagcggtggcggactcgtacttgaaggtaggagcgatgacctgtcgggacttgtagtacctcgccaatcggtggattcgggactcgatgagaatcaatcggaacttggcgtccttgtcctttcggaactgggaaagatgagttcggacggcgacggccttcttgatcactgcagaagggtatatgcaaaggcaggaaagaaagagagcggaacgaaatgagtatctaaagtgaagggcaaaggggacagagactagggtcaagacgtacagcagtaaaggtcctcagggagctcaggagccataccggcagacttgaggattcggagaatcttgtttccggtgacgaatcggacctgggggactccgtgggagtctcggaggatgacaccgatctgggaaggggagagaccctatgaagtagcgaggaaagagacagaagtcagtcgacctggttcaccgaagttctgcttcgatacagacaacttacctttcgggcaagcttgatgatgttctcgcagatctcctcaggggtggacttcaaccaggagggagcggacctcttgtagggaagagccgaggaggcaattccttttccgggagcgtgcattctgaagtgttaaagtggaagcataaaggaaaaacagaaaaacagaaagacaaaagaaaaggaccgcaaacgagcaacacacacaggaagggtgataagtactctggtagcctatagaccagacaaggaaattcgagcagagtcgagcaacaggagcagctttgggtttctttggaggaacgaaaagtctgatctgtcctccttcccctctctttttctttctttttctttttaaaaatcttttgacgatccttccccaagccggtagcccttcggttcgacttttgagcgggataggagagcgaagaagcagtagaagagggaaaagtagtccacagaccaaacgagacaaagacaggacaaacactcataacacgatcttctttttttgagcttctgtctgccatggaatcacccgaggcagaacaaaagaaagagaaccagatagaggccgctctgcctctgactgttgaccgtttgacccgacggactcttttgagttttgcgtctcgttcttttgccttgacactctccatggtctgttcgcaatctactttgataggacccagcttttcgagtggggcaggatcgggtcttttcttttctcttcgtgatcggaaagagcggaaaagagataccaagaaaaggagaaggaaaagggaaaaaaggagtagagcaagataggaggaaaaccaggtcgcctctgatcgttcctttcttgccgctgctgctgctgctcgaactgcaaactctaaggaaaggaatgatcaagagactctgactgaccgacccattttgacggattaatcggcttgaagaagaagggcgaagtgagcgagggcgagcttgaagactgactggataggaagggacagcagcaaagaaagaatttttccttctcaaaggtattcatgagggtgggttcaagtgggctgaagtcagtcacgtgatgaattgcaaccctagatgtcaggaaccagagttaggtaacatatacacgacagcgtgaccatgctcacattccattattcatcatgccttccatttcgttatgctccttctcctcaccttatgcgcttgataatccttcttagctacgttcccttgattagtgataggattagtgatatggattagtgatatggattagtgatctgttgcttgataatctctagttgataatcctgtagtttagtaatcgagtggcaaccaggtggccacttcatcgtagctagaacacataaaaggatcgcgtgcgcgctccttcaagatgtggttcttcaagttaggatccttgttaaataacctagtagctaccagtgctattcaatcacgattcatcctctcttccctgagcctggaagcctaaacctccacgcctcgagcatccctagtcaactacagtcaccttgcgtaaccctgtaacccggccccttacactagaggtttgtcagcctttaaaatcgcatatgcctctcattatcttatcgcggccctttgcatcgtctattccttgggtttattctctctttcttattcatcctggtccagaagacttccctgacggatatctctgtatggactatactctgagctactgtccaacggattctacttgacgatgctatgacacaattgaagctacaaccttttcttttgattcaacgtcctgacattgatgtagtttccttgatcgatgcgatgaggtctttgtccaccgtggtttctgaatgcttgcctctgggtttagcatccagacttttctttcttttcctttggaaagagtgacgaaatgcaaaacaagaagaatgtaagcgcggtgcagatccaggctccacgagatttcagctatgttgcaatatattcttggacgggcaatcatcacagaagcacaggtatttgtccaagtgaaaaaaaagacagatataaaaagcaaaggaaaatagaaaaaccgaaagatatgcagaaagagaaacgtgggacctgatgaaattaaatggggagtgggggttaggccacccggtataaacgctgatgtcaagaaaagctgtccaactagaagacagatgaccttgcggttaaagcgggaaggaaatacagatgggggaatgaccttgaagcacagagagaaagattgtggaagaatgagattcattcatgccttttcggatagctgatgtagagctgagaggcgaatacgacggaaagaaacgacgaggaacgaaaggcaaaaaaaaagagcacgaagaaaccgaggggccagagggaacgaaaaaagaagcaagaatgagacgagacgagacgagaagagaagagaagagaagaaagcagagcgtccatgggacaaaaaagaaaataaaaaaagaaccatttacaccggcggctggagcgggagagtccgaaggagaagacgaccgagaccatacacatagaggccacaaacgaagagagatcacacgcatcgcacagaggaacccaaatagccaaggctaacccaggcaccccaggcacttccatacccacacagttactcaccaactgccgaaaggaaccgggtttggatcgtgcgatcaccccggagtccatatccgggtcggctgaccgtgatcgggcttgggtaatgaatgattctcgaatttgaccggccagttatttcaaaacgggtcgatcgtcccgcgtcatcaacttccggacccaggccacatggagggcatctatcatccagctatccaatgtttagcacccaacacgcacgtctcctcgctcacaccagcttgtacttgctccaacaacacagcaaacgtacccgggacagacgccgagtgaatcgcttaatatccctcttttgtgtctctttctctttcctcctctgcgcaaagagcgcagtgttcgttttgttctcatttgccatttttccacgtcgtccgtgttcgatcggccttcagtgggtgtgtttaggatgtgtgttgggtcgtctcatctaaagcataataacgcatttcagcgcacagacatacattgcaaaaatataaacaatctcctcagttctcggtggtccgatcctcgaaccccgttcgtcacatagcagcttcatgaggtttgttcccttctggcctctgtacaaaaggagagttggcctgttcactggtcatccttcttcttcccctcccacacacctaaccacctacctggacaagcactcttaccgatgatcgcaccactgctcaagacgctgccctttttggcagccgcgtacgcagccgagctcgaccttcctaatttctcggctctcaaccgacggcaagataactccacctcgtcctccgctggatgctcgcttgaccagaccgtagctcccggaaacttgacactttgtggaaatgccaccctattcactacttttaggcccaaagctagattcattgcacctgaaggctggatgaacgaccctatggggttgtaccagcgagcggatggatccatccacgccgggtatcaatcgtaagtcccctacgtatatctctatcggcgttgtactaaattgaccgttaaccttgccatttacttccgcatctgtctggcttgctccttcatagacacccaaagcacattcagtggggaaacatctctcagggagctggttagttgatcgttccacgctcttctctaccgaacgagctccttatcttctctcttctctcttttcccttctttcttctctccttttctcagcctactcttcggatttcacctcttggaccgacttcaacggctctgaaggctacaagaccatcgttcgttgagtgttcgctcttgttcacatcaaatcacatactgatagcgtttttcgttctttatatctcatttctccttcacctcttgctcgctcgcttatactttccccttaccagtggccttctcaaatatacgatattcgaggtgtctttgatggaagtatcattaaggaaggaatcgacggctaccctaccatcctctacacatccactagtttcggtcctctcggcgcgacgcttaacgaagccgaaggcacggaaacacagtccctcgcctacaccaccgacgatggagcatcctggattaagctcggctacggtgccggacagaacccagtgatttacgaatggcccgagactaacttgaccggtttccgagatccctacgtcttccagtcgcctcgactggaggctctgctcgccaacaccacctcgatcaccaacgccaccggtgaccactttgctaccatctctggtggtgttcacggcgacggagcgcgacttttcttgtacaggcagcacacgactggggagttcatcaagtggacctacctcggaccattagtcactaccggatacaaggagtcttacggcgagtggagcggaaactacggcatcaactttgagaccgccggtgttacccgattgaacccggccggagctgcctgggataacggctcggacaccactgccgttgatttcgtcactttcggaactgagcaaggacgagccgatcaccagaaccattggcctctctgggctgccgttgactatgaggtccgagacaatggctccatcgaagccgtcatcgcatactccggtgtccaggattggggacgaagttacgcttacgcgtccttccctgttgagggttacagacaagtctctgtcggatggatctacgaggatgacgataacgtcatcttggccaagcagttcggctaccagggtgcgttcaccctctt

SEQ ID NO: 2261 - DNA, 932 bp, Xanthophyllomyces dendrorhous
gtatcgacaagcgaactatcgagaagttcgagaaggaggccgccgagcttggaaagggatccttcaagtacgcttgggttcttgacaagcttaaggctgagcgagagcgaggtatcaccattgatatcgctctttggaagttcgagacccccaagtagtgagtagtgttcgcgttttgtaccgagtgtgcttcctcgaggagggcggaggagaaggacgttgtgtctgactgcctttttcctcctttttctttgcctgttctgacttgtctgttcctcctcggccctgttgattgtccttgcggtcgccttccagcatgatcaccgtcattgatgctcccggtcaccgagatttcatcaagaacatgatcactggaacttcccaggccgattgcgccattctcatcatcgccggaggaaccggagagttcgaggctggtatctctaaggacggacagacccgagagcacgctttgcttgccttcaccctcggtgtccgacagctcattgtcgccgtcaacaagatggacaccaccaagtactctgaggctcgattcgaggagatcatcaaggagacttctggattcatcaagaaggtcggatacaaccccaagaccgtcgccttcgtccccatctctggatggcacggagacaacatgattgaggagtccaccaacatgccctggtacaagggatggcagaaggagaccaagtccggtgtttccaagtgagtgtcgttctctgtctttgtcttgctggtgcttgggtgggcctgtgctgttgggatatgtcgacggaagctgactgtgacgttcctattttttgccacaggggaaagaccctcctcgaggccatcgacgccatcgagccccctgtccgaccctccgacaagcccctccgacttcccctccaggatgtctacaagatcggagg

SEQ ID NO: 2262 - DNA, 1480 bp, Xanthophyllomyces dendrorhous
gattgtttgaacgtgagcagatggaagaagtcattgtctgcgatatacaagagatattccagacgcgattgcatctgcagcacctagatagattctcctctaatccggaggatatcagatcgagtgatctgcgcctgttcgcacactgtttcagaaagggcgatgagaagagtaggagatggcggcatgtatcagtgaatgtacaagagtttctgatgaaaaattgttgcagatagatcgttcgatctggcgcaaaagatgaggcagatgaacaagagggatactgactgcttctgaagatggagtctttcttgtcgaaaagctctagagggggagcatactcagcgacctgaccagcatccataactttgattggaagggcataaagtgagtcagtatcatcagatcttgcttgcttactatccgagttcagcacctgatgagagtgtaggcatacccaggattcgatcactggtatcatacaatgcgaaatgatcggtcagcaaaggtatatctgaggagcattcaagagcacgactacagaattgatcgaactcactagaacgcaatggttgccaatctaaaagtgcagatagaacccatcgaggcatatgtcagtgagaacagcacaagagatgactgaactgctgggtggacaaagtcatacctgtgagcgatcgtgataacggtcttatcgctgaactcgttctgtgtgtcacgaatcgtgaccagcatgtagatgcagataaaacatgtcagatagataccacacggccgacggtaggtgctcagctcgtagttgaactacccagacggacggaacactgactttgatcgtgtctgggatcaacgaatctagaaaggcgtcaagcaaccacgtccaagacgttaggtccaacaatgttcaagaccccgagcacaacagcatgaatggcgcactcaccggtctcaacatcaacggaagatgtagcctcatcaagaatgacgatcctgttggtcaaaagatagtcttgaatcagacatcaagatgtgggtgagatattcaagcaggtggatactgacttggagtctcggacgacaactcgagcgagtgcaaccaactgtctctctcctgcactaaagttcgacccgtcatcctagatatcacgatcggcgacaaggcaggtggttggttcgacagacgtagaaagccaattaaaggcaatcgacaatcaacgatgagcattgcatttgggtcctcgaagatagaacatagaaggaaagaaagatgatagataaaacaacggtgattggaaactcacctggaccatggcatcaagcttgaactttttcagtcgagcatcaacctccacagacgcatcagccgaggcgatcaggtgagtgcgtttcctgtttaaagtatcaggatgtgtatgcagattaagtcgtaagaatcaacgtgacccggaagtttgaggccaaaagcacataatgaccgaaa

SEQ ID NO: 2263 - DNA, 1811 bp, Xanthophyllomyces dendrorhous
aaaaaaaggggggggggggacgaacgtcgcaaaagagcttccaatcggcctcccaccgcttggtggtctccgccagggtctttacaaagttcccaaagtccctctcgttcgcgccgacgtttccctgtgcgcgttcgagtttggacgtgaccctgtcgagctctcgtccctgggagaacgacatgttggcggtgtacgcgttgacggatcggcaatcctggaggtacttgtctctagcctggatatcaagacgggaggtccgttgattgggggggggggggtttaatttctcaatgatttaggaaagagccattggaaatgaaaggaattgaaaaatacagacaaaaccacagacgaaccttggcgacgtaaccctcttgggtagactttagtttgtacactttctccagagctgcttgagacttgacgcgtatccaaggaaggcgaagaagagaaggaggagaaagaaatagatggaacagagggccctcttggttgatcaacatcgatggaaagaacctcgacagagacgaggaaagcggaaagaaagaaaggaagaaagaaaaggatggtggagaaaactcacgttcttcttgaggccgatcatgcgatgtgagaaatcgatcacagggatctgagcgagccagccgggagaacgaacgtcagcgctccaggctctggagaagaggggcaaagacgagatgatggagagacagacagaccgacctcgagactccgtttcatctctgcggtcaacatcatgtgtccttgcgcttgttgttcggtctcttctttcagcgagtccaacgcggctttcaacgagctgtccgagacaccggtcggagacagagaggaaaaggaaaatgaaaaggcaaaggaaaaggacggaaacacgcatccgcgttagccaagtctggtgggaagaaaagaaggaagaatgagaaagacttgcccaatctcatcctttcctacggtctgcttcgccagtttggagagtttcctggcgtaatcctcttcgattgcgattctgtgaatcgggtgacagcgaccggaaagagagaagagtctgatcagaccgaggtcgacggggagacgctttgctcttccgggaaggagcaaagcgagagcaacaggcaagagcaacaggcaagagaacggaccgttctttccagaacactctgacctcttcgacggtccgaccggatcctctgagtctggtggtaagaacgtcgtatccttcgtcgttctgttcagtcggaacgacgatcgccgatcgatcggtgatccacaaaggcgaagggaagtggaccggaacgtagaacaataagagagaacggagaaagaagaggagcaaaggccatcagatacgcgttttttacagtacacagccaaggaaccccatggatccggaagatcttatggagacacaagagtggtgaaagaatgataatggaaacgatagtcgagtgatgatgggatgggatgaaacaatataaaatagaacgacacatcgcaaacacacagacccagacccagacgtaccattccccaaaatgaattacagtagctgctctcccttggccccccggccccggaagtcgaggaagcagaaggttgctctggcgaatggaaatgtttggcaagtgacgtctgcgagacggacgtgtggacttgcatttcgttcgtcctccgttgtttttttttttgtttttcttgtttttgtcttcttgtttggctgttcttctttgggtgggtgggtgtgttcaaggttcacttggttccgtttggggtgttggatgtgatccggggag

SEQ ID NO: 2264 - DNA, 373 bp, Xanthophyllomyces dendrorhous
gctgttgttctcggaaagctttagaaagatcttttagacattggaagctttcctcgtaaagggggagagcgtgaccgcacgagactctgcgagccttagttctaaaagctcttatacttgtccgttggatgcaagtataagatgctaaagaactagatctcgcagagttttaagaaaactttagcttttaggctttgcttggcttcagctatgcttagcaaagaacgttattgttttgtttgacttgtaaggacaacagaccccaaagagagaggtgttgtcctatttcaggagattcttatagcctctagagccctctttagtgaacttaaccggtctctattggctattggggtattgtactcgtcagagc

SEQ ID NO: 2265 - DNA, 379 bp, Xanthophyllomyces dendrorhous
tcggaaaggacatgtgacatcgagcgctctccctcgtaagggattttgatctatagccgtaggcttattaacttagaaagaaaagaccttataggagtatcatcgcttacagctcttccacctctcgttgccctctgagttctccctgagaactggagggggtatagtactcagaagaatctctggaaagaacatgtaacgtcagaggattcttcttcgtaaaagagctcgtgtaagagggtaagggaccctctcttaggggcaaggacgataccttgcggcggcaagaggttgcgaaggacgacaccttcgccgaaaggctctgaaagcctcttctaaaaattttaggagagggatatccctctgtagtaaggggttc

SEQ ID NO: 2266 - DNA, 1614 bp, Xanthophyllomyces dendrorhous
tactatacgatcctgatatcttgtcgtgaatggacagtaacctagactgtcaaaatgtgcgcacaggttgatgaacacgcattggaatagctgccggactgttacataagattcaaaggtcaagagtggactgttcgcttggacacttgttcgccatcaagttctcactgctttccctcagtcatatacactttgcccaggtgtgccaggaagaatggatcgagaaaccaggagaacagaggagaactagctaggcgttcagcagctttgtgaagagacgctctcgggaccccttacaagatctgatagtgctgcgtttgagagaatgatcgcatctacaactacaacgatgtcgagacagtcaagtactcaacaaagatgagtgcacgtcagaaggcatgcgccttgtcgaggctgtaagtccacgtcgagggttgaccacggatgccaccatggctaccgcgtggctaccggatgcaacgtaacacggacacgatctcccttctcttgatcatccagccggacacctcgtctcgtgacagtccgccatcacagtggcccatcatagttcgccatcgctgattcttctcctcctctttctactcgttctcctcaccttcgtcctcatcgttgctctgctacattgtacgactctttctttgttccagagccaagctgcaccgagtccatccagacacttggccatcccagcctcactgtctgtgcccatatcagtacttcaccactcagcgatctctagcagcccttgatgtccctcccagatgtcctgcccgactggttcagcttcacgttcgtaggactacaagctgtgagcgatgttctcatgatctcagcacttggctcttagcttccacctcacaactcacactccattcgactctgatccactctgtcgaccgacaggcagcactccttccgttgacgttccagcatgtcggtgatccgatgggaacgttcgccaggatactaccagccggctacgacagagctaccgacggtcttgcatcaagtctgcgggtccaaatcgctacgaccactggtgctcaaggtgggtgggcgatcgtgctgacgtcctgatcgctctctgctgatatgccatgagtacatatgcagcatatccggtgatagctatcctgttcataggtggtactctctttgctcgcaaccgcctgaaggggctgcccaggctgcaacaagggctgatgaagctcatcatctacgccgggctgttctctcatgtaagtgtgagatgcacatgttgtgcgctctgttgactaagatcgatgcttgttgtcgttcgtcaggtctagctgtacagcgtggtcgtgttgaagtatcccagatctctgcttgccactccttcggtctggacagacagcatgaagggtcttatctttggactaccggtagccactgcactgaagcttatctggctattaggtatcggaagagacactctgtagagaacgatgtggtcgactaacgacagcggacagaacgctacacgactgacatcttgttatcatcaactgtctgtatgtttctattatgtttttttcgtgttgtatatgatgggcttcgattgttttgtgc

SEQ ID NO: 2267 - DNA, 1173 bp, Xanthophyllomyces dendrorhous
ttgttttgtgctctgttggcttggtcgagttgtttggctgatgggatgtttggtcgatttgtatcaggacatgtccaccagctcaggctctcgaaaaatcatgcgatggccaaagacatatgcatagacttgtaatgtgaagtacgaagacgggagctttcaacaaagacggcaggacccagacatgagagagagaaaaaaaagagacaacacgagaggataaaacgaaagaggaaggagacacgaactacgaagaatgaaaaggcgacaaagtgcttgtatctgttcatcatacaaacgcagaagcaagacgggaaggatgcatacagatctcggaagctgggagatgggaaacacatagcgtcaaggttgcatctactaggatacagtgtcagccactcagaccgatctctgacggctgggtagtaggtatgtgatggttggtgattcgttagctggtagtttattggctgtttctatattgattactagttgagatttgggctagtcggtgatttctttcactttgccctcactttccgttcctctccgttcctttcctagccctgcctttccatcttgtttctttccaccttgtttctttctctctctgcctctacttctatctgacccttcttctgctctcgcatatgatcagacctcgttcacaagcatgtttatatatacgcatatggctctgacaccctgagaacgtcaagagaacgatggcgctgacctgttggagctggatctcgagcgttgatcttaagcttggatcctggtcgctctctttcgtctgctttttgtcgctgactatgctgtccaggactatctctctgcatctgcttgatctgttcccagaaagctcgaactctatttctcgccttggcacccgtgtcgatggcatgcgtgtgactcgctcggctagcgtcctcggtccgtttgacactgtcggccaaccgtcggtcacgtcacgcagaccgtaaagaaggacatctgtttcgccaccacacctgttaagatatccctctcacctttgaccatgctcttctacgactatagggattttcgggacccatacttcgtcaaatggctacaggtcaacttcgaagaagaacgatcctctgctgaagagtcagtttgtccatcagacctatcatgcgtcgatctctc

SEQ ID NO: 2268 - DNA, 637 bp, Xanthophyllomyces dendrorhous; identical to SEQ ID NO: 818

SEQ ID NO: 2269 - DNA, 477 bp, Xanthophyllomyces dendrorhous; identical to SEQ ID NO: 1327

SEQ ID NO: 2270 - DNA, 391 bp, Xanthophyllomyces dendrorhous; identical to SEQ ID NO: 820

SEQ ID NO: 2271 - DNA, 7415 bp, Xanthophyllomyces dendrorhous
  misc_feature (6986)..(6995): n is a, c, g, or t
tgacggactaggcagtgagttgggcagtgagccgggcagtgtggccaggcccgccacatgagacgtgacctggatgcggtgtcgttacacaaggctgtgtaattccaacaacatatgtgtgagggagcccaacatgcttagatgagaagaaagataagaataaagaaactaaaacgatactaagagaaacagccaggatggaagaagatatctgccaagatgtcgactgagacagaatcagtcgaagatgaaacagaaggattgtaggaaataaacctaacatactgaattcgaacgaataattccaacatctatgaccatcttgttcccatctcatttccatcttggtgatctcgtatataccatacccagtttatttttctttttccttctcttttctgatcctctcaatcaacttattctcactttgtgtgttaacatttgtttgagaaaatcagctatttcaataattcaatcggggaataaagaataaaccagtctgagtgaaacaaaaactataaactcatcttgagttaagaatgatgttttattttgatccagcacatggaaacaatactctcaagtgctcttgagatttttacgaccgcgtgggattgatttacaaaattgacaccttccactcagctttgattcatcttgctcgacattatagcgcacatcttatttcattatggtcggtactcatgcatcttattcacttcttcgtctttcatgattcttcagtgtatttttccatctttttagtgtcattttcttgactacgttttcttgcttgtatcttcatcggtatttcggaatttattctacccgacgtttcttcatgatgttgacacgcgtgccatactgggtatctcaagtagagatacttctcaagactttgaaatatcattcctcctacatccgtcatgtctctcctttcaacagcttacatacacaccacttgagcttcaatttttttttgtctgagtcaattcatgttcagtgatatgtcgatagcttgggcgttgtccgcattcgaactttcatcacacctcgccgggtgaaacgcaccgaaagtcgtcatttttttgtgcattttaaggtgaagacattttgagattttcttcatcatggaagtgataggacatctagaatttatttcaaggataaatattgacgtatttcttcatgtgtgcttatgtttgagcaggaaaagactggaaaatatgtgagatatgtaacgggccactaattgaagtttttgaacacagctgacgagtggttccagattcgatcaaaactgaagatgtttttcgtctgatcgtgttcaattgatgagatactattcaaatttttaagaaagcaaatccaactcaagccaagacacaatgattcaattgaacatactttagcgcctagaagtagtttgtctcatcttacgtttgaacattgaaaaatgagacaaactggagtggttttaatacatgatgaacgaactttatcagatgcataaatacatacatgatcgaatagatagccatacatctcagttgtcaaatacaacatacatgcatattacttaccacagatgaagaagtccatatgttgatcaccaacgttctcacacgtgcgaatttggcttgaatgacttaagctgtgaatggctgatcgagtttgtgaaaacactgtgatcatgagtagaactcgttgaggtgttttctactttaagttcactcaacaactacacgtcggccgttattgtgactcaagctggcccacttgacgattgacaatgcaaaagattcccacaagctacgccaagcattgaaaaactacattgtctagctcatctgaccgcaagtaaatgagagtgattcaataaacaacttcaaagctcatgctcagccattttcttttctttacattggactaatcgtgtttcagattttgatatcaaagttagaatgcgagaaatatttaatcagcatttgtggtgaagcaatgatgatagctagtaaattctttaattgaagtcatatgcttatcgatgtaacaacaatactcgtagaacgcagtcaatactgaaggacgtcgttaccagctctgatgaagatgaggagacataataaatcatcaagtcgcattgatctacgtttcaggcgatcacaaaccagcacgcaacatacgaaagacatggtgtcagaaatcaaggtggaggcatgagacattaggtgaatgtttcgatgatcgttttgtatgccgagagattataactgatatgaattaattttcctatggaataagatactgtactcatatgccttaccattctcaaataagcacctgcttagctcgtcacctgattgcctgggtaaggttcaaactcataaactgataaattcaagtggatatcgacacgtctttcaaacgtttggaaaaaattagcaaagcactcacttgcaacagttgtgcatacgacattttcataaaggtataaccttggcagtgctgtaacttatgtttgcggctggggcgcctatatagtacggaaacatggctatgtagaactaggagctattggaacggctgtttattgcttgactcctctatctttgattgaaaacaaccgcgaccgaacaatctgccacaactgaaagcttggcacccacttgtcgcatgatctcagatatctcgccattattttggcatatgcaaatgtcacctttccaactgaaactgagtttgactattgaattattttacataccttgatagaagattaacaatatgtgactgtccttttcactcagatactaacaaacaatccgacccctacatcattgtctggaaactgaatcttttcccccagatttcgcctttacttcgatttcgagtttaagctaaagcttaaatttgaaaagtttatcgttgagtcaagtgagtgtatcatgggatttttgacagagaaatcatcaagtaacttgtgatgtgtgcaattttccggtgttttcaacaggaagtctttgtaataatgataaaatgttgagcttgggcaatactctatctcatgcgattatcgtgtcatatagggaatcgccaggtcgtacttgcacggataacatatcacaagatcgatgacttgacatatccttctattctctttatggacgtatagaaagcaaattgcagcacaaacttttgctgcacatggttcaaaaagaagaatggcgaactacaaagctagaaaaaaagatgtgttcgaccctcaatactttgtttatcataatcaggttgtgtctacttcgatatgagcttaaagattgatcctatcttttgtttatagacaacataccttcaaagacatagtacatgttcgtatagcatttcaaatatggttgttgaattcatattttatttggtgggttccagatgcatacctcgtaatgaaacctgttgttacttaagcaagttcaaccactacgattttaaattcgtattgtaacaacaccttggtctcccgctcaatggaaaagtacacctcagttccaatcagcagctgagattataatgtgttaccaaacgtacacaaatagacaaacctggcaattttgacgaagatataaggtgttcagagtttgaatgccaccaactatattggcaaccagcagcctttatttgtctcaaacagtatcaaagacaaacttttttacctcctctatgatggaaacctcatagtggcactactcaatatcaaggtggaaactattcatgaatcaacacgagaggaaatggtagcaaactaaaagagtttgcaatagattgcgtctttcgtatcgtttttgccatttatgaggtactttcgttttgactgcgaacgtgtctatgacatacacgactatttgttattctgtacttaataataccctttaaaaagatctgatggtcatcacggttgtatgttgatattgacaattcgatgacgaaatatttttaacatttcagcttagaattatatatagaatctcatcagttgacaaacgagaatcttggctaaagtttccttcttcggtaccggacctgccaccaatgcacatcagacacctggttcttttactttttcctgtccctgcaagtatgaccgtgaactctcaagggcttgttgtacgcagtccaacctggtgtttgaaaagcaacccgattcgtttaatgtatatattccgtatattatagaatcaaattcgtatcgcaacggctttcagaaactaatgttatgaaatgatgccttcttcaaaaccaaacataaaccgtcgattttagatccatgccggtcgtttgtcagcttctacggctcacacctccctctacgattgccgatacttcgtgtgtcattgcttcttgactgtttttacaatgcacgcagctcattacgcccatttcaaaaaaggtaaaacaccaataatggtacggtatcaagttacctatcattcaggcgcaaatcttcattaaatgatcacagtgaaccatccaaaatttacctatcagtaacaatataaaaataacagttccatagctcaaaacctgcatatgtccgtgttgacgagcttttccgaccttttccaaaatagttgacaagggtgagcttcatctccatcactgatttctgaagtgttatatcactctaactccataatacgcgcaaatctcacattatgaataaaagagtgacatcaatacctgtaattggtctgggcaatgagaacactttataatacatattggcatcaggtatgacaatcactagttcctttcagttgggcacaagtcatacacaaccatcaatcaataaacttttttatatagactaccaaaataatttgcaaaagctctacccacaatgagttgtttatatccaagtaagctcgagtcttaatctgtaaagaagattgttggatacattttttggatgagcttttgtgttttatcgatgatatgttatgttcattctgtatgatgatggtatattcagagaatgtaaggttgaacgtaataagttgttgatcgtcaatcagtcgacaaagaaataatttcaaactgcaggtctagtgaatcagaagatttgcgctgagcatacttcaagcctagaggtcagagcatatgatgaactggcagaaaacatcagttcattcaatcatcaaagtagaagacagatttgagagagaagaataaatttccacgagtgagaaagggagttgatcattcagttcggtatcaaatcattgccaaatacttcttcagactcaaaaaatgagaagcaattatcaaaagcaagtgaacggagaacattgaatggatggtccgatgtcatgtcataacatataacaagtaatccaatttgatgtaacactgctaaacataaaagtgcgaagctgtcagatttttgatccaagctggtatataatatcatgacatattcaactttgtattcgttctcctttgccaactaagcgctttgaaatatgttgatacaagcaatccattaatttcagctcaagcaaaacagtatggaagagtacatatctcatgtgagaaggtctttgacatctacagtttacccacacccttatatagcattgtctacatggtttatatcgctcaagatttcattttcatcataaacatcaattggaaggtgcgaagatgaaagtcgattgaatctgatgatgaaatcgatgtttctcaaacacatacaaaagacttgaactgatgcttcaatcttattgagaatgttcaaaaggattcgacccaggctagcttagcggacatattgcaatatatatcatcaaattttgaattcaacagaaataacgacacttgcccatatccatggagtgagacatatcatcgaacaattcaaccttgatgactgttaggttgtataattcataaattgctttctaatctgtgcagcgacttcgatttcacaattctttgtctcgaacatttgagacgatgtctgtcaacaaatttttctgagcaaaaacccactactatccatagatgatatattctatttgcaagatgactcagcatccagcacgttgcaacttactcaataaaaccagttcgcaaatcaatacaacggatactgaagggtttcactgttggccatatacccatctttatcgaggcatgtcagactcttaacgaagaagcatgagggatggtgaagagcgatgcaatatctttctcaaagtgaaaacttgtgactaagaagaatcacacttgacagcattgaaagtaaagacaggataccgagtacgaagctctgagatagcatgactattatttattgattgaacatgctagatgaatgcgactttctttcgcatcgtattcctccccatcggacgggaaatttcaactgtttggtggtagagctatgtgcctcgcgggcagtgtatttgaatagtaccgttcgagaagggatacatggaacgtcggatggatatgcatggtcgatgggagagccagtcgaaatgcggaattgccgacggctcgaatgatcttgaaaggaccaagtagcttgaaatcgagtttgtcactcggacggtcaggttttacattcacccgcttgagaagcactagctcgcctggcttgaatggaggtgctggtgttctatgttcgttcgcatacttttcctggagatcttgtgcgatcgacatgcccgaacgacagaacgctagcgtcttttgcacatgcttcacatggtcctgggcggctgggtttggtccctcccggatggtggctgagaaacggggatggtagccatagttagcatagattggggtcatgttagttgtggtggagatcgtgttgttataagagaactcggccaacgataatcgttgtgaccagtcgatctgtaaatagtcagtgtacgctcgtaagtactgttcgacgaccgagttgatccgttctgtctgtnnnnnnnnnngaagcactagctcgcctggcttgaatggaggtgctggtgttctatgttcgttcgcatacttttcctggagatcttgtgcgatcgacatgcccgaacgacagaacgctagcgtcttttgcacatgcttcacatggtcctgggcggctgggtttggtccctcccggatggtggctgagaaacggggatggtagccatagttagcatagattggggtcatgttagttgtggtggagatcgtgttgttataagagaactcggccaacgataatcgttgtgaccagtcgatctgtaaatagtcagtgtacgctcgtaagtactgttcgacgaccgagttgatccgttctgtctgtccatccgtctgtggatggaacgaggtggaaaggttctgtttgatatcaagctgtgagcacgccgcacgcc

SEQ ID NO: 2272 - DNA, 573 bp, Xanthophyllomyces dendrorhous
gtattgtgaccggaagacttgtggaagtcgcagaatttcttggctttgtacttactgtcactcttccttccagtctgtgagatgggattgtctgggcaggctttggcaaagtggccaaagtccccacagtacgaacattgtggactggaaggagtgacagcaagtgcagaggttgactcacggctattgtgaagtgccctggttgtgttccgaagttgcttgtcgcggaggatggctccagaaacgaattcatatgttaatgggttgggatgacccaaagcatcattgcctgccaaagcaggtaagctggccacgaaggattgtccgtgagcggtagtgggtaaagatcggataagaatgagagcatagagttcattgtatgtcatggttttgccggcgatctgttcagtcaaatgaagttgtcgaccgatatggtcgacatggctttgaagactcggagccgtctcggagcgtatattccagacggagctgagaacctgaaaaacaccgacggtgccttgttgcatatgaacagatcgaaggacttcgatctgtttgtgagctgttagacac

SEQ ID NO: 2273 - DNA, 400 bp, Xanthophyllomyces dendrorhous
tcttccatcacatctatatcccctgtatctcctctcttagcctccatctctacttctcctgtgacccgttcagcagatcactttcaacagttgattcctatacatgtgtctgattattcttgccctgacggcatgcgagacaagcatgtcgaactaacatctctgccactccgttcatccgagccaaactctgagaagcgaatcatcctcttaggtacacttcagacaggcaacactcagacctccgttcgtgtactcctcgactccggctctcaactgaacatcatcaaccataagctagcctccagcctccctgccaagattgacatcctttcgtccccgcggttagcaacaactgtggatgggacacccttgactactggaccgattgactctgttc

SEQ ID NO: 2274 - DNA, 851 bp, Xanthophyllomyces dendrorhous
tcgtctctctctcgtctctcattcttgcctctggctcctcacttccctctgttccctcctgttctctttgcttctctctctcgttcgttgtcgcttctctcgttcgtgtcggctgctctcttgctatgtcctccgacagatgaatgtcatcatcgtacaggtcacaccgatggaacacatcagaagatcttgcctatttgcaaagaaaccacatccatgcaaagtctgcagtgaacgacacagacatgcagacccgaagaggaagacgacagaagaagacagcagaagaacgccacaagaggacggaaggacgatcgttaatgtgtcgtcgacagatcatttccaacagccagttaggcaataaccaatcgacccgaccgcacagtcgacagcagagcctgctgacgataggcaggacgcaccgagctgggcgtgcccgattagaagcgacgacggccagatgatatccaattgctctctgtcgtcttctctcgaggcccgacggggagaagacagacgatcgagctcatccaagacgataggaagaaagaactggagagatctgggaaagataggcaccttcaccgctggcttgattgctggctgctggctctgttattggtcctgatgagttacaaatagggaaggaccgatacaaaacaacaaatacaaaagatacacgacgcctccagcccgcggctttgataagggaccggatgccaagaggatctgataagggtgaatctagagccaaagtctaaggcaagtgtctaacctcgaacccgggcgcacagaagtacacacacacaggcacgtccacaggcacgtccacaggcacgtccacaggcacg

SEQ ID NO: 2275 - DNA, 451 bp, Xanthophyllomyces dendrorhous
atttttcttttctttgctcactctcttcgattttaactcaacacccctcactcagcccttttctacactgtacatgtgcgagccagtctctttgtcggtatcaacgcaagtgttgtggtggtagacaaggctcatacctatctgattctctcggcgctcgcatccggtctgtccattgccccgctgcgaacaccatccttctaagacctgaccgagctgtactagcataatcgtcgacaagtagcctgtgcagtcagtcagtgtcctacaggtactcggtggacgggtggagatggaccgtgctcgaagaagggactgactcatttcattgatgacacaccattgaacctcgcgatctcctcatggtcggaatcggccagatcactcttggcaagtatctttctcagcacgggagcttttgccgacccatagtcgctgatgtggtcaaact

SEQ ID NO: 2276 - DNA, 387 bp, Xanthophyllomyces dendrorhous
tcggcagaggggaggacagggacgcacaagcttcaagctagtcaccgggttggttcgagtctgaagaaaccatttccgagatctccttcctgatcattcggagaatgttcctgaatgcaatatctccttgttgccaggcagctgatgacagagcaaacaaagctacactctcagtctctcaacgacctctctctaaacgatatattcgaagaaacagacagcagcagaaaaaagtgaaacgatcaacctaacgcactgtagccagcatcgatgacaccttgactatctgcgcaaacttgaatattgaacgtacctccgtccaacgtgagtaggccagtatgatgaccagaataacgctgcattatattcagcgcactggtctgcttg

SEQ ID NO: 2277 - DNA, 29996 bp, Xanthophyllomyces dendrorhous
agattacgctgaacgtgtttgctgagttcatcggtggtctcatttatcccggaaaagctctttcgatgaactacttcaaatcgtatggtgttatgagttgttacaacgccatcgcatttgcccaggatctcaagctcgcccactacatgaagatcccacagcgacacaccttcgccgtccagatctacggagccatcatcgccaccttcgtctcgaccgccgtcctgaactggcagatgacgttggaggatgtctgcacgaccagtcagaagcagcacttctactgcaacggagaggccaccttcttcaccgccactgtcttctggggtaccctcggcccaggacgagtgttcggtgccggcggtatctacacctccctgctctacggcttcttggtcggtgcggtgcttccgttgccgttctacttccttgcccgaaagtaccccaagtccctttgggccaaggtccacgtcgttgtgctcatcagtggaggcattaactggaacccttatgtgacgatcggaaactactggcctcaggtggtgatcggatggttcttcctggtgtacatcaagaagaaataccttgcgtggtggtcgaagtacaactacattctcgccaccgctttcgcatccgccattcctctctgcggtatcctcatcttcggcatcatctcctccacttcggctgatgatgtggtcggtgattggagtgtaaatactatctatcaagagtcttgtgactatttagcgacgagttcgacgaataaatatccagagtgcagaaaatacaagatccctgcggtcggctactttggtgcagcgcccggtagtggcgcttgggactaagagtcatttatccttccgcagtcttgatttgtgtttttctccttcttttggttttcaatattgatcttatttttccttttgtaattcgatcattatctcttttccggatctcctcttcttgcggcctgttctttggtctctgttaatcgttgtaataaagctatccagtatgcctgccccttttccacattagttgtaaaaaggatacctacttcctctctactcaaatcgacatttctatgtttacccacgtccgttgtcctttctgcaactgttatagatgtcctctttctttgattctagcttctcttatcttcaagacaaagatctaatgacggatcaatctgaatttccgtgcttctgctcgttgtatcgtaatacgacatcacaagaatgggttcccgatcgtttttttttgagaataaatcataagatcaactggcttcttaagaagaatcacctttgctcttacgccatgggcagatggataggtgaataggtttaaatatctccgaaccgatcgggcatgagtacaggtgcgaacctttggacgacgaaccatcccgcaacgagaagtaaacactgatgagttctcgcaaagaaaggagcgggcaagaagatagaagagaagcaagagaagaggatacatacagactccaaaggtacatccccatgcacaaccaactgctcactattcgcatccacatcgcgctttctgatcttccgatgtagacgtctgcgtttgaatcttctgaagaagcagagtagacaactttcctgttttggtccaacaagttgatgatgatggaagcaagagcacgaagaagagaaaaaggagcagccccatatgaaagagacagaaggaaggggattcaaaagaacatcagagaagggataattgatagcgccgcatgaaagaatagagcgaggcaaagcaaacgatgacgaaccagtctgtaagtagtccggcgacatacatcgatgctagaataaagatgatatggaaccacgaatactacaatcaaagaacgaagcgagggacgacttgacatcagcaaaggtatgttctcgtttcgagtcactccacaaagagaaagactgacattgtactttgtgaagtttcgctcgtcgtctcgatcttcacctactggcgacgagtttccatcgttttcgtcatctgactcggcttcttcatcaagaacggaagcagggagcgatctgtagaatattcaatttccggagaaacatatcagcccacaacgttccttaatcccatctctgaccgttggagaaggaaagtctcgactcacccggcctcgactgctgccaacaaagcctggtacctcattccatcctttcggactgcctttggttgactagtgataaccagctcattctccgacacacctcgcggtccttcgctatcatcctcatcattctccaaccggatgactccctttctaccgacttgaccagctaagactttagtctgagtggccgctcgggtggtcgagtaagcaaccgctgcgaatgtaaagatcgcgcccatgatgaccgttgtcgttcttgcgcctgatgaattggacgtaatcgggttgcaagtcgagtgatgatcgtttggaaccgacaagtcggatgagttcggtccagaatgattggccacagccgaggcgacaagataggttgagtaaatcgagagcatactcgcttgggccaatccagatttcgggttagattcctgaacggccggaaggacagaagagatagtgatcaccagaacgaggacgacgttggcgctgatgaagaacgtgttgagaccacagccagaaccaccgaaaaagacaaagagaacgatggtgatggcgatagtaagaatgtacatgagcaaagttgaaccgacgaggaagtactggtaacgaggttggagcgtagtctcataggactccaacagggtctctgaccatgtatgcgcaaagtcgatcaacaataccaaacccagaaggatgaacaaggatgatccgacaggggctatagagagtatcaggattaatgatggattcaaaacctggaagtatgtatatgagcaatgaaaaatgactacttacagatatacgacccccagaacatgaagaactcattcggaatcaagaatgacaaaaacacaaggacaatccaaaggagaacttttggtccccaccaactaagaaggcacacaaagtcatttctgtgagtgaccgtgtagatactgacgtcagagagtctaagcgataaagacatacccgttctgaatcgatgctcgcttggacttcgtgttgtgcacaccgattaacagagacgataagatgagatgcaacagtcccaaggcaaagcaaaatcgatggacctagagtgaaatgagaacatggatatgtcgttaaatcggtttgacactttcgagtggttcatcgtggcaacttactgcgagcaacccatagcattttccgccggtacaatccatcttgatccaatcccaagagatcttctcaatttgacgtatagccgtgtctgttctcatgagccatgccagcattgaattcagacaaaatatgatctacccatagtgaagagggttgagtgagtggatgtaatcaagccggattgacatgacaagaatgagagatgacttacagcgaaccccactcgggtagcgatcgagcctgacgacccattgacgttacaacagatgaacaacaggagaggatgagcataatatcgtgtcttcgcactctgcgtcaaacccgcactcactattacagttgcacgatttgaacaaggctgaggcggccgtgcccgacatgaagaacagaactccactgagagcggatgtgccaagcgagccgagacttccgagcaatggtatggagagcagtgcgcccatcttgtaaaggagggactagtagtggatgagtagataagagcaagactgatggatggattgatcagataaagactgtggtcgttatggtcttccaagatcagcgacggccggtgtgtgtgggtacgggtgtgggtgtgggtaccgaagctgtgctgacctatgtgatcactcgccacacacgtgacaacccttccacatcatcgatctctctttctgctgctcatcctctatcctaccatcatcatcatcatcatcatcaagaagctctctcttgtatccttcatcctcttctcacaatcagcatggattctctcaccatcagactgagatccaaagagggaacttccaggattgtcgtagcaaagaccacatccggtcaagatctcgctcagaaagtcagttccttctggtttatctttctccacacgttaaatatgctgacgacgatctttacgtatcctatgtttctgaacgatcaaatggaacaaacaattcagatcatagatagtgtgccagatgatgtggactctagttcaataaccatatccaatcagcctggctcgtctggcgagagactcagccttgacgccttgaccggtagatcagtgagcgacatggggttccagtcagtaatcctttctttcatgctctggacatcgatgctacaaccaagtcagataatagatttcttacgattctcagtatttattgatgctctcagaaatggcgaacttctctttttagaatataaaattggggaagcgccgctcaaaaaagcctccgttcttgcgcccacccatacagccgcaacattggcgtctggcttcatctcaacccctttggccgatgtcccaactgacccgatatcgacagtcttcaacgcgaaccgggtagacctttcaaaagtcgatgaagcagaaggtgagcttgtcttagtacttgtgtcaaaacggcgccttctcacggtatttaaccaatcctcttggtggtttctacagtcgacaaatactatcgatcactgcacggaatgattcctcgctcaagggataataaaatgtgccgacacggagataaaggaatgtgtgactattgtacgccgttagaagtgagtaaacgtcctgctagtcattgcataccgttcatctgattatacatttcttatgcctcgcggactatcttttgtccatgccagccttacgatgcgaactaccatgccgaacacaaaatcaagcatttgtctttccctgcatacgttcgaaagatcactggatcagtttcagcctcccaaacgtctacttcgagtacatcgttgcctcctttggaccctttggattacaaagtcacgataccttgtccgtccgggtcacatccatcatggccgtccggtatctgttcgaaatgtcagccctcagccatcactctccaatcgcagcctttccgtttggtagatcatgtcgagtttgctaccccctcccttgtcgaccggttccttgagggttggaggcgatcgggccagcagcggctaggatggctgattggaaagtatgagccatacgagaatgtgccgatgggtgtaaaagctgtggttgaggctgtgtgtgagccgatacaggagagtgaagtcgacggtgtgtcagtggacgtgccttgggatgaagaaaagagcgtacaggagcttgcagggtggtgcgccaaaggattagaagttgtcggtgtgctgtacagtgatttgacaccgtgagttatatgttttatcagggtcatcttccttctgagcgtttaactcaaagactcaactctttctcggcgctactgatcaacaggtcaccagatgatatcaccaaggttctctacaagcgacatcctcaatcgtactatctatcctctctcgagcttcttttctccgctcgcctccagtcggctcatccattatccactaggctatcgcctatcggccgatttgggtctcggttcgttacatgtgttttgacgggcacggaagagggaggtgtcgatgtcatggctttccaggcaagtgaacaggcagttgccatgttggaggcggatatgatcgaagccagtgtagatccaggaattgttcgcgtcaagagagaaggagaaaagagatacgtaccggatgtcttctacacgtaagtcttccttcaaacctcttttgcccacggttctttttttatattaaattgatctggccgatgcgacgtgcgcgatttagattcaagaatgaatataagcttcaagtcaaacaatcagccaaaccatgcttcccagtcgaatatcttctcgtcaacttgacccatggtttccccgtttcacccgcaccactgtttccttctttcaaatttccggtgtcaaatcgattgctgtcgtcctcggtcgagcagccgtcaatgagtcaggttatcaagggactattgccgatcttaggagacggctctgctttagatttcaagagcgaagaggttgagcgttgggcaggtgactgggagcttctaaggtttttgcagaaagaaggaggtttcaaccaggttcgagacgattttgttgctacttgtattgtgaattcgtcgaacgagataagctcacccgatggctgtattttctcaatctgtctttttctttataaaggaggagatgaagctgctttgtagggtagctacaggccattcaaggccagaaggagaattcgacgcgttgatggagctcgctcagacagatggatggaggaatctgatgagcattgttgaagctgctgctgaaggtgaattctatttctcttattcttcgtcaggatggcctcacttagctaatactctctggaaacttttgtagcacaacaacaacaacgactacagcagcaacaacagccacagacaggatccgactcgatggatatggatggtttcgagatcccaccagatctagacgacccgttcagttcaggaggtggcggaggtggtagcgcggtctgtccacattgcactttcgaaaacgatcacgctggtggtgattgtgacatctgtgggcttccgctcagtggttagtagagtgtatacgtgtgtgtatgtgtttgtgtacaggttatgggtgttgatcgatgagcgggaatattcgaatacgagtttgattctcacctaagtctgttgctacataacccacggacatctgggcccgatgttccgcaaaatgaaagaacaactgcagagagggatgccagaacccaaacgaccagctatttgccatctgacgccctcatatacagagcgtacgcacatcgaaggtcatgtctgaatctcctttgtcccctagcaggacatatcaggatggatcggacgaggatggcccgtcaaagtcatcgggtgggcagagaacaaagactgcgttgaaccggacgtccagagcttgtgtatgtgtcgatgcttcgctttctctcacctttacccgatcgagataggtctcagtatcttgggagaagtgagtgagaccagagtactatggatttaaactgatcttttgtttctttttctccactgcttttacgtctgtttgtgtatccaattccaccactctcactggttggggtcgtgctttgcttgtatttccttccgtgggtccatcaaactctcgaaaacgaatcatatttgtttcatcagaacaattgtagaaaacaaaaggttcgttttagtcactctactcgatgcgttgtattcttaaatgaagactaagatggttgtgcttctggacacgtggcgcgtctcgctgtagatgcgatgtataggagcagaggatcctccctgtaagagatgcaaaaacgctgggttaagttgcttgtttgaaaagccagccaaggatggacctcaagtgggcgaagagtacgtatctgtatccatctttgtctctatgctgtcagtatgttcttgcaaagatctcgtctgatggatagagaatggggtttcaacggcttccagacgaatcaagcatctcgaaagccaagtgacgtccatacagtcgactctgaccgaattggtctcgaccctcaaagccacagctggtctacaagccccaccatctacctctctaactgagcctcaaagaacttctacatatcctcccccaccatcagcgccatattcgggagattactatccccattctcatcctcatcctcatccccatccccatccgtcgaacgctttacgctcgcctcaccatggatctacatcttatgatccgtcaggttatcctgccaagtattcgtcctcaaactaccctccagataccttcaactcttctgggtatcaaaatcaatcaggaagcgcaagaggagatgtagagtcgtcttttactgacgggcgcgcttcgtcgagttatgcttcttcgggtttggatcagctaagcaacgcgcttctcatgtcaaacactcttcaagcacctggctcaagctctcttcagccacctggcgagaccaatcgacgttcgagtagaccagggggtctggctgatcatacatcatcgtcctctcaatcccttcggaatttgtcaaacacgcctttaagtatcttaccaaatcacccctatccgttgcctaataggctgccttggttagatacgtttggttctcaaagaaccactgggtcaacatctggaaatggtgctggtaatgctagtggtggagggaacagctcactgtcgtccacaaatacgagtaatcagcaagagacatcctcatccatctcgccttctgtttcagataaattgaacaatcgagcgagctcaacacttcgtcgaacgacttctggactcgatcagcctcatttctatccatctctaccgcaaacgtcggcttcaacatccacatctaacccgtccccagccacaacttcatcttcccatctctcttcatacccacatccaaatcatcatggtttgttcgcacctcaaatttcatcggccaggacatctccagccggttccgaagcggatgagaacgaactagagcttgagatggaactcccctctagcgcattgactaatcctctaggagctatgggtgaccttgctcaagcggccggtggtcaaatagatcaagctgttgtgtctgtcaggcaagaagaaactgaggaagatggaggaggaataagtgcgttgatgttactggccggggcaggtagtgaggcgaggccgagtaagcgcgcgaggttccaggataacccgaaagaagagcagagtcatgagaagaaggaaaagctaaacactgatacgggaggtaaaaggactagtactagtggtgcctctagaggaggcgcaggaacaggccgcatcaagtcagaaagaggactaggagcagcagggaataaaccggatgaggaaaatggagggataaagaatactgctctggaagaaggtccaggaatgagaggaagtattggcggtccacctgtagggccaaacggggtcattttggactgcgttgatgctgggttggtaggagacgaggaggcaaggacgttattcgagttgtaagtgaaaccttctcatctcttctcgctgtcacccttcttatctattcgaaccgatgttgacacacgcctttgatcttttggggtatgtcgttgataggttttggtctggtgcccatcaatttctaccaatatacgaaccgggtcgagatacttttgacgagtttgtcttcttttctgtctttcacatccttgttttgtgcaatagatctgattaactgatcactggatatcgtggatgtgaatgaacccatatagattgaagaggcggtctccattctcaatctcggtcatgtgtttcacgggcgcaagaatcagggatggtggtcgtaagatctcttattctatttctctcttcatatgggtttgaatcgtctattcacgtctcaagaaggggttctaatggtgatttcccacaggaccaagatcggaactacaaactaatctatggtatcatgttcgaaagatctctcaggaaacgtgcgtagattctcattttgtgcgatcaagactacagctcgttgagaggttgatctcgcctcgttttgacttcttccggttttgtaaaagactattcaaatcacgtactcgagtggaggccgtacaagccacaagtgagaacatttatatccgctctacttggtttcgcgtatgacatagtatactgatcagattcattggagagcatgctatcagtcctcatggctggctttaatgagtacggttggcttctggctggtcatgccgttcgactagccttcgaaattggtacgttgtatctcttttctcgtcagatattcaatcagtcgtcgaacagtcggactcacatgtggatggttacatgaaaatgtcgcctgtatggctggcggagagtaggctgtcattctgctttcttaaagttagttaggagtggaatgggtgccggcaagacacctcttcagctagaagaagatcgtccgctggtgatcatgtctcgtctctggttctgtctcgttagtactttccccatatttcttcctcttcaagatgatttgtttagctcaaatccgttcttcttctgtcatcaccgtgactactgttatctcgacagtacctcatcgagcatcagatgtcgtatggaacaggtcgtcccccgatcgtcagagaagatgagactatcctgcgctgtaaagagtttttgtctcatccgttagcggttgatactgactggcggttgattgcctctgtggagataatgaaaattcgaggtgagacaagaatcttaccctatttctctacggtttgctctgcctcttcaaacttcgggataggtattagattggtttgctgattttaaaatatactgtgctattgtgtaatcaatatcgtatcaactatccgtctggaccggctgatcaattgattctgtagcacccctgcatcttcagttgtataaccttccggaagacgtggcagtcgggacggacacgctagaaaaattgcagcaggccaacttggatttcaatacttggttcgacgagtgggacgctcgaattggtgaataaaatttcaactttgtaatatatttgctgaacaaatcaatgctgacctgttctgctacggttgacttcatcttcctgatgggttttgaagctgagaagttcggacctgagagagaagcatttttcagacagtcgttaaagtgagtttctctctcgtctttactgttattagtcgacttgtcaaaattctgatacaggaataattcaccttcaacgttgcaactctccttctaaattcaagaattcgtgagttccattgaagcatgttctgtttgttcaatcagacgtcgatcgctaatccttatccctttgtaaaaccatccgtgttgtcgtccagaaaaatgttatgcacaactgttccataactgtatgtaaattctctgtcgagtatcgaaggttttccacatcagatccttagtaggtttgtctgtcataggtaccgcattgcgcaagatccacaacccggccgacgtccagaagatgcatccagctcaacgagagcttgctcttctcgctcttcggaacgctcaacagtgtattgatatctgtctacatgccgaagcataccgagcgtctcttcctttcgctgtgcattatacccgttcgtctcttgtattctatcatggttaatgttctttatatcctaaaaatctttctcttgggctggatgtgcatgtatagatatttcggccgcttttgcggcgactcttctcattcggttggcccgaattttccctaccgagttagatcttcgacagacagctcgagatgttgagcagctggcgaaactcctagcatccggtccgtccctatattctgtaacaacttcgttttcttgactacttgctaattgcttgtgttcttctctctaatttgggattatcgttccaaagtgcctgctggtcgatatgcccgctcaatccgactaactcttcggtccgctcgaagacgtaaagtgatgcctcctccgtctgcacttccatctcctacgagtcgatcaacccccttaccttctgttgccaagaacaccactgccaccacgccattgtcttcagaaaactttaccaatgtgaaccaaacatacgctcagtccacgatgctgcaatccgggttgggaagtccggtagaggaataccctgtggaagtgagccaaacgttcgatgcgccgacgacgacgtcaagtatagagtttgagagtccgccggattactcggtggatttcgattggtcttatacggaggatctgatgggcaaggttaatccttttaattacatgttgtcttgtaaggacttaaggtagagtcagaagtaaccatgctgacactataatgcgggatctgccttccaaacagatggggctaaatatgaccgaaggaggccaagtacccttgtaagccatttttatgcaaatcgggttcagttgatactctatatatcctaattaccgattgtttgactatctgtcgtttaatcttcaggtggctacatggctctgatattgggtctagccagctcccttcggcgggaatggaggtttgttcacgggatttgctctcttctgttaagttatgacgccgcctgatgcagtgattttcttctttctttgtatccttcgttcttttagaatttcttcctgcgtaagcttgcgctcaacttatctctttttcgtcctagtcttcacatgagttgatcaaaacctctatcgttctcgctctacagcttccgatcttgacgttcgcctgttacacaccagctttggatctcagtcatctgcagccggagaacctactcaggaagattcattcggggagatttggtaatctctgcgtgtaaaaccttccaaacttgatttctctatccttgtcttgttttagcaagattgaatactgtaaaggggtttgatattcatttttattctcgtttttactaaaaagggatttagttaatttgaggcttcatgtgagatgtattaatgtaaagacttttgctctagactattcagttggccacaattcagacaaccggttgatctctcaatttaggctttgaagaagcgcagcatggacgatccactctttgagacagttcataggtgaggctggaggcagcagaaatgatctagaacaaggcatgttcgtagaaatttataggcaaaacgacgtagtgacgagagtggcaaccaaacgatgcaagcaagagaggctcaacagcatctactttttgattgattgctctgtttcctagcgacgtcgatgtttcgacttcttaatgagtcttcgtcgtcttcgtaagctgttaatgggtcgataggatgagatttttcatgctcccacctttcagaacgataaacgaagatcacaatgcagaacagatggatattaactcgaagaacaaagagttcgaaagaagaaggatttaaaagaaaaataaacagaggcactcacctttcccaaactcgtttggccacatactcaaaaatctcattgacgccctcgccagtttttgccgaggtggcaaggaataacatcggcatctctcctgatacccttaagggtggaggaattgttggttcttccgttccgccgtcttgtttctgggcccattcgatcgaggtgaccgttgccgctgacgatgaacccgtctggtcttctgcgatagatgctgagggagatattatgcccggtgtagtgacaaacgagagactcgatttgttgtgtcgatgccggctttcgttcctactgtctctcatagcgctcttattccgccttcccgtctcggtgccggagtcagatctgggtctcgagataccttcggtggttggatctgaagatgggttgggtgtataggtagaggtgataagaggtgacggttcatgggtaaaagtagtgagtgggccgccgctgatacttgcaccattgggtcgaacagttgacgtgctcgaatcagcggaataggcggatgaagcatatgtgtcgccactttttgatgtttgactcgtcatcgagtctgatcgtttgaaggtctttggtttgtcgagcgcagaggacgcgaagaaggaggacgatgaggataaggaagaattagagggagaagccacaccacctatggaagctagcgaggaggacagagagagagctgagggagaattggacgacgggagcgtggtcgtcgcgtctgacagatttgttcgggccgtattgaacgagacgaatgaagaagctgttgtcttgaccgaaggtgtgcccagcggtttcacatctccaggcacagccgccaaaaggttttcgttggaggaagctgtacgctgtgctgtagtaagagttataggcgctggtgataatgatggtggagctaatggaactgattccttaggattgcctctagtatcttgttgaacggcataagggtccgacggtataggatcttctctcgagagatattgcagttcaggatgatcacggaaagaggaagatggggtgtgataaaccgtaccagtgtacgtatttgtaagctttccgggagaacacgaccgtgttctgtgattgcctggtttcaatccggaggatattgaatggttaggaggaatatgacaatggtgaatatcaatcgagcgtgtatgattcggctctaaagatgtatcggtaggaggatcagatgatgcgactccgacagatgaagagccctcaggtatcgatgatgaggatgaaaacgatgagaatgatcgaagacgagctgccgctgctgcaaaggatgtcgagaagctggaacgcggcccactcttctgtttgttggttccgtcatcgccatctgttttatctacgtgctgctttggtagtcgaggaggaatcaattcttcccatagtttcctcacttcttcatctcttacgcattgtacctcttcggactcggctttacgcccgttcggctgtttgtttgaattcggcgacgacagtctgtccgatttattgccaacgacaacaaagcagaaccgacgacggtcctctaaagttcggacggggcatcggtcgacaaactcataaaaccacttcttgagtgagactaaggtctcaggcttggtcacgtcatatacgaggatggctgcgtctgatcctctgaagaacgcagaggatagcgaagcgaagcgttcttgtcctgcctgtcgagatggatataaatgtaggtgatcagcatacagatagagatgctctctttagacaaagagacaaagagacaaagagacaaactggtcacgaaccgtatcccagatggccaggtttacagtcatgtcctccgatacgggtatttgttgggtaacaaagtcacaaccaatagttgccttgtatgctgtagagaatttctgtgagaggtactgattcctcagacttgtctttcctacactatagacatcagccagggatgagaagattgaagagagaaaacagggaagacatccaagtatcagaatgctaccgtctccttctctcgcttcttgacgttcctgttaggcctgaggagcggtcgactaacccagaatctccgatgagcacgaccttaactgagctcattgctttcctcggcttactcccggttttaactgaaccatgaccaacaggaaacccgttcggtgagaaaatttccggagttctgtctggtggtctagaggcagagctctgtgcatgtgtttgtcttgaagaagacatgtggtagtgaaagagaaggaaagaaacgaggcaaagaacgaaagcttgatggttgaaattgatccgagatagatggatgttcgaatcgtcataaatccaaataactcgattgaaaatcgtgttatctttgttccgttttttttaatctcttctcgtacatctctttccatccttctcactatggcatgatgaatacataatccagggtaacatgatgagatcagacataagcagtattataatctcaaatcccaatacgcaaccggtccatattcctgaaagcaaaggttcgtctgataggggagagaaaaggaaatggaaagacgaggggttcgaacgtgctgaaggacacatgaggtagaacctatgcctgtaagatcgcgtccgaaacgaatgaacaatataggaaatatcacctgggtcaacacatcattcgggaagggtttaagatacgcagagaatatacgcacaaggtaggcgtaagatttgagatcgacgagccgttcgagatactctcgctatgattgacgagcaaattacaagaccataatcagcactctgccaaaaaacacaaagaagaatttgcacttacgtcgatcaaagcttctatccgttttttgatcatggccgtacttggtgaaaatctagacgataattgcttggtgacttcattcattaaagcctgtttgcagagaggaagagcaagggtcaggaatatagaagaaagagaaaaataaacccaacatagattgatagcttgcctgatgggtcatggtctttgaattcttcattattcgaactatgcacgcctacaaacgagaaacacatatccacttattcagtattggctaaaagatcgactccgatatagaaagacacaagacagggggcaacagaagatagtctctcacctctgttaagaacctcctctcttcgtcaaccttctcgttcgtctcctctctttgctcatttgtctccaccttattggcgaccatggcgatttttatctttgctaacggtgcggtgaacgcgtcattgaacacaaatgaatctgtgaccgcaacatctttactctttggatgcttcgtcagcaccctgtatttgccacaggccaatgattgaagcgttcgcatcagctctgaatcaggaatacccgtcgccgatctgatatcctgttcgatcagatacacgcaagaagatcaaacagtcagagaagttacggtatcacatgctcagatttaaaaacaaaacaaacctggtactctagctcttccccttcttccagattctcaaatagaagtagcgtcaccagagccaacgtcgagacgttgagctcgtgcgttcgattcttgaatctgaccttgacgtcggccgtccctagatgtgattgccatgtcagtcttcgaccggaatgtcttgaatggtagaaccgttcgaatgcttccacctgagctgatagagtcgaagggaagatagtagtggattggagattggtccctggccaataggtcgacgtaagcacagtcacagacaggtcaaacgaaggtgccttttgtaagagttgtttaagaaaaagatagccaaaagttagacgtgtgacctcgaaaacgctaactggacgtgtacagaatcttgaggacattgaataggcaacgtacggcagaagtgctggactggtgagcacggtaggcgtccatagtatccccggacacacgcatgtccgtgaacataccttccagtttttgagtaaattgataaccgctgccagaagaaaatcatagacaaataccaaacacttaatcaacacttgtcctatcaatcgcgcaagtttgagagaatatggaaggaaactcatacctttcgacctgtcacaatcgcgggcgttcgcatgaaagaataacaggtaaatgatctactcgtctcaatctctaattgtactcatcaattgattgatcgaacataccttgagttttgccaccatccctctctccgcatcgtctgaaacacttcgactattgatcaatcgtttggccagatggtttttgtagtatcgctcaaatacgtctttgtcggtcaagaatcggaatacggtaatcgctttgttaagaatgatctgttcaacgatgaacacaaaagtattaaaatatgtattcattgagcttagaaaacggtaagttcgcttacgtcgacttcatcttccgatttctatttcccgagatatcaaatgtgatcaaaggtcaattaaacaagtctgttttctgactcaagagcttcgttcaaaaagatgctcacgcctttcaagccttttttgagattctcgtcgatgaagagagagatgaactctgcgctctttggattactattgataaacaactcgaaagcctagagatgggagaaaagaagaagaatcctcgtacagattagacataggaattttacctcgattttcggtctttacatctcattcagaaacatgtagtagagaagacgcacctcgttgatggatgtctggacgccaatatcaccagcgaaagctccgtcaagaactttgtcaaacttgtccttgagatccaacacctcttgaacccatctcaacgcagcctgcaacgccgctgccgcgcctcctccagctccagctgatttagctttcgacttctccttttcgttttctcctttatccccttcagcgacttcctccggctgattcccggctacctctgtgcttggccctgttgtaaccatgattccttggtttatcttctccccacgctctctcacattttctttcaaagccttccttatctccttcaatccggtcgggactcgactaaacaaagtatacatccggcctatgtcatctagtctatcaccatcaagcatgaagactaggccggagcctggcatgttgatgatagatcggaggtgagcatgaaggaggtgatcctctaagatcttttggagcggaggagacgtgttgttcgataaataatgttgcgctcgagaagattcctcttcaaatcgacgttcgacctaagccattatcgaataaggttagctggttggcataaagcaggaacaaaaaagatggacgcacctttcgaagatatattcccgcctcgcattcctccaccaatctctccccttccgccttatagtacactgctgtccactccaagaacccatgctcaaaatcagcctcatacacgctttttccagagctcgctcctctggcgccaatacttgatcttagctcgaccaagatgagcataacatctctgacagccgaacggttgatgacctctccgtctcgctcgagcctgatctgagatagaagagtagaaatgagttgcgcctcgattggatacatcggcgaacgtagcattgattgaaggaacagcgtcttcccaatttcgagcgtcgcaggaacgccagcaacgggaacatagactttgtcctacagaacccaatcaaacggcccacatagtttcagtcatcacgtcatgatgttgacctgagggtatcgagaagacggaacgtaccatgtatgcgagaacagcacacatctgcgtgatacatctctcgtggtcgtcccatactgctttcaaagctttgaggaatctttctccctctgctgcccgttcaaccgaactcatcccgtccacctgaaggtctgaggtagttctcgattcggtgccttgaccgaatgaactctcgttggcactatctttcatcttccctttaccttttcgatcgaaatcattggagaagttggtggttgaggtagctgaggaggagcttgtcggatgcgcaggtatgagaggtggtcgggtgaaagaagggacgatcctactcttagcctccgaggtaagatgctgggttacgagctccttcacgccgttataaagaacatctccctaaacgccaaaagagatacgtgcgtatgtcaattaccgaatcttgaacggctgattcacagagacgtaagagaattagaaactcacccgtttgtgacggaccatactagtagtgtatcgatagttctcctcgaatctaagcttgctcacgttatggttctgtatctctttgattgccaccgctaaacgtcgccaggactcgtccaaggagacatctagttgaatctttctcgttcagatcattcgtccgccaagttgcgttgagagaaatcagatttaaatacaagggatatcattgatagcgagattgtgaaaaaagaaaaaaggaagacgagcgaggactgctactcacctgtctgggtggtctctgcggaagaccagaatggatggttcaaattaaattagaaagatgttccctctatagaatcttgttgatttgtatcgagcttctatcaaccctcgacgtgaattctgaatagtagcttacaattttaccctttggtttcttgagtccatctttagaggagagataatcggagagataggaacgatgagtagctgggcatcaactggtggactacatgtgggagattggcttgacaaacgtactcatcactagagaacttctgttttattgctacacgatacgagagaggatttgagtagtgctagtgatggtaagctgatgacgagcgtgtgtgatgtgtgcaggtaacggttagttgactggctaattgggtgttgggtgtggacgaccaactctttcgatcgcctccacgttcttctaaggatttcttcatctctcatctcttagagaagctcacatcgtattaaaaatattcggtcgtttctccttcttattgtctttgatgtgtctatccgttacatgtgttctctaattttgttcctataaagtacatcttcacggttgagaagagatctgaaaggtcagaattttggcagttaattatcgatgcgacagccggtaacttgtatctaatcaatagcatcgtatcgcattgaaattcttctaaacactcgctcaagcagatgtgtagatctttccgatgttggtcaacttcccgttggtatccagtaatcctatatgatgtattcaccaaattgttatacatgagtctcttatatgtcatcataacagagaaaagaggaacgaaaaacactcaccccacgtgtcggtggttctgaaacctccaaaccaggcgtaccgctcaatccaatcgtacgaatccaagatagccattgaagaattcatgaaggcagcaacatcgttcaggtccgtagaagtcgaagcccactcggtgatccagacaggtccaagactggaaaactcgccatgcatactccagatgtactgcccaaagtaccaagattgagaccaaaggtctacactatctccataccagtgctacaaccgagaaggtgtatgctcagtcagcgaaagagagctttttatcaggaatcatatcatcattctgggcaaacgacataccaaaggaaggaaatcgatgttgcagttgccgtcgcaggcggtgataaagtcccttaaccactgtcgaccagtctctgatgacgtgacagcaggagcctgacatgacaagattatagatacgtcagtcgtaagataccgatgctcaagaagagactccaaaaggagggcaacatactcctaatcggacaccatggttgcttctcaaaggttccaggtattcaatccatagcgccgcagcgtctgtggctagcatattagcctgatcggctgcatccggctcgttgaacgccaagatctctgtgtatccacccgagatcacgaagtccacaaacgagctgatgtcaactccgttccagatcatggggacgaacgaccctggaccgcttcctaaaccggtggtactagcgggtgtccggccccagttgtatagccaggagagttccgagctggcactcagcgtcgcaagatccgttactgaggtggcagatgatgggaagccaaatccccttttggggtttacggctaagctgggcttcatcattgtggcgatagttaggagagcgggtgcccagatagtagaaaacatattaagtctgttactgtaaagagtgttggaaaggagggcagtcgaaggcagattcaaaagagttggctctttatatcttctccttcttgcaaagaacatgatatcacctcgttcgagaaccgttctcaaagattatcttggtaggccgggtatgttctggaacaagaacatacatagattagggttccatgaagatgaaacccatcaggaggctgacaagacactaatttcgactccaaggagacgaaacattgttcgaccaaagtcaacaacgatgatgtatatatatagatcggattaatctgaaggtcatcctagtcagaatttgtccttgctctgcaccatgggtatctggtcagtaagtcagtatgctattgggtcagtcaatcaagattggaaacttgaaggtcaaagtggaacagattgatcgaccagaagaagttataggcgcagtctcttgtttcgcatcatcaccgtttttgtggtgctgccggatctatctcgtagcaagcgcgtccaagcagatcgttgaatacagacaaccacatatacacatacacatcctctatgtacattgaatgatgttcacagaatatattataacgaatagaaccacgtgagccagaagaatcaaggggaagaatcaccagaaatcatcatctcctcctgtcttctttcctttggtgactacagcctgagcctgatacatttcagcgatctgagaccggatgatgaagaaaagagacaaaaacatggatgtcaaccacgtggacgtggggccgtgaaagagaagttcaaactgagttacctgttctccagaagtcgcctggtcggcatccttgtcttctctgatacgaaggaaccttggaaatcgaagagaaatccctcgttcgtccgcctgaatcacagcagaaacaagaagagataaaagcttgttagtcgttttgatttctctgtttcaaaaacaagacaccttgaacgatcttgcagcgtgaaagaatcctggacaaaccaatccttgggcggcggtgtatatcggactcaaactcaaatcggctgtcaagacctcccagacaacctttggttcaaaccagatatctggtttcgctccgccaacctgaatatccctcctcgctccgccagaagtttcgagatctttaagcgcgttgtaatgaatttcaagaatctcttcggaaaacccggttccaatcttgcagatggtctggtacttttcggtatctggatcgtaacacgccaggaggaaagctccataaacgtttgtccgtttcccttttccgaagtaggcaccgacaacgaccaagtccaatgagtctcctacacccgatagataatccttcttgagctattttgtgcagacatgatcccggtcgtcatgatttcatataagtttcagagtaaaaagttcaagaaagacgagagaatcatcagaactcaagcacgtgaagtacgaagagaagcagaaaagccacagaccttcaaccagttcatacttcttcgactgggttcgtacgttgaatcattcgtctccagcatcttgaccattaaaccttcgcatccgtccttgacactctcctccaagaactgttggatctcgtccgaggtctctccatctgaagatttcgcaaaggtgaattctccctcgacaggagtgaaattttcctggagaatcgcccgacgttcatgtagctgcttctgaagaagagactgtatatcattcgagagacatatcagctttcagcgctttgaggattcttgagagatttgaacaaggaacaacacacttcgccattgagaaagagaatatcgaacgcaaagatatggactttgatcgtgatatcttctgccttaacatcctttcgctttcgtctactcaactcttggaacggtagtagcttccgttcaaccgcatcccaagcaaccgcctcacaatccagtacgaacgatttggctgattctttcacggcctgtgattgatggcatggatagtcggatgtcagtaatgtctattgactagggttatggcgcaaggatatccaaagaacatactcgagggagctgatcgaccaaatccggatactttgcagacatgttctcggaatttcttgagaacacagtgatctttccatcttcttctcggtgaatctatttaaccagagcaacataaaccatgattcgtgttatcagcgcatatgcaagataggacttgatactttgaataagcttacttgagctcgctctccatcatatttgtattcgcacgtaaactttttgccttcgaatcggtccaggacttcagtaatggctttcgttggctttgccaacatgggtttcagaggaactcctgggcgtggtggtgacagaaaacataagggaagagaggcaggaatgattcgtgagcttggatcgatactcaactcgcgatagaagggagaacggagatagagggcgaaccggcggtaagcttgcagtcatccttcagcccttccactccgaccttcatcaaagacggaatgatcatgttcaacgtcggaagttcactataaacagatttgaccacctcagttccatctgtcaaaagagtttgcatgtcttctgtcgaaagatttcggtcggctgaaagaatcaatagagagggtcgtgagattggaagcatataaaagctcaaacttcgatggatacacacagtttctaacgataacacaggcttgtgccagagcagtgatgatggtcttttcagctaatccgattcttagcttcccttcgagtgaacggatgatgaatttggcctcagagccttgacaagcactaagcatctgcttgattatattgatcttcttgctcatagactgatttattttcatttcaacaaaggatgttgtcgtgagcatctgagccaatctagagaaggagacagaaattggcaacaaaacgtggaagtacatcttttccggtcgaataggcaatatccgtcaaccttgaaaacacgaagggcacagtgagcggttttggcttgaacatcgtcggttggtttgctcgcgagttctaaagagtgaaggggaagcaatgcatcccgagatagatcatgcaatacgttagcgcgtacagatagcaacgaagcgacgtaaagagagctgaccattgcaaccattccaagatcaccctccttcttgagatcagtcttaaccttggcgactgctcggccggtcgattctccaatagcctttatcagaatactctctccaataccaagctcgagaccttgatagtcagggcaaagctgttcagtgatgaagtgaagtcaagaatccaatcggtcagtcatcgtctacgtttcaagatggcaaagatgagaaacacaagcagttctacggtcgatcacttactcgattgagacatagatagattactttgagtagtccctcagctcctgtctctcctcctttggcggcgtttccacctgctttgactttactacttgcagtctttacagcacccaaatagaaccagatgatcaatactttggagctcccagactttatgaattctgactgaaccaacctctgcgttctttcctacggccagtgccgagccctcaacggccggtgcagccctctcaacgactaaaactagaaactctgtaaggtatttcaaaatttctagtcgtttggtggttccctcgattttcatgaagcaatgaatcagcgcagcataaggaacactgataacgcatatcaaaagtaggtaaagtaagtcaggaagagatcagaatccatctaaacattagtagttatgaagaggacggacggatcagttggtccccatttggggtactctttagaagcagaggaaataatagacttcgaggaagccatctcagcacttgttatattgacgcccaattgaaaggagattagttttcacagaggaaacgaatggtgtacacaactctgagggacgtacatcgccgatgctgccttattgacaactttggtcttgaccttcccctttccttcaaccactagctcctcctcctccatttctagctcactttctccctcctcttcgcttccgctctcttcagcgcttgcgctttcctccactttttccatgtcttcaccgttttcctccttgtcgatcttcggttgcccgataggtcttttcttgagtgaaacagggacttcatcctcatcggatacagctatgaatgctcttttacgcttatgtcgaacgccagcaggaagaggagcgtccgattccgtctcggacacgttggacatatcctggtcttcatttttctcgaccgcggggaaatcgataaaaggaagactggaggtggtcttcggtttgggcgaggatgatgctttgcgttcgatcgttttcttaggagattgagaagcttccacaactttgggcactacgagttacagtgacacaaccatcggaaccccatacgagttagtgttcgaaaggttgaacacatgaagtaagaataaatcgacccaccaccggtctctctctcttcttctaaatgagcatctttcacatcttccttcactcttttcttggaccacatattttccagactggattgctcttttggaggaggtgctacacctttgatgtgactaaacaaggtcgactgtttcatgtctcctttcggcttggcccttgggtttgaagaagagtgcgccatcgagctagagatcgaaccggacaaaagacgatagcttgaagtacgagcggatttcaatatgaatagaatagacctgttgagacgaatattcatgcaccagctgtacgttgggtgcaatctatgagaagtatatcgagtggtaaagaaccggacagagagaagagagggtgtgtgtgtatgtagaagattcagatcaagttggctgatctccaccggtcagactaggcacgcgtaatataatgttatcacgcgtcacacacgcgtcatgcacacgtccgacgcgttctccaacgcgccgggactcttcagatggatcagtacacctccgtccttaatgatctcaaccatcccaacgaccgtggggacgagatcagatgataatgctgagccgaacagaattgggtaaaaagatcgcttgtgtttgccatgctttctaaaatcagacgataaagagcatttccgacaaaattagctcaatcacacgttcatctcgggcttcggagctggcggatttatcgagaaggtttaggacacaacgataacattccgtcgtgagcgacaccgattgatgagcagatggacggccgacgctacaaacgctttatccttgcggcctcgcgagatgaacacgaatgctctcacgtacgactgtagatattgtcaccgccatcagtgttatcaacagcataactcccgctagatcggcttccctttgatcattcagccagcgctaagaaaatcactatcaccattgagagtctatccacgtggatgctaccacatgggcggtccccatacatagtgaacccgggttctcgtgtctatcatgatttcgtataagaacggcgcaccaagtttagagtccatccataaacttgatcctttgcctctcccctcatacaactcgtagtcttcaggttggttccctccgtttgattaccaatgatgaagacaagaccgagatcaagaccaactgttgctgttgctatcataatctctgtcgctgtcggtaccgacattatctgacctgtcttttctcaacatcgcttgcgctggtcaatcttccatcatgcctcaatatcgatcgatctgtatattgtgtgtattaggaaaagaaaagcatcatggtcgattcaattacctccttggacaacttccaatctattctttcagagaacgacgttgtgattgtcaagttcagtaagtttacagtcatctcctgcctatcatttgtgaattaagcctagcggtgttgatattctgtttgcatccatttgtagctgctgtttggtaggtacacgcaacgagagccgtctcctctttgataacgtttactgattgtatactgatcttatgcaacgctaggtgtccaccttggtgagtcagaagatgatgtgattggatatgcagatcaaccgctcacctccatcctctacttgtactgttggcatgtcaacgacacctgcagcaagatgattgctccttacttcaagaagctcgctgaggatgacgagtatccagcaacgtacatcgaggtcgatgtcgacactcaatgcccgactgccgacagctggtgagccatgttcctgtcatcgttcttattctgtagcattttggtcgttgtgacgtatcttatactgtattcttcgcatcaccagtaacatccaagccatgcccacgtttcaatccttcatccgtggcggacgtgctgctgagattcttgaacctactccagacagtctaaaggtacctcttccgaagtccaagtttttgattcgtcattcttgaataaaactgacggggtttgatctgatttttgaacatctaggcatttgtcgcggacgctatcaccagtgcacagacatcgccgtcttcttctccctaggagtcacactggtctgatcactgtcaaacagagccgtcgtagtgaacccctatctaccaacatctaagttctttcaccaaacctctctgtcgttccgttcatatctagtttcgcgatcatatctggattctttccttggtctttctcgccagtttttgataacacgatttccaattaatccttctatcttatcattggacctcactttcgttatcttccttcctcaaaagcttcttggctttcgattcatatacccttttcgatctggtctcttcaatgtgcttgtgtctatctaacgtcaagcgtccgcttgaatgatgaaaaatcagccaatgaaaacggataagagtgtctcttcttgaaaatattgcgcaaaggcaattggtagcaagagaagctatgatatagatgttctgagaacatcaggaagaccaagaggaagcaaagccgtgtgaacgaatctatcagtcagtcatcaacagtaaaagcagcttgaaacagatgaatgatggctgctggctgtttttatctctgagcggccaagaaggatgaggggcgcccagtggttagggttggaagattcatatttgaatttaccctccattacataagacccttaagacggatccaggcggtctcacacacgagcatcccgggtttgctcttttctcccttcaccttaacgacccagctttctccatcaacctcatctgtttcctctccgagcgatgccgatctctcagttgtccagtcgagcacggctctctcctactatcaggtctcttcctatcagggtgagctttcgttttgtctgaatgttgtctgaatcgcgtgtcgagtgctgcacaaggagaaaaaaaggagcgtactctagtactgatcacgccgttccatcttcatcgttctctccatctcgtccatcaattttgtcatctctggtgctttggttgatggtatgatctcactatccgatggaatgaaaaccagacctatgctgcctctcctctctctggtactcctccaaaaattcctgtgaccgtgatcactcccgcggatcctgtgatcgtccaaaagagagtcgttcccgtcgccgtccctgtcgctcctcttcctccctcaggatcgcctcctcctcctcctggccggggaggaaagaagtctcatggatttagaaactttctcctctggtctggattccttgggtaggtctggtttcctgtcgagcgcatttaatcgttccctcaagacgtatctttcgctgacgtcggttatatgacgttttttttctctctctttctttttgaacctttctattgtgcttctctgtctattctatcctttcctactatagtgggtccgcttacagcatcgcaacctacatcgcccttcacaacgacgatttcgagcagttctacactcaatatgttcccggaggattaaggcttgtcgagtacgctgaggaaaaggggtgggaccaggttggggccagtgaagtcgtcggcggcgttaaccgggcttatgagtacggatcatctctctcttttctttgtcactgaaccatatcccttcatgcccagccctaattcatctgtcgactcatctttgatagctcctccaagtcgttgtacaaccgaatcactggtcagatcaccccctcaacgcccatctctgagcaggccgctgatcgagtgactgctcttcaaaagaaggttgaatccaagtcttcggacctccgatcaaaagcctccgaaacaatttcctcattgacacacaaagcatcctcaaccgcttcgtccgccgtcccggccgattcggaaaaccccaaggcattgggtgacgacgct

SEQ ID NO: 2278 - DNA, 2354 bp, Xanthophyllomyces dendrorhous
atcaaggctgctgaaattcaaaacaaggcgggtgagcttcaggacgacgtttcggcaaaggctcaccagttgagcgacaaggcgctcggatttgtcgagcagctcaaggcaaaggtcgaggagaagtttgacgccgtcgttgaggagggcggaaaggccaaggaggctgttgttgagagcgcccaccaggcttcgaatcagctcgacgccattgacttgaagggagaggccctgaagaagatcgaacagctcaaagcacagggaggagctgtggccgacaaggccaaggatgcggtggacgctgtgagcgagcaggccgcccacttggtcggagaatcaaaggaggctatcggacaggctgagaagaaggtcgagaccaagactggacaatggagcgagggggttgagaatctcgttcaccaggccgaggacgcactcaagggcgtaaagacggaggtcgagaacaagattgccgagaaggacatggtcgacggaaagcttccttgggtcgaagccttacctattgggtttgaagctcccccagggtactacattcctaaagcagtaaaggctacatctcctaaggctccttcctcgtccactgtggtcggtaagcccgctgtgggcgagatccttccgttgatcgctccttctgtccgcgagtttgcttcttccgagccaatcatcgcccaactggcgaccacaatcgactctttggcttcctacttgtcttctagtccttcagccgttccgtccgctaagaacctgatctcgaccgcccaaatggatctcgaggccctcggaggacggcttgcctcagtcaaggaagaggagaggaagaaattggagactcagctagaggctaagagggcagagtttgagcgagagttgaaggagaagactgtcaagctcgaggaggagttggagaagagggaagaaggttggaagagtgtggtcgaggatgagagggccaagatggtggctgtgttcagagagagattggagaacgagttggaggttcagagcgagatcatcaatgctcggttcgtactcttcttatcccgttacgtgttctgtaggatgtccctgtctgttctggcactctgttaatgtacctgtcttctgcttacggttgtagattgaaggaggaggtccttgctcaggctgtagagcttcaacgatcccttattcgagatatcaagactcaggtcgagaccgagcgaggtggtcgattggccaagcttggagagctcgagacgggattgaaaggtcttgagaaggtcactttggacaactctgctatcttggatgagaacgtccgagtccacactctttggtcagcccttcgagccgtccagaccgctagcgagacctctcgtcaaccattcgacacccagctcgccgctttgaccaacttgacaactgcttctagagatccctctgtcggacctactgtccttgctaccatcccttcctcgactgtcgctggtggaatcgaatcgacttctgacttgacctactggttcattcatcgagtcgctcctcgaatccgatcggtcgctttcgttcctgaagcagccgacgccggccttctcgctcatctgacgagtttcgttctttcgccattgctcttccgaaagtcgggtaacgtcgaaggaaacgatgttggtgctgtgttagccagggctgaggatcgattggctaggaacgatctggacggagcggctagagaggttaacagtctgaagggatggccggctacgttggctcaggattggctcagggaggctaggaagcgattggaggtcgagcaggctttggaggttatcgctactgaggctaaggttgcttcgcttgttgtcgtcaactaagggattctttgttcattctctctcgtagtcgatcttttgattctttcttcccctttttctttcctgcttgtgttgctttgcatccccccttttttttaaatcatttcatcttatatcaatgtatcttttctttcccttctctcgagtgagataggtagacgatctcgatgttttttttggaaaaaataataataatttattcgatcatctctttagatcatccccggttctttccttgttctaacataacctcaaacccatctattcgacatcctgctctccagagtaagcgggcaagattccagtagccttcgaccaatcgatctgacccttgacgagttgggagatgacagagatgacttcgtcgatcgatccgatgagttgttcggtagtgtctcgttctcgaagggtgatcgttccattcttgacggctgtgtcgttttgaggaaaggagaaggcaaagggtttttttttttttttttt

SEQ ID NO: 2279 - DNA, 35371 bp, Xanthophyllomyces dendrorhous
  misc_feature (32146)..(32155): n is a, c, g, or t
ttttttttttttccttttgggtcagaaagagaaagaaaacaacgtagggttgatgataagagtgaaaataagaagtgacgaacaagcgaaatcgacggtagctccgaaaggagtaccaagctcatcgttcctggagtatcgctttccgatggaagcaccagaatcatcgactctgcatgcgataccggctttcctcatcttgagagctatttccgaacaaagcattacccagtagaagaagcaaggaaggatttgacgttcagaaggtgaacgacgacagattacatatctccatagaatgagaaaaacgtcttacagagctcgtgggcggctcgagaaagctcagggttgttggagataggaacgatcaagcacttgaaaggagcaacagccgtaggcagcgaaaggacctatgtacattccagatcgtgtcccaaaaacgatatgtaattaggatctatcgttttttttttcttcgaaagaggagaaaaggaaaaggaaaagcgaagagaggagggaaagaaaaaaaaaatgagagaaaagacaaacctgtcgagcggaatcagattcccgtcgccagaacgagtgctccaaaacagagtagaggattcgaccaataccgaacgaaggctcgataacgttaggagtgaactctcggatgtttgtcttggtcgtcttgggctcgatcttgacgtaagcagccaggatctcgtgggaagcctcgccaacggtcaccgtgtactttctgtagtcgtcatcaagaagagaaggggtctttagtcgatggctgcaccagcgagggatgatacaaggtagaagaagaacaaaacacaaacccgttgctctccaactcggtctttagcgcggtcaacttgtcctggtcgagtgcctcgacatgagccatgacggcaccagcctccttcttgaaagccattccaaccgtcttcttgtcccaagtgcaagccaactttgtctcgatcaccggctcgggcaacaagacctgaacgctcaatcgctgcttggtcttctcggcgtgaacggaaagatcataagcggatcgatcggcacaaccgacacactcgatccagccgtaagaagattggatctcggcgtcccaacagtcggcagcgtagtgggccatctcgttgtccatgtgctgtcggaatcggagtcgactggggtcaattccaatcgagacgaggaagaggtggattcgaccgataaagtatccgagggtctcgttatcgataatttgctgtgtggacacaagttgatggaattgagtaagctttgtgtgattgtatacgagaataggaaaaggcagctgatcctcgcgcgtaccttatcgacagcatcaccaacggtcatctcgaccaactcggtctttccctcgagctgaacgtccttgggcaacagagacaacttgagatccttgacctcactgaaccgggcgtgtctcttgtccaaagggtcaacaaagtgctcaatctcggccatggtgaactctcggactcggagaaggccttgtctgggagagatctcgtttcggaaagatcgaccaatctgggccgaggcaaagggaaccttgccgttgttgaactcgaggagtcgggaaaagttgacaaagtgaccctgagcggtctcgggtcggaggtatctgtaggtcgagcaggcgtagcagcaggatcagattgcgtttagcatgagctcaagtgacggagtgagtttgaaagtaagcacactgaccccttgaggtaaccagtgggaccaatgctgttgctgaacatcaagttgaactcttcaggctcggagacctcgttcttggtctcggggttgacgatcttgaactttcgaatgagctctccgagctcggcaccagagtagttgtcaatctgacgttccagagatgcatgtcgatgatcagggttagcatgcaagacgagtcaagttaatgagctcaaagaaattgataattcgtacctgtgcgagaacgtactcggtctccttgacctcctcgtcagacaacttgatggcggtcgaggcgacctttttcttcttcttcttcttgtcgtcctcgacggcgacgggagcctcggcgatacctcgagcctccttgtcacctttgagtctgattcatagttatgtgatatgacatgatgaagcaaaatggctcgaattagttgacgagcttctagtataacccatctgctccttcttcagcccaaacccaaggagggccattcattagggaggaaaaaaagagaaagaaggtgatactaatggcactaacctggcctccaagacggcctcgaccaagtggtcggctctgaagatctctccggtcttgacatccttgcacatccaatcggaaaacttggcgacatgtccggaggtgacgagcacatccgagagggtcatgatggtggtatcaagctcgagcatatcctcctcgacgatgaagtgttgtctccaggcgtgaaggatgttggactggagggaagaaccaggaggtccgtagtcgtacagaccagcaacaccaccgtagatctcgaaagcgggagtgtagaagaatcgtttggccatcaactgttcaaactgaggcttgtcaaacgtagccgctcgggattccatgacagacatgatgggtgagattgaaaactggcgcttggaaagaggagcagagattgtttgcaagtatgatagtcgtctgaatgaacgggagagctgctgcatgcactctggaaagagtcaagaagcaaggcagacggatgatggatggatgatcggtcgagaatccaaaaaggaaaaataagaaggatgagcggttgaacgtccgaacgtccgctctggtggttacagcgctggacgtaacccggaggacgtttgttgggctttccctctttgagggtcagatcctcatgtgtacaagcatgctttggacgagtatgatacaggcagtagctctagaagagacaccaggcagacacagacacaaagatgtatgagagaaaagccgagaagagctgaagagaagtccatttatatccgatctggatcgtacacaccacagcatctacaacaccactttgagctcgagtacagcctcagccatcgctaagacaatcaacagaaagtatacaagacaagaagaacagtagatacaagaggagggaatgaaacagaacggagagaaagaggtcaagtaaaacatgggggaggctcgaggcttgaggttaagaaaggatcagaatgcccgctctgttttagagtcggctgaggagtcaaaccgattgcttgcccttgaagtcatacccagcctcagttagactttccttgagagcctttaggatcgtatccacatctcctcgagtggggtctgtgacggtgatacccatatgtccgattcggaagtacatatccttgacctccttgtgaagaccggcagccatgacgactcctttggcgagaagcttaggaagactgtgagaacgcaaaacatgaggcacgcgtcaggacaacaaggacaatgactggacggcaacaagaaaaccgacgactcacagatccggcgcctttagaccggcggggaatttggcagcggtcctggaagtaggtgtagatcgaaaatatcattaagcgataatgatcacaaaccaccatcttcaactcgagccgacagagagacatacatgccgttagcgctagcgtccctactgagaggaatgaagccaagaccccactcttcgagggtgtccttgattttcttgctagcggccttgtgggcagcgaatcgttcgggaagtgagggcgaagctttagtgatcgcgctcaacgaagcatggaaggcatagatgagctgaacgggggctgtaaacgacaagtgaaccagatggtttgagttagcaaccagaccaggaatagctcttctatatggagaatgctttctacaaacgagtagcaaagtaggtagccggaggggtctcgtaggacttcatactgagcataccaagattaaaatgttatcagcaactataattctcgatggatatatggacttgatgaccccatcttcggcagaattactcacacaggcaaccatttcgcccaggaggcgtagtaggccgacaccctagtctttcttgacttgaacacttctaaagccttctgggatgccaaactgacactcagaccgggagggacacccagtcccttctgagaggctccgatgacaacgtcaatgccccaggcgtccattctgaaaagatgagaattaagaaattccgggtttaacaatcactgagattgactgcgtgtcgctccagaacaaaaaaaaaagaggatggacaggtgacctgaatagacagtgagatgaactcactggatctcctcactagcaacggagcagacaccatcgagaacgaccaaagtgtcaggagagacctccttgacggtctctgcgatcatcttggcatcagagagtacaccggtcgaagctgagagatgtataacgagtgcaacgaagagatcagtcttcgggccggagagccgatgcagcgatgcagatgcagagaaaggaagagccactgactgtcgacatgggtgaaagtgagaagcttgaactttttggaacggagagactttgtgatttcttccttgctatagagacagatggagaaatgatgttggaagatgagaagcttgttgagagggcagagagacacatgtgtaatttcaaacgtacgtgggtgcccctccgacaggggctccgatctgggtaacctgagcgccatatgcctccaaacaatcggcaaaagaatcaccaaagtagccactgagtgaagagagaacggaagatgtgattgagcattgagaaccagctgaaaagttgataagaaaaaagagagaaaaggaaagagagagggaagaaactgggttgtagacataggaagagatgagcttttgaacgtacctgttgagtaccaagacatcttctccttgctcgaccaagttagcagcgacaagatcccaaccgagcgttccactcccagcgattaggaaaggttgagcatcctttgtgaacacgacctccctggtcattcggatacagtcaccgaacacgggagcgaacgcaggcgagacatggctcatgctcgggtgggcattagcgaggagaacatcgtcagagacctcgataggtccaggaatgacgagaagcttgtgctcctcctgcttgaaagaagaattagacattgaatagagtggcgagatgtgacgaagaaagatgtaaggcaagctcaatgtatgttggccgggctgtttgatggtcggatggtgaaagaagaaaacgattcggaggcgatgcacagaataaccattccatccagatcatccagcatagctgccatccatcatctgtccatgtcgtctctactcgatccgtatgtcctgttggtcacagaggccagttgagagacgtgttctgtgctgacttgtgggcttgagtctctttcagatcactacctagtctggtcatccgtccgtcatcgtcggggtcgaccgtagaggtctttgacgctcaaggtcgaaagatctacctgtacggacggacatctcttcaacatacaccatatcaagccaccctcgaggatgcccactttggagcggcggtatcgagtatctctacttcttctgatgctcagtccaaagtgaaacaaatccagctattcaacccagatgtcgagctcgagctgagatcggttggaaggatgagttatacctggcagtttacatgggagaggtatgtgtccatcatctttgtctgttcgtcaactaccaagctcacatacagccttttactttctctctcacacatgcatctctcatctgttagtgagttgtatcagtggaaacagccgaggttgtcttccaaagagttcacatgtttttgtgtgagaaaaccagatccagacgtcgatgtttcaaggtcggtctttctcttcgttgcctcgatcatatgcttgcgactgagcgctttagtcgggattttcttcttcagagctcggttaggagacaccaagtcgccgaccatcatcacctttcagcaatacaatatcgaccggttctccatcaaagaccacaaaggtctagagatcattctcttgacgaccttgctctcgttcctcgatgcctcgcaggaaagagaggatcggcccatcatgatatcttcctctgcagacgacaccaccacgatggttcctcttgctcctccggcagtacctcctaaaccccaaaatttgagagaagagattggatttggagattttgaagaacctgtatgttttcttttccgcgcgcggtaacttttactgagagaaggtgctcatatactcatttgtccttactctatttctccgtgtcctttaattgtctcctttcttctctccctcaacgtcctattgggaacacaaacgccacgtagccggatccaaacgaactgacaatcacatcggcccattcggtagagacatacgctcagaaatcgttcgatctcctcctcgtaagtcatcttctcacaagacatgataactgctcgtctagtctaatttttgtgatccaactgcgcgcaaaatcaacaggactcgtcaatgctattcgtcatacttcgcgcaaaatcaccagagatgatacctaagacggtcaaggtggcagaggaagtcaaaaggctgaggcatagagaaggatgggagtctatggatgaagaacaagagatattccagtaagcacctctttctcctaatatcgacacgctggccatcctgtatcgtatctaatccagaaagtctctacttaatatggatggatcaatgaaggtatgtggtagaaaacatagaagatccaacagggccaagtaaactagagacaaagcctactgctggctctatccgccgtccgcccaaagtaattgacctgaacgatcctgttcctgcgacaagtggtccatctccctcctcattgtgagtgtaactctgttgcttcctttcctctcctctcctcttgtccttttctcttttaaactgttactcaacttcctcgcttttcttcttcggcttgtcttgttccagaaaaccacaccaaccttgggataaaacaccaccaagttcaatctctatatacttatcaaaaatcgtcctgccggatctacaaccacaggtcaaaaaaccaagttcatcgaaatctatatctagaccaatcgactcttctaatccatcaccaatccattctccttcacctccatcattatcaccacagattccatcatcatcgtcatcatcatcagcagtgaagacagaagaagaacccagacagggaacagagagcaggataggtaaactcatcgacgggtttggtagactcggtttcgggaacgggaaggtctgagcaagctatcatagtcaactttctagatgaacatttgacaattctgctttcttttcttttcttctcctgaatacggatgtgagtgcgcctgaaaacggttcatcatgcagataacaaaaaaataacacccggaagggagaatcgaagaaaatgtagagaggaaacaaaaaggtcgaatacagagggaaaatcgcatagtaacaaagaaggcaaagaagaacaaatcaaggagcaaaggaagaccagaacgaatgatgaaaactatgtgcgcaagaagatatctcatgtcgagtttagacttgactgggtggttttacagaaggaggtctttgtaccggcatgttcggtggcaaaggtgacatgtttcctccctacagtttgacgatacgaaaaaaaacgatggtgtatgatcagcctactgattctcagacatttcagaaaagaaacaatgtgaacaagacgcgcacctgctgctgctgctgctgctgctgctgttgttgttgttgttgttgttgttgttgttgttgctgctgctgacgcatccgaagagcagtttgaatatgcaaaggagtgacggtgtgattctgcggatttccagaagacataaatccgtatcagatcaaacgcatcaaggacactgtgttcacaacaaaagagaaacatcgactcacgtttatttctgcggttcagaaaaaaccccatcaaagaatcaacaaaacagtcagccgcgatacgcatgtttctcaggaagaatagagaaatagaggaagatcactaacggaggttggtcgtgatatgcgaaagcaactccaacggcacactattgaccaaagcagccgctatcgcctgtggactctgtgcgctactcggcacgttctgcaaagctggcacagcacccacaggtccattgcttgtccttctcacgttttgaagaccaccttgttggtttccaatcactccgccaccgcctggacctttgtccgccggaccaacacccggctggccagactggggtggaagaggtgaaggcgttctcgttccaacctgacccgggttagaattgatgcctccgttggaagcagcggccgaaacagcggcagctctcaatcctgcttgtctctgtaactctgaagccgtccgatgggcttgtaggagttggagctgagccagttgggatggactcaatcgctgaccaggaggaaggccagcaattgctggacgctgctgttgctgctgttgttgaagctgttggggaagctgttgctgctgctgaagagacatttggggagacgacgtggccgaagcgggtaaattcacagataagtttgagtttggccgctgaatttgctgagggccaggagggtggtgcgctggaccagacgtctgttggccttgtggcccaccgttcattccgtttgtaggagccggtcgaggaggaccagcctggatcaagcaccaaagagagtaagaactttagataaaagggtcgcgcaaaagaacatatagagaatcaaggacgaacaggtgcgggttgaccagctaccgctcctcgagcttgcatctgacggtaatactctgcttgacgatgttgctgttgaagaatagtggcgtcgtggaactgcttgtctcgttcatacttatgctgacttagatcgagaggtgtcggagccggacgattacttagatattgattgtgtgattcatgagccgtcagaacccggcgaggctctttctctgatgttcaaaacaaggcaaagatagattagcaacagacaaatcatgcccagctaaacaaggaagaaaagacgaacgaggtgccttccgattcgacagatcccttctcttcgcagtctttctcatggcctcgtagagctttgcatgcctcaattttttctttgagccctcgaacttggggtccaaaatcgagggcatgttcttcccttgtttcttggttccaccaggtgaaacaggaatatctccaccagacgctccaatacctgagatgccatttccgtttccgtttgcgcccgtgttcgcgctttgaccagctccagaaggtagaccgttcacaacagcaccgacggatccttctgggtcaatagacggatctgacgtgatagcttctttcttttccggctctttttccgggttcgggttccatttcttgttccatcgttggaaacaatcccatggggatcgtctatcgatctggagtgttcgacgaacagtgttgaaagagtcagagatgagttgccagttgaaagggaattgatggcacagccgttggagaacgacatcgtcgtcgttttgccagatcgtagacgcaagtcgactctcatagtttcgaggttgggatggcttgataagaatcggtaggtgaatcgattctctagccttctttccggcaaatagcactaggaattgaagagagacagagaaagaaagagatgaatacatttataacgtattggaagaaaccataagaatcacatgtaggagatactcacttgtaccgcttgaataaacatcgcccctcatctcacctaggtctctgatatcttccgacccccaaagatcgttcacatccgcccatccgtctgaagttattctcgtcgccggctcaagtgtgctcaccaacaccggtctgatatctaataacctactcgtgtgagccaactttccaccggacgtcgtcgcgtcatctattcgtctatctagctttccagccatgatggcgttctcgtttaacggtactggaagtgcgtacggtacgacatcgccgaacaaatcgcttaacagagcaagagcatactcgttggagtcttccccgaatgtgaccggatcgagaagagaggacatgtcgagggtgagggaggaaggggtgatatcttgtaacgcggtccgggcagtagacgagatcgcgcggaaggcttcttctgttaccggcgggttggatggaagagaagagtacggtcgtactgtcgatgtggttgaatcgggagccactgcagaagcagaggcagaagtggcggacagaacgggatcgagagctccaggacggaggccggtggtatccatcggcgacttggtcaagatgtcttcgaccggtagttctggtgggggcagcgctcgctcttccttggagtcgaggatatcgaacatctcgacttcctcatccggttcctccaattcaccttctccgtctggatcttgttcagatccaacagcatcgttgtctatgtccatcgaaccttctgcagcaggaagtcctagtaaaccagcctctggctccgttgtctttcccacagtctgttgatcttctattgcttccagcgcagcttcaacttcctttccttcctccggctcgatcattaccaaggcctgttcatcttctgaagcacggacgatcgtatcgtttgcagaagacgagctgagttcaggaagtccttctgatagcgtcctgggattagtgttgaccgagatctctggtttgctgttatcatcgataccttctccgtcatcgttctcatcctcatcggcctcggtacggtctactgacacaccttcagcgaacccttcctgaggctcagcttcatcatcaaggtccatcggttggaaatcaacgtgatcgcggttcagatgtttcggtcgaccgacaggaacacacaacgatgccttgtccgaggagaggtgccattcgagtacccagttggccatttcgtaggccagggctaccttccaccgacgttcttctttgaaatctgtttgaagccatttctgatgattgtcccattcatatgacaggttaggaatcagagcgagttgacaaaggacgttaagagaaggcaacggaatgaaacaaaccatttcttcaagcatccagtcccaatggctttttgtcatcggaggtcctttctgtttctttggctgtcggaaagaccatctaccttctgccttgagaatttcgactctctgcattgcccggttaaatctcagttcgttgaaagcggtctgcgtgtgcgttcgattggagaacatacatcagtacggctttctaggtaaacgaagaaaacagaagaatatcaaagacaaagaggaatcatacctcccaatcggcgctccctagacattttctcgctcctctgaccaaaccgctcagaggatttgcgttcaccgtcgcttgccatttgaacaagtcgggcggctgaatcgatcctgccattacaccacctgcccctccaggattactcgccgttgacgtgctcccgttcgtccctcttctcctcattttgcttactgatttcctcgctgtatccgctggtagaaccggaagcgggtacagtgatcgggcgaaagtcgaggagagcggtaagggaattgccgagggtgtacttggttgaagcggaggagagaatggagggagctcatcagggttcaaatgactcgatgatggagaaagtggaggtgtaggcgggcaaggatggatagctgataaaggaagggtataagtcgatagtgattcgaaccttggctttgtgagtaacgattggcgaccggatgtaaacgacgaaacggacggtcggacaagtttcgtaggcgtgcccgttatgggagaaccgagggctggtccagaaggtgtgtctgtcggagtggccgtggacgtattggacgccgagatgggagggaccgaagaagaatcagcctgaacgtcttcttgttctttgaacttttgtaaagccggggcgtctgaagagagggcaggggttccgccgttcgtcgaaagaggaggtgaaggaggtgaagtcgtttgagaaggggacagttcgaatgaggcaatcgatcgacctttctctatatcaaactttgatgcaaacttggcccaccgatcaatctcggagatgttcgcgtcgacaacggtgttggcgttgatgttagagttggtgtactcttggacaagttgaaagagttctttgagcaagtctgatctgttttggaggaggtttctgtgagggtagaccgggacgcgtatttggttttttttgtgaccgccatccggcacgcaagaacccagacaaagatcagaactgatgtctggtacaggtcaccgagcagaggcgggaaggagaggaaaaagagaggggatataggcaaagagggaaacgacagaagaagtaagagacgtacgctcgatcggagtgcttatactcaacaagcaacctgatgagttcctctacgggtaaactctcgatcccctcgtttgtatctgcttcaacgacgttcatccggccaggaatggaagcgagtttgtggtcgactctgtgagaacgtctttctgatctgagcaaacggctgtcgaagagtaagaaggcaaacaacggaacgttaacaagatggttggttggaagttggcagttggaagttgaacgttcagtttgtttgggtcgtttctaattatcttctctctccgactctccggcctgttctcgtcaagtctctctgctttcatcgggatcatcctcataccctcgtcggtcgactgtagaaatcgagtaggtggcattatggtctggcagatcattttaatgtctacacacgcaggttgaccagagcgtgagccagagccaaaaccagaagcaagatctcattacagtcatcatattatacaaccccatgacttgttcttccctcttttggagttctccatccttgtgacagacaataaggtctagtcgacctgtggaccggcagatcagcacatccaacgtcactcaacggagcaagatcgtcacgcccatcaccacgcaagccagcgacacataaggcgacaatctctctcctgtcgaaaacaagcgcgacataggtcccccagacaacagtcaggtaagcatacagatcagatctagatgagcatttggattttgaaaagcttacctatgcgggagcatttccagaataaaccagagaatctatatcaagttgatccaagtaaaaccactgttcagttgaccacacaagaaagtttccgagccgaggaaatccgtagttccatatatccaccagtttgtcgctctcctgaccgaaagcgtaaacttcgaaggatggtcctttgaatatagaatccactcagactaaaccaagactcacccttccttgttccggtcgacgagtccgggagcagtggccctagcatatgtgcacgtgcagatgaacaaaatcacacagagcagtaatgattgaaagttgaacaatgcagtctgtgtcgcgtgtccagcatcaaaagatgaggtttcagtaagagcttgtacataacgaccaaggcaaacaaggaatgccataccatgatcgagagtcgatatccagatgagagtcggagcgaacgagaaagtatagactgttgattggcaaacccaaagatatcgaagtaagcaacatcaccacgctctgcggtctgttctccctgtcctgcactccacacgctctcctctatctctctcccatcaagctggactagcactcacgacggtcgttgtttgctggatgagtgttgctgatggggatgaaagcctacgtgtgagcctaggggaggcggcgagcacagccttgttctcccttacagcccaacagacgccacactgaatttgagaagacaactccagccattctatataccttgcctgctcgtctcgcttgctcgtcttggatcctctctttctagctcacacacacgcacgcacacacacacgcaacgaatggaacagaataagagaaagctcgagggctatgagttcttcaggtccatcggttcgcctaggcatgtcctcgcacccatggtggatgcctccgaacttccttggcgaatcctttccagagccccggtcgacgacatggatcgtggttctacggctggtatcacttcggaagatgataagagagtcgaggagcctgggaagaaggcagggaagatcgtcaaccaagctgctacactcgcttacacacccatgatccacgccaggttgttttccggaccaaaatacgaagataacgtccatggtcgaggaatgtttgacctgccgtgtggttcgtcaacattgctacctagtcaatttgtggatattgtctgacaatcatggattctctttttctctctctcatttcgtttatttcacaggcgaggaaggatcggaagaactctttccagactggggtgtatccgatcgaccggtgtttgcccagatgtgcgccaacgatcctgacgagttcttaattgctgccaaaaagatccaacatagagtggacgccgtcgatctcaatctaggttgtccccaaggcatcgctcgaaaaggacaatacggcgcgttcttgatggaacaacctgatttgatctattcgctaatcaacaagcttcacaatgagctggacattccagttacgacaaagtttcgatgtttcccagaggtcgaaaagacggtggagtatgcgcggatgttggaaagagcaggagctcagatcttgacgatccatggaagaacgagagagatgaaaggacagtacaccgtaagtccgtcattctcttccgtcgtgttcgttgtttccagccaaccgacttgcttctcttcttccagggcctagccgactggaaacagatcaaggcagttaaagaagcagtcagcgtaccggtcttcgccaacggcaacatcctttactacgaagacgttcaacggtgtatcgacttcactggtgtcgacggtgttatgtctgccgaggtttgtttaacagattcctttctttatctctatctcggaaatatgcggaagtcttgatgttcaatttccctccttttctcatatggatacagggcaacctatacaacccagcgatcttcctccccccatcgtcctcaaacacttcgattccgcacgaacacgtcccgatcactcacctggctgatcgatacatccggatctgtcaatcactcctcacaaagacctcaacctctgctgttaaatcacatttgttcaagatcttacggccagctttagatgtcccttccaacagagacttcagagatcgactaggaagaggtgttcctatcgacaagatcgatggcgaagaaggaagggaatggctgtcactttggagaacgttcgtccgtgactttgaagaacgactgttggatcaggcttgggaggccgtaggaaaggagagacagaaggagtttccgatagtggattcagctttcccagtagatcctcagacatcgatcaggatagtccctcactggctatcacaacctcaggcgcgagctatcaacccatccaaccctaccagcaccagtgccactgcttcttcatttacaacttcaacctctcttcacccagcttcccatccactcatgacgacatctacattcgacgctgtcgcttctctccatcctcccaattcatcctcggccatgcccatctctggttcaaacacaccgatcacatgcactttcctccttcctcctacgtccaaacatccatccccacataaatgcacaaacatggcatcatcttcttgtccccatcggtcatgtataacccattgtcggttaacatcgttcaatgaactcgtcgcacagggtctcacaccgacaaacgttagtcaggatggaggatacggcgcaggtgaacatgtaggtctaggttgtgagtttcacgaggaaaaggtcagggcgaaggagattctgaaaagagaaaagaaggaggagagagacaggaggaggttggagaacatcaaggcgcacaacaccagttccaagtgtaacaaaaagaacaagaactcaaacgggaacgtcaatgggaatgggaacgcgaagaggaagggaaatggtaagagagaactggacgaaccgacagaatctcgagctgaagacgactcgacctcaggctcggtccaatcttcgataaacggccctgtcggaagaaaaaaaccgcatctcgacgtacaagaacccactgtggaggaagaatcgatcaacagtgaacctccagtcgttccagctcttgtttctcctcctcgtcctacttcagactagatctagagaggtttttctcaagttgtgggtttcatccagttctttgtcctcgtggttgtatagtcgtagcaagtgcatatacatgggaaatatagacgttcgtccactctgattcgcattaaaccgaaatcctacaagaaaagacattcatcatgagaacgtacagatcggacaaaaaagtgaaaggaaatggatgctgaagacaattgaggaggatatcaggataaacatgtgaaaaggagggagaaaagagttgatcacgttctaattggtacacggagaaaaatcgagaaaagatagagagatgaacgaaagcccatatgaacaattgccaaaggccaagatgaaagaacggtgcacgaaagtcaaaaagatgatccaaggaaaagataaaatgtctctggtgataaagatggtaatttagagtcccaaattcttggtcgccacgtccaaagaatctactccgccagtagcagaacctagtgtattgatatctagatctaaacccttcatagttgaggcgtgtcttccgaaaaagacatcagggttgacacatgcagagactgcccgtctcatagccacactgcattacaaaggaagaagacgtgatgccaaatatcagaaaacacttttcgagaggcgggcaaatccaagacaagaaaggagcagaacaaacctcaggaacgacaacccgacctggaaacttgcactgcacaatgaggaaacacaaagaaatgaacaatccatccagatgtccatccaaaaatccgaacatataaggacttactttgtccagccaaaaccctctcgggcaacaaatttgaagtcaacaccctggtttccatattcggcatcaaccatgtgcgaaagcttgacggcgtcgaactaaatgaattatatacaaaggagtgtcagccgaggatcgtattgtagcgaatcactcataaaacctgccacctactttctcaggaacgacaccgttgactaaagacgaaatcatatggatttggaagatgaatacacgctccagagtatgcagaaggttgtcaaagaaacaaagcgactcacagtcaacgaacgcaacagtcatcatataaatccatcgataagctagccgactagcctcctcaatgaatccataccgctcgagcccaacccaggccatgatttggtgtggaggccaggcatacgggaaatctgaccaaaacgtgcgtcattcaagaacagtaagcacatgcgcgagagagaatgaggtaggaaggcagatagaaaacagagaacgcaccccactgtctgtttggtcgagaaagcgagatctttccacgagactcttctgtaccggggaccaaacctccgatcacctcaaatttggagagtgaatgtcggctagataaagaagaaagaattgactaagcattcttcctgatgattctgttcaggatgcacacgtagatatttcgaagattgatagcttacacaagtttcaatgcctggtcttcactcgcacaacctgcccaaagtgcccagaatgcggtcacactctcgtacctgctctgtctcttcttggcggtatcgtaatcgtagtatagcttttgaccctcattccaaagatacttgtcgatctgttgttttctgaattcagcacgggcgaaccactcggcggaggagtggatcttgcctgtagatcgggcccaggtcgatgtgggttgagcataggcttcgggggtgatcgggaagggagaaagggggaagtcttcttccatctcaaacgagtcattgaagacatcccgaatggcggtagcgatatcggtctcgtacctaatcaagcgcacgtagaggtatgattagtcgtcttctctctcaacagacatgatcggggttcagaaaagatcttacttgtagagaagggcgttgagatcgatcgttgccaggttggcacacctcttctcgaatcggtaagtggtatcgtgcccactctacgagaggaatgacggaaaatgaataatttaattaattaacgagtcctgatccactatgaaaactgaccaaagataagaactcacctcccgaacagctcggtcgtgcatgaaatactcgtccagttctggctctttaatctccccaaagttgtaagcgtcggcaaattcgaggacagagattccatgcttgtcagcgtagggctgaaggatgtgcgtgaagtgagtggcctcggtctctggaggaattccgagtccgtccggtctgaatctagagagaccagtgatggggtccattcggggctcagctacccagatagtgtgatattcctgatttgaaaaagaagagcactcaagtcattgagtataaagaaacggtcgaacactatatgataggatagcaagagcaaaccttgatagcagcctgaatggcacccttcaaccagaggttgtttgccttctcgtctgccctgtccaactggttgtacgtctggagagccatatctgtcaagaaaggaggttgcgttctgcacaaatactgtgtgatgtgttccgaaccgaaccgagccgagtcgttagtctcgtgggcaacttgattactagctttgaccgtgtaatagagctgagagcaacttacgtaacttcgacttccattcaagattttacctagaggttcgaaacgttcggaccttagtcagctcaagttgtatacgatggaaagtaaggtgaaatcaatatgaaacgaaccgtaatgcttgatttcaaagataaagtgctcaaccatgcctttcgccatctcgattttcccgtcaatcaacagaccgagggagatgaagtaactatcccaattgtagagctcgttgaatctagctcccggtacgatgaatggaatacccttgaaggtcgttttctttgtttccggatcaaccgtcttgcgcatggcgagtgcaaggatcccgggtcgatcattaagtgactgaacgaacgccgggtcgtctgggtttggggggagaagctccacttgaagacctagatgaggcttctgagcagagacctctctgtagtagtctgccatctctggttctccatgggggacgtagatcaatggctttacattgctcgtcctgttctttgggtccgcacaaataatctcaagaccatctccgtcgattctcctggtgagcgcgttccagaatgagtttcggatcatcctcgacagtctgtcgaccgggttctctgttagtcgagcttcatcaagtacaattctctttctgccatagtctcgggcgagggcgagctcctgaagcaagttggagagcatgtagtttccctagcaacagaaaagaagaagaagaagaaatcaaagttagtgtattggcacaggataagttgaaacgaacggatgaaatgaaaggacgacgtactcggacatcgaatgatttgtaaccgttcgaggttgccgtacctagggtcatcaccttaggtccagaatctgtgatacaaatctaatgacatgtcgagcacgatttctcattagataaatagggccaaggatcgagagaagaggtaaagcaagaaaacgacccacttggaaatctccatcggtgtcctcttgctcgaggactagtcgcatagtctcctctacatcaatcaggaaccgcctgggagccgtagtagacttttcatctgtcggatgtgaaccaagtgagcttacacaaacggtgaggcgaaacatagagaacagacaggctggaacgaaccgtgactgagtcggcgttgtctgttgataagatcttggccgatacctactcctccagctttggagggagccgccttcaaaatcatgttattcagagatacacatatgaaaaagacaaaagatcagtcatctcttatcgatcgatgtctgaagactctcgatagaacatatcaccatgtactagacacggtgatgagagaagaggatgcccagaagaggcacaagacagtttctcttcgaccaggccaaagaagaaaaacaaaaaaaacaaacctgactgaacgtcctggctctcgaatgaacctcggtcgaataatattcactggcatcactatgaaccgccgggatagtcttctttccacctttggccagtgttgaagtatccgaagggaaccctagtactttcacaggacctgatgctgatgtggctgctggtcggcctgcagtcgaggacgaaggatcggtggatgcagatgcaccaggagcagcgcccggagcgataggagtgctgggtgccggggaatttacgaaaggggattcatggtcgtcatgaaatagaagtgaattggatgtctttaattgcggtctctgcatcgtgggtatgagtgtatatgaatgtgtaagggacagtgcgtgtatgttgtatgagatatcgagtagaatgagatggagagaaggaagaggggagagaaaaaaattgtcccggggtgtttgacgagcctatttgtggagaaaggtattcgaaagttttgtagtggaccattaggaatcgttgtagtgaaagatagaatgactgataagaaggctgagaaacaagggtgacgtcatttagctcgcttttgatatcttacagtacataccatccagagcagatcaacatacacataaacaaacgacaacagctagggagagaatatgaagaaatgtatggggcgtagagaaaatgaagaacaatacaatatatggatttgtaggatacatgatacatgtggttttcgagaagcaatgtaaaggttggatgtatgcaagtaaggaagaggaaaggagatatgtcgtctaggtgaacagataccaagggattgtcagtgtgctgaacgtccttcagaagtcgatagatgacatgacttacaactctgaagaagaaggcgaagaagaaaaaaaggaagaaaaggaagaaaagaaaaaaaaagaaggaaaacgcctatagcgacgcaataaacacggcccagccgattttcttacaagccggcatgacccccaacaaggatcccttcttccaccaatgttttaccctgtgcatttccgtggccgacgaagaatgaacctgatgaagacgtatatccttgttgaactccgaatgattcttctaccgccgttgacggactgtcctcttctgaagagcttccaggagacggcgaggaggaggaccgatctatcgacgaacacacggtcagacgaacagtttctttcttaccagcagggaaacagcccccttgccctccgtccctgccaccgatggcgaccgtcctttccatctcctctagagcggccatcgatcttgtccgagttctcgttcggaattgttcttcggatcggtttcgttgatcgatgatttcccagactggtcgatcccattcatcagtcaccttcactcctggaatcatggttagcgaacccaacatggttgacaacgagtccgaccattggtccttcgggatcattccgattgatagccattcgagtttcggaaatctagctctccctcgttcgaagagtgacttgatctctcccagcgccaataggtccatctgtgatgaagggccaaccgcctcgggttctccacaaggagtttctccgtctaaccgataatggatccggctcaaccttcgatggcccagtttgaagagttctcttccatcatccagaccggaggagaagacccgatggttggttagctcgagtgtctgtagattcggacacaagccgaagacggacaagtcgagtaaagaatcttgtgggcaagacgatcggtcagtcgagagcgacagatgatttatcgttgagccgatcgcagagaggaatgtcggttccggaccctgtatgattcgagaaagacaaaaagattcaggagttgtgagcggcagtctagggctaaggaacaagaaaccccttctgaaaggaacggacccatggtgaagcctctggataacgcttcgttgtgaaactgaagtcaagctttctcaactgtggcatgtgggtcatgtttgattgtcgttcgactatactcaactctcgaagaggtatgttgtttcctaccgagtttcaaaacagaatgggagagtttgtagtggcactttgttagtcaagacctcggtagattcaaaaaggaaaaagacaaaccttggttgaagtgatcacatcgaattttcagcgattccctgtaaatcctcgtaagtcatcagaatctggtttgagttctgctcatgctgcttcttatagagtaaaaaatgaacagagagagctaggtgctacagaagagtactaacagggtgggcgggaactcgacaataccggtcgcaggatcacctgtgaaatatgatccagatgtgcgaaaagatatcagcttttatttcctcgcgcacatgattctctcgtatcttttaaaaacaagtacagaaggagagggaaggatgattctttcaacgcaccataccaaatctgtggtaaataaaggagacggttagcctcaagctctgattcaaatgacattttcacgaagaaaaaatgatagcggtcatgtccgacaggacaggtgatgatgtcgagaccgaagaacgagacaatgatgtttagaatgaagaatgaagacttacgcttagctcccgcaagtttttaaagattgggtacgtcaacacctcacttaaactcctattctccaccgccaatatcattcctaacgaccgcaaccggccgagctcttcgctctcgatctcttcgaactccttcaacagaggccagacaaccgttggaaattccacccttctgaccgcgccttccttgagaaggattgagagaagcctgagcctgatggagatgatagctttataattgaaatcctgtggaagatttgaaggttcccacgtcgcccaggtaaaagttcgaatgaacgaccggagtggcccagggacgactgtcgagctgaacgaactcggattagagatcgttctcagaaatcgtttcccgttcggtacggttgtcaaagaaacgtgcgcgtagagaagaggtatcgcaaccgactacagacagggtttgaatgacgaaaacggaggatggttcaagtcggtaagtgttcttcgttctatagccgagacgaaggtgccaagatccattgaatctacaaatccacatagtccccaagcaccttgacttcataaaagaatcacgcgtgttttccgaacgaaaacagccccacgtatttcctctgcccctctttgtgttccgcctcgatgccaagccgaaactcgtattgaaccagctagacgaccggaagggcaaacacaaccatacgcacacaaacggactcactgcgaaatctttgttgacgaccaaacaagtcttcaaaaatgtatagaccctaacggagtcctcatgttcgtcccctgtctgatggaacggagagatcgacaccccatcggcgccggcccggatgatagctgctttgagttcccatgggatcggtggaaacggtttgagcggtctttctgctcgaatgagaggactgataggaagagtgtaggcggacgtaggaacaggcatcttgttgaccaaaaggaaggcgatgagaacgacacagcttgtgatgtaggagtggacagattctatcaggggagagggagagactccaaccgagcggaagcagaggaggagtgtggaacacgaacaacaatgagagtgatatagaaaggttcgaggggaagttggaaggaaagctgggttcacgaggtccctgacctgtagatcactgtctttagctgaggagccaacgaaaacattcaaacaaggccaaacaacacaggcagatgagccaaagtggaagtgggtccgaggccattgaggagaccgatgtatgtccgtcagaaacaggttctacataccaaatgcgtgcgagttcctcctttcgttttcttctctctttctatctgacaagagaaaaaaatgttcaacgtgtttgtggtcgtggttgtgccgagtgtgcgagggctgaaaagagacaaagaggttgtgttgagtttaatgcaaatgatgaattgaatgcattgtctatcggaaccgacgcctcatttcttcttgttttccttcccttgtttgtgctctcgatccatcctattctttctttgtgtctcttggacgatatggaagaccaagaacggcgaagaaaatacaagctgagccttgcagactcggtcgccggtcgtgtgtctctaccatcaaaagcagaaagcccttactgccttgcagagagctggatcagacatcactctgatgacgaaccaagtacgcaatgaccatcaatttcgcttatctcgttgaacccggactccttcccatattcactccaaatttcatgatgatcaactagtactcttttcttatcacgaccgaagctttaaacatccatcgtgaggcagaaagtgttatctctacagcaagatatataaaaagagacggagaacagagtcgtttaatggagagggaagtcggggtctcaggagtgaagagggagaaaggcttgtaagttttgcaaacgtatcgaccaaactcctattagaaaaacaaaagggaggaggaaagaagaatgaagaagacgagaaagaagaatgcagatagcggaaagagaagagatgagaagaaaacaagaaaaggtaggactagaggctaataaacacattggacgtaaatcatactctttacaagactattggagtgaagaaacgaagagataaaattcagtctccagtttgtctaacgcgttcgtccgatcgagacaagaaccaatagtacgaacaataatcaggaggcctcctggaaaccaacggctcgccggctcgtggcgcaggatcgaattgaaggctgtgaggaaaagaagaaaccccaatcagaacccagctctcatcttgagcaaaactacaaaggacaaaaaacttacaaggtatacttgagtgcatcgtcgacctccaagatggctgcctgattaccgcatcggtagcagtagtttggcgccgagaaaatggtcacgacatttttctaaaaacgagaccgggagcaaacaacgggcaatgcatgagccatcgatgcctctaccgaaaatgaacaatatacacataatgtattcaaagaaaaacaagggaaacctacatcttgagcccatgagtatccctccataaccaactgatgtgctctggctacgagtgttaatccgttggaatggttgaaagcctcactagagcgatcagaaagaattttcgtaggtcaagtaaaacaaatcagcttcaaagtctactatgtcaggagaacatcagcattgagatgaaactctgaaacgaacctgatgtcctgcccgaatgtgtaaccagctcctcgaggacttataccccaaccacatcgatcatccggatcggaccacaacaagtcgcacatgggtccctcgtggggaacctcttgaatacgatcaatcgaacgtatatggtctagtgtgtcgatcgaaggtgacagaccaccgtggagacagaagatctttgcaggcgagacgagataaacagaaaagaccaagaaatcagatattgacctggcaccaatttgatgatccgacgtaaactcacttggttctcaatcaaagcggtcaacggcaggtagtcaaaaagatcagtgaaaaatttccagacgttggcgtttccgtactttcgcaagcactcgtcatagaaaccgtaaacctgggtgatttgtcgagactcgtggtttcctcgaaggatcgttactcggtctcggtatcgaagcttcatagtgacaagtagagtgacagtctcgacggagctattggtgaaaggcaaggagagcgatagaagagaacgaagacgaaacggagagtaacgaggggataagttaggtataatccctctctacaaactgtatttagaggtcgagagaaaacgaactgatatcctcggtcgacataatctcccataaacaggtagtttgtgtctggggagtttccaccgattcgaaagagttctgacaggtcgtgctgacaaagtcaaattgcacggaaaagagcgtaattgagatctggtttgtccttatttactgaatcatcttttctcgtcttgtctcatgacttatcgtaactaaccccgcccgcttgatttaaccaaggggctcaggctgtcggccgatagacagacaagatgtttcaacatgacctcagagaaaaggagtacgtacgaattggccgtggatatctccacaaaccgttacaggacatcgaactggttggacattcgactcctccataaggacctcacgagtctgaaacagatggatgatcgaatatgtcaggatgatctacaagcaacgattcgacaaatcccaagtccaggatttgactaagacaagataggatagagaagtaggaaggagagtgggtaatcgatatgtatgttgatggagatgtttcccacaacctaatctatcggccgcccgagattccagagatgctcctttcctaagacgcatatgctccacccttccatgccagctttgacgaaaaaagagctgagagaagcaaaagaagacaaaccttctcacaaagtctcttgatgtctgcttcactcagaggcttgcattgctgaagttgggcgatccattgatcgacctgtttttgtttttaagaccgaacgaagaaaaaaattcccccagagacgaagatgatggtcccgatagaaatcgtgttatatacgtgggatagggagttatgtagaccgacgtcagtgcaaatgtccagtgtctcagctaacacgcgttaagaaagagaaggacgacacgaccggccatatcgatggaagtctacttggcaagggggaagcgagcaggaagaggaaaaacctgctagccattcagaccttcagggcacatacctctccggtgtctcccatatcggaaacgaggaagggaggggaaagggatgtgttgtctgtcttggtgtacgggctgatttggtgtgagataggtgtggactgacgagggatgtaggaaagaaaagagcaggagagcaaaagatcgagagagggcagtgatggaagagagaaaaggaaggagagaaagacagaaggtagcgatgaacactgtgtgcccagtgacgggaattgtaaccatggtatgtaaccacttcaaacaagccaagttcccccttccttatcgttcttccatagacacagtacaaatatcatctagtcttgtggagagggtacattgatagtgagaggtatacggagcgtttatgcggttcggtgagggatggaaaaattcatgacgagaaacgtaggactaacagctgaggaaacgatacgaaaaaggagaagaatagagaggtatccaatagtcaagtagagatggaactggcgtatatggctcgtcgttcacgctctatcctttggtctcatacgtgagctgctcggaagaggagatgaaaagcttttttacgtcctggacagtagtgcgcgcgctaatatcggcactgagaagagaacagtcgcgatcaatagattctttgcagaaaaggcgccatacctgaagattctgaacacagttaattaggtcactagagtgagccaaatcagtcgtgcaggatgtcctgattgtacactactacacggactagaaaagggaaagacagagacagagagagaagtatacgatgtggaatgtaggatagttcatgcttttttccagatcaatctcgcattttctctctcttctaattcgctcgtcgcctcgattgtttgaatgatcaatcgatgtgttctctctatacgacatgtgtgcgagtgtataagttgatgtattctactttcacatactcagactagcaagatagaagattcgatcatctttcgtgcagtcaacactctcgtccaacaatgtggatagccctgccgatgaaatctcacgcgacgatatttagtcaggtttagatccgacccaaaaggccggaacagataaggtgagtttataagatgaagatgagataaaaggctaatgctaaacaccgagaagccaaggatatgatggaggtgatggtgacggtgatggtgatggcagtcaacacggcagtgtgttgttcgagtactactcttcgaacgaacctgaccattctcattagtcgctaccactgggttaggatcgatcaccgagatcattgctacctataagattacagaaagtccatccaaatcaagttcccgatagatgaccgtcgttaacataatcattgccgtcgtcgttgtcttcgttgtcgccgtcgtcatgttcactgttatatcaaaatcgaaggtttagaaacaccggagatagaagcatggaacgtctcttcacgtacgttttcgggctcattcctcttggttacacggggcgcgcctggaaaagactttgctcgttgttccaacatccaggcgcttatccccgacacgaaatttctctacttgatcctttcaaacgagttcttctctctttccaaagaatctgtccatatcttactcacacatatatacacgtataagcacacgttctgtgtgtttgtcacatacatccctcacgtttcatacatccgtcttctgtacattccgtcactgcaatccgtccgcgtgcactatctctcatagccgggtagacaccagtcgttttaccttacagatccgtcctgtctcttctgggatctcgtacaagaccatgggagcctcttgctgcaaacctgacgttcgtttctcctttcgtctcttgttctcttggacttcctatctcatatctaggtcctattcttttcttgttcaatcaggtcatcgattatgatggggaaacaaacttgtttcatttctatcttctccgtagcgtcggcaaaggagcattcggcaaggtcagtcctcgctttcttacatacgaccaagctctttctccgacatccatcctctccctgacttggcgcgggataagaaccatgatcgaacaatctctctcacgattcattctcaatagagaagctatacttcggacctcagttgacgactatttctatcgtttttcttccccccccccttccttgataggtccgagtcgttcagcacaaacagacgaagcagctcctggctttaaagtatatcaataaggccaagtgctgtaagatgaaagccgtggctaacgtcattcaagagaggagattactcgaagaggtttgtttcttgtcgcgtcgaacttgtcctcgtgtttttcctcgagagagtttaacgaaaagctgacgattccttgttgcccaacatgggtatatgcggtccgttagatcgaccacccgttcgtcgtcaatctaagatacgcctttcaggacgacgaacactgtttctttgtgctcgatctcatgttaggtggtgatcttcgatgtatgtctttcttgtcgttcaacttatcgagactgcttccctatcctcttgagacgcgtcactcaaaccatcttattaccaattctctaaaaaactccacactcagtccatctcgatcgtttgggctcactacctgaagaggctgtcaagtttattgtgtcagagatcgtgctcgccctcgattacctccattcgatacgaatcgttcatcggtaggatctttcgtcttccttgatatatcgatcttgctcgtttcgcaaacatcttctaaatccctaacgtctccctccttcccttgtcctctgtatattctccctccgttctttctctttgatcttttctcattcttagtgacttaaaaccagacaaccttctcctcgacgaacgcggtcatgtccatctgaccgattttaacattgctgttcacttcacaccatcaaccgcgcccaatgcgaaacgcctcatgggcgtcgcaggctcgatggcatacatggcacccgaagtcctcaaccgcaagggttatgcctgtcagatcgactggtggagtttgggcgtgattgtgtacgagctttattttggaaggagaccgttccgagggaaaacgaatagtgcgttgacggagagtattgccagtgatcgcttagtctggccggatgatggagagaccaagattggaaaggatggaaaagaattcatcagttcggtacgtcttgcttcctgtatttttctcttaaaatgcgaagaagatcagttcgacagagatgaatagatcctgccaggtcaataaatgacgctcatcgccttcatctctcttttcttccaacttcggcctacaaccgctttttagttactggagcgagatccgatgaagcgacttggttggaaagcagacgggaccggcttgactgacatcaagcggcatccttggcttcggtcgatcgactggtctgcggtggaaagcaaacaggccgtccctgtctttgtacctgacgtacgtttcctcttctgtcctgtctcttctctctcatatattaggtactgacaaattttagcttgattcgtctgattcatgatcccttcctggtcgatcacagtccaaaaaagcaaacttcgatgcaacacacgagttggaggagttattgttggaagaaaatccattaaaggctcggaaaaggaagccgaatcaggatgtgtcgttgttgagcacagatatgcgattgatggaagaacagtacgtgtccccttggctatctgtcgctgttttcttgcaaagaagcgtccagagttgaacctagttgtctctacgtatttgtcaacctaaagctttcgattatatgactatcgccggatgtctagaaaatcctattaccatccctcgacccctccaccgcctacattttccgtcgcgaacccagcaaacaacgctagttccctgctcacagtaccggcttcatctacgtcgatcacgacgttgacaaaattgataccgcttgggcccattgcccaagctgggtcaaccgaacgacctaaaccggaacgcgcaaactcgagtgtatcggcctgtcatctcgttagtcggacaggattgagagtagagagtaggattgctaatggtgggggtaagctgataggacaaggtgaacaagaaggagggttcgagttggatcctctggttagtcttttgctgccttccttcccttcgttccagggaacgatttatttatttacgcaagtccattccgcatggtgtctgatgaggacctttcatttgctttcttctattgggatgagcggatccagaatcaacggaaatagtaaaaaaagataaactcccgatcaacatctcaactcagccggctttctgactctccgtatattctcccactcatccttcctgtctttcgacattgaatgtccgaattatctcatcgtaaacttataacacaacctacacatcaactctgataccctcttgttttctcacctcaatcgtcccatccttcttgttttatatcctgtctcttgctttggtacctggtctttttcgctgtgcttctcttccttcccttgtcttttcttctcgctcccgctctcgctctctcgctttcaaaatgtactctttctaacaccttcgcttttctctcatttccttcttgttctttgcttactgttttctgtttctttttttctttttttnnnnnnnnnntctttcttttttatctttcaaagaatcctcactagtagttaatctcttctctaagtgagcataatgctcgacatgggaaatattctttttaggtagccatcatcgatccttaaaattcgtactgtcgagcctccaggagctcgacattcacgacagctccaacgcttcaacgtttcaacactccaatggtttccatctacactatctgcttttctctccgttccgcaagcatattcatcctgtaccgatctctctttgtgtttccttcttatatctgcacatacaggaaggagcgaaaggatatacatcttctctcaatttccgctcgcgctttatatcttcctctctttgcttttcgcttccaaaaatgacatagcttgttctctcaggggtctcttctatatctcttcttatatcattctggttcaacacccactttttactccaagaaatctatatctatctcatttcttcaactcaacttaaaaaaatcattgcattgttttgtttttaatcttttcgtcttcttcatatgaatatatatatcccttcgagacaacctgcttattctgattaacttcctctttcgccacaatcctgatcctgatcaatctctccattgaagagctcaagacaaactcaatcggtctaggaaaagtgcaaacgtaaatgagcaaaacgacacgtgtacgagaatgcgtgagtagcaaccctagcacgcgtcatcaccattagattgagaaaaaggttcagcctatcctatgtcctaactctcactcgtcatagccgtcaagtatgcttacaccttcgggacatcacgtttcctttctcgtctctgcattttgatcaagatcactgttcgagagatgtgaactgatccctcagattatgtatatatctggctgatatcggccagtgagccgtggtgacgaactcagatataaagttttgctaatcaaaggggtcaatcggcagtgccggctcaagaaacaacccatataaactcacgcttttccaccacattcgtatcttgacttccaacaaccatcatgaccaacaatccgtatacgcctctgccctcgactgacgagccggctgcgcgctctctcccttcgtactcgaaggaatttcatcctgatggtccgcttttgctggttggagaagcctcgtactcagattcctatccctcccaagttttgaattgagtgccttccgatagcagattcggagcctttataatcgtttggaccatgcctggttcaataactaatgcaatgcccactgaattcaaacgcactgtgatgtgtgaatggggtctcatcaaagaggtatgcttttcgcatcttgctgaaattaatctcctttctttctctcttttttcctttgcgaaacattccttgttcttcacgcgtgtgcggtgggatttagcttacaccgatccttgttctttgctcttaattttcttatctcttccatctggtttgactatctaaaagcaaactgctgagaatctgcgtcaggctgttccagatttcctcggcaagagatctgccgaacgaatgaccttccagatcccggcgggtgagacatgggccagtgtattggataataactggaatgactttatggttggtcgaacgtacccggaggttagggtcgtgatcatcaagacagggtttgaggaattcagaggttagttatggacattcacttgttgtcctcgagtgtttcttcctttcttcctctgttttcgacttcttgccctaaatttaccgttcagtcagacaaaactgattttatgttctgggaatcagacgctatgctctacattctatctttagttctacgagttgtctcagtcgcgttctttatccattttgtcgttcttgtggtatttggctaaatcatatcacatacaagcctacgaaggaacaaaccatcttcttatctcgacaatgttgtgctatcttcatcttgttattgctcctttccaattccatcccttgatccatgatgttctcatctctgtgaattgatggttttactcaccaatataatgaccatgacaatatctgtccattccaactgacgttttggatactagtgggcagcctgagtgtcgccctaggcgctgcttcacgtgtttctcgcactgacatcaccgacacgtgtatgacaacgaagtcgaacatgaatgattacatctcatcaaatgcgaacaaaacttttatacttttcctagtctctctctcctgtcttatggcgtctttttttagatagccgcttcatccaacagtggtgggtatatcaacagaccgtttggtgtcgaacgggctagctaaggtctttacttggaaatttcaccttgatagtttgccctcatgttttctgtagtagtgtttcaacccttctcgaaagaatggaagtcgtacttatcatgtatagctagatgcgaagtaacagaggtcatcatgaggtgacggaaatcgtgatagaaacgaggggtctatttaatagatatacaacttttgggtgattcgtattcacctatgacaactaaagagagaggattatataagagaaagggaagaagcaaaggaaacagaaaaaattctaaactatgaaggatgatcggtcaaggttgagggtgacccaataccctagttccaagcgccaagaccgggcgctgcaccaaagtagccgaccgcagggatcttgtactttctgcactctggatatttattcgtcgaactcgtcgctaaatagtcacaagactcttgatagatagtatttacactccaatcaccgaccacatcatcagccgaagtggaggagatgatgccgaagatgaggataccgcagagaggaatggcggatgcgaaagcggtggcgagaatgtagttgtacttcgaccaccacgcaaggtatttcttcttgatgtacaccaggaagaaccatccgatcaccacctgaggccagtagtttccgatcgtcacataagggttccagttaatgcctccactgatgagcacaacgacgtggaccttggcccaaagggacttggggtactttcgggcaaggaagtagaacggcaacggaagcaccgcaccgaccaagaagccgtagagcagggaggtgtagataccgccggcaccgaacactcgtcctgggccgagggtaccccagaagacagtggcggtgaagaaggtggcctct

SEQ ID NO: 2280 - DNA, 454 bp, Xanthophyllomyces dendrorhous
cggtgaagaaggtggcctctgcgttgcagtagaagtgctgcttctgactggtcgtgcagacatcctccaacgtcatctgccagttcaggacggcggtcgagacgaaggtggcgatgatggctccgtagatctggacggcgaaggtgtgtcgctgtgggatcttcatgtagtgggcgagcttgagatcctgggcaaatgcgatggcgttgtaacaactcataacaccatacgatttgaagtagttcatcgaaagagcttttccgggataaatgagaccaccgatgaactcagcaaacacgttcagcgtaatctcgattcccgtgatcgaggtgatcagcccaatggggatcaccatgatcaacgtcagggcaagaccgaagaagatgcaagacacgctcgactcggtagggtacacagtcagaccgatgcagccgaagacgacggcgatgacggt

SEQ ID NO: 2281 - DNA, 51445 bp, Xanthophyllomyces dendrorhous
cccaatggggatcaccatgatcaccgtcagggcaagaccgaagaagatgcaagacacgctcgactcggtagggtacacagtcagaccgatgcagccgaagacgacggcgatgacggtaagaccgaagtaccagagctcgggaacctcgtcgtactttgccatggcctggttgtggtagtccttgaacgcgtcgttacccttctgaccggctcggatcgatcgataggcgacgatgaacccgtttttgatctcttttcggtgataaaggatggtatgaacctatttgatttcgtttaggagtaaagagactaattgagtcaaaaagccactttattatatacatgaagaaggacgtacaatggtagcggagtacacggcaaagaagcaagcatagacgaccagattggaagcggccatgacgggctgagagtacagctggtactttgcaacatccaagttcttgttcacgtcgagaaccttggtaacattgaaggcttttccggtgttgtcaaagattcggttggagaccatgggaaggtagccagtgttccagatgttattagcccagaatccagcaatgatggggatggtagcagccattccagcagcgacgttgacggtcgagaagaatgggtagatcatcgcgttcgaactagtggcccacgaccaatcgagcgaaggaagaggcgagataccgagcccagagattccaccggtgacggcgctgacattaatggacttcggattgatccaggtgatccagttaaagtacgagacgcaagagacgagcgccccaggaatccaatagtagataaacatggcggcaaaagcaacgaagaagaacttcatccgggaaatcttccagccatttgcaggtcgattcgttgtgtcatggaaggacttgttcaaagcgatagtagacaggttgaaaagccagatgcagtgttcggggtaaacaatgaaccgtctgctgagaccagcgaatccgaaaccgatcatctggatagacagaccggtaagaatctgataaccaaagtctccggcccatgcttgtccgtagaaaatatcaagcttttgagtgatcaacacgttgacggtgtagggagcaaacattccgacgttggccatgatggtgataagcatgtgctccttctcgttgaacggtccaggctggaagtagagaggatggggcggaacaggatcagaataggtcaggtcaggtcaggtcggcaaggcagagataccaccaggaagagatgactgaacagctggagagagccggagagatcgagacttacgttcatgttgaagccgtgtcctcggaaccggaaccacaccttgttcggcagcaccttctccatgatctttgcgatcgggtacgacagaatctggatctcgttcaccgtgagcgagaacgaaggcgtacggatcgagaagaactggttgatgaacgagccgataccacaccagatcgtgccgatgacccagactcggaaggtgctgacaggagtagacgtgtcgtcatggcagccgacgaccgctcggacctcagggtaaggggacgagaaccggatgagcgcggcctctgtgggtgcaagagggaagggagagaagagagggaaggaaagagtggaaggttagtgagccgtcctgaggacgcgcagcctggcttgagcgcggaaagagagagagagagagagggaaaggcaggactgaccgattcgcatctcttcgagcaaggcatcgtagttctcgagcgtgctagcatcgcccgacaagaagtactcgatcttgaccttgacgggggtagggaagttgggatcgtcgtggtgctcaagccaagcgtcttctagaatttcgacaatttcttcaaccgacagagtcaaagccctatcgtagacggcgtcgacatcctgggagagcacgataagatcatcctgaacgacctgcgactcgagaactggagctgcatgctggccgtgatattcaccaaactgcggttcaaaagaaatgtgacggtaccggatagaacgaaggggaataagttgtcagctaattggttgtgtttgggttggatgaatgttcttcaaagtgaggaacgtacggcatccttcttttcatcctccacggggtattcgttgaccaaggctacttccttggtctcgtacttgcctagctcatttggtgtcgccattttgaaagaggtgtgatagtgcgactaggaaggtatttgtagcaagggtggaagttccctatggcctgataagtgtggctagaaagacgatgaacggaaagagaacagagcggttgcttgcttcctttctattgttcttgagagaaaagagagaacagatgggtgaagaaaaggaaaccccatcttggtcggtttgattggacctttaagaaggaaagcagaaagaggcgagttagtcgggaatgagatggatagatagatagatagatagatagatagataggtcagaagctaccggaatggcacattatcgcgagcgataggatgtacaatgtgcttcactagaggtcctataagattgcgtgtaaagcaagagtcataaacggaaggaggggtacaacgtggtggcagcggatatcaatttttgtggcgtacgccgatggtgtcgtgtggtaccaaaaatcttggagtttaccttctacctgactccttccgactgagtacctactcgctgatcgctggctatatttcgcctcctcagctcatgatcggccatgggaaggctgaatactcggttcacgggagctaagtctaggatgcgttccatcatatctctctaaatcgaccttgtgagttctgccccgtatgacttctttccagctgtctcttacgcggatatattaaatcaagtcgcgttgaccatctgttccgtatgagcgagatgataatggtcgcagttcagccggctgtcaggagagacaacgaaagaattcaatactttgggacacatgcgcacccaagagtatgcgcgaaacatattttcagaacacctcccatctgaactatgatcagcagtgaggatcagtgtgcgagcaaaagtaaaatcgaagctccacatgtgtggaggagagatcagtcttggcacgagagaccgtaatcagtttcgcaaatgccgtccgttatcactcaagagtgttatcattagtatcagtagcctcgctcgtctccgttgtcgtatccatccgacgtactcgtcagtctttcgacttttcctgattgaatgcaaactgatcaagctacaaggagaagggtgaataaacatacagccgtgaccggggtttgtaccacacgtcgcccacgtatcgtccgtcattcagcgctccgataagccgagcagaaaattatttctgtttcgaccatgtggaggaaaaaaacgccgaatacaaccacaagctctcttcgccatttctatcagcgaaggtaacctgacggaaggtcattcatcagtagcgtcctctcctttctacttcttccttcgtgctctttgagaagaagtcacagaatggaagagatttgaaattgagaaacctcgtgtgtctatttttctcttcttgatcatccaaatcactttatcgttagctaaaaattgttgcatcaaccaagaatacatgcatacagaccacatatgaatcagcctctaagttctatcctgtcttccatctggctggcctagcattggaagcagtgtaaagttttcatcagtggtggtggcagatggtagtcatattatcatcagtagtagtaatagtagcagcagccggccatcaccggccctagcaccgggccaatgactgccgcgtcatttcctaggcgtaaccatattttcaatcgatcggtaaccatcatgttgtaaccagcaatgatccgtttgttcgatcagattcactaccaactcgcctgaacacacactctttgaatccctatcaccctcatacacatgctcaaacgtacatctcatcttcgtccagcctcacgcaggctcatctcttcggttccttcgtcgtccgtcggtccggggcggataggtgtcaccctgctcgtcagcactctcggtgttactgccgccggtctggcctactttgcatccgccgatcgaaaggtctacgctgaacctctggtggcggagttggatccttcggttgtaagcgagaaaaagaagaccaaacgtatatctagttcgtccggtaaaaccacagtcagggaaaaaggagaactcgatgtattcttctggggttccaacaggtgagagctttcaaatgaatatacttctcacttgatcgatcgagagagttgttcccgattgaaattcttgagagccgactttaactgactggtgctgtttggtaaatctacaagcaataacgtcttgggccaaggagtgagctcaactctgccgatcaaataccctcgactggtggccgccttatccggtccaggcgtcgcatttagggatctgacgatggaggagacctatggagccgtggttgatgccgctggagatctgtatatgtggggtaagaagatctctgatggggagatcgagaaagtacagtcgacttctggtgggctgaaacgatgtcttgtcggcctagtaagttcatgagactccttcactcgtctgttgtttgaggtagccgctagctcagcttggtctctactctatctcaaaacacaacatccagaacatcactcatctggctgcagcaaaatcaaagctatatgcgctctcttcctcaggcacggtctactgtctaccgaccggtagtgaactccaacaggcttccgatcgaccactcaccaaacgatcgttttgggcccggctcgatttccttcatctgttcacaacgtttatcccggaccagccggtcgactatgtgtccctagattactcgactccagaaggactcttcctcaacaagcgcgagaaggtcacccaaatcgatgccggaaagcaccacttgctcgcattgacaaaccagggaagtgagtctgacctgaacggtcctctatctcttgcttccgtgtgtccatgctgattcttcctttggcccttctccgcatctaaggggtctttggacatgctatatccgaactggccaactcaaaccaccagttggttgacatggattccatcgttcttcctagtcccactacatcctccctatcagccgagactcgggcgatatttaatctgacgcccctggacctgccagactactcggaccgagcgattcgtcaacgagcccaactctccaggacagccgatccattcattctcaagaatcttccacaggaccctcggattcaagacttgagtgccgtaccgacagcagatactgcgcgagtgaaggaagaaatcttgacgaggcgtgggttgaaaccagaggaagatatcagatggtcgaccacgttgtacgagatacctgtgctgaacgggatcaaagtcgaccaggttgcagccggtgaacgaacgagtttcattagatctagaggaagagttcttggatggggtgcgaacgagtacgggtacgatagtcttccttttttcttctttctcagtcctgtgtctgacagaaatttcgtgcgcgcttttacctaaaacatccttgatctttgctttctttcatacagtcaaattggactaggctcgagatacaccacagacaacatcacctcgcccacagaggttatctttaccaggttgctcggttacaacacttcatccgggataaactgtacaaacgttaccatcgcggccaacacaacgtacttcacgatttctagagtgacgtcgcctgacaacaaggagtacatcgatttgttagccgccgggcatggagtcagaggagaactcggaaatggacaatggaaccaggtcagcggtggttgcgtcaaagtcaaaggtgtcagcggtctgatcgaatgtcagtcaaactttccgtttcctcttctctgatcttctttgtcagaaaaggttttgacttgagaaatccttttttcggcgcttgggtgaaacctcttagactctgagctcgagaacaaacaagtcccactctcgatccataatgtgtcgacttcaaagagcggccacaccgcggtctcactaaacacgtctcctttggctgataaagacggaggattcgcgtacggtcgggacgtcatgatctggggttacaatggtatgttctcttcttccttgtttttttatgccctgctgctgctctgattaaattgactgtctctaaaacgtcgtcggggtctcttctttttcaaaaaaaaaatgcaaactctagcgtcctaccaactaggaacgggcaaacgatcgaatcttgccatcccccagcacatctcgcccttgccgtcgaacgtgtcgtcgagcccgttcagcctggggtcgaaagaatccttgatatcctcaggaacggcctcgccgatgcctcactcgaggctccagctgggcgaacgggtgatcccgtctggtgagctcagagacctacagggtagaaaggtaggcggcgggaagaagatggtcgagcaggtcgtccatgctggctatgagagctcggccgtctattggaaacttgtctgaacgagcgtgcgagagggcgatcgaaaggggtgagcgcaagagaacatggcgttgtaattgtacacctacccttgttcatccgattaaacgaacacgttccatccagtcctctcttcgtccatcttcgagtatatgttttcctcttcttttcctttttcatgttctctctctctttcttcctttatttgtcacagaaatcagagacgtaggacgcaagacggacagagaggaatgagggacccaacgaagaattggaggttattacatggtatcgatttcgtcttcttcttttttccttcttcaatgaaaagatcacaacaacagagatagtagtaacgacaataaccagcagataggaaccaaaaaaaccaagaagagagagagatataaaaagtgacaaagagaatctacaagagagctaagcgcaaagaaagaatctgggaataagagacgatacaagacgaacgtacgggagtgattggtaccagatagaagataataaggtgagtttgagttttagttcaagtcaaggttaaagagaggagggagaaaggatacaaacaggcaaaataagaacatgaggcaaggtaaggcacgtcaagtggcacagagtacaaatagggcttggggagggaataccaatgaaagactgtacaagtccaggacagcgtaggaatatggaatgtttagatcaagtaagaagaaaagaacgaaacacacaaatacgcatacagccatatacacacatataggcatagacacatgcacgtaagaagaagaagaagaagaagaagaaaacgcccccaggaaagagacgagccaaataaattacctcatccctgggagagatcaagttggaagataaggagagggaaagaagaaaagggatacggagtgtcgttcacttcgtcaatgtaggagacggaatggaaggtcttctggctggtggcccggggaacaacccctggtacgttctcggactgattaagaacggatcaggcgttctcccgtttccgaccgtcaaggccggtagtccggaggaaggactaggactgatcgtcagagaggaggaggaacaggtgagactctgaatggaaggtaaccgagggtagtcgcctgcggaaaaggtagctcgtctaggggcgtgagagtttccactgagactattgttcgtcgttgtcgtcaccaccgttgtagtcggtagtggtggtttggccgatactgccgctaccgatgaagatgcagaagatgaagacgaggacgataagaacggagggactcgagagctaaaaccatttagagatgtcactcctctcatcgccgatgatgagaccaaccccgaccccgccaacgtcgtcgaagaggaaacgtccgactgtgattttcgagaggtagaaacgaaagcgaggccgctatcgaatccccagacttggtaattctctttccagagcgcggccaatctttcgtcagaagcaaggatctgggacctccatttcgaagcgatctgttccagtgatcagaacaaggtaggggaagaccaagaaggcgtcaaatcagttcaattaggatctgattcgatttcaaacagagaagaatgacatacgtataatgggaaaaagcctatttttttttatcaaaagattgagaagaaggagttaataaacccatgtcggtatgaccatccaatgtaagaagagagagagaacaaacaggaagggttccgtcttcctttctcgcccacggcttccaaaagaaagacaatgttctcaatcgcctgtgcttgtcttctcgagaggaattcttcttttggagtgtcgatcccagacgacgatttcttaacggcctgcagatggaaaaacatggcgacctgtaggggagaaagaaagaaggaagaaacgttgttggggaacgattcagtatacaagagggaaaaaaagatagatacgaaaacaaagctgaaaagaactcacctcggcagccatatgaatgccggcaaagagatgccctgtgcttcctccgttctcactctgctcgccctcttcgacagcccaggtgccatctttgatctttctgccggctgcctcgagattcgctttgttgaactgtagtcccgggggcaagctctgagcccaggcggcgagggaagcttcctgatcttgaatcgagctcgagctggccggactgagtggggtggacaccgttttctgaaagatttctgccactctggcaaggtagcctagctcagatatcggcgttccttcgaggtcccctcctctgagacctactctgggtgagctgggttcgatcccaaggtcgaacgatgcgtcatcgaccgggagcgccaacgaacaggcttcttctgtgaaccttccagctggtctgacggtccagacttgggcatctaggaaacaagtgagagagtaagaaaaccagaagatccttgaccgggtctctcttctagtgatcgcccgtctagacatgccggaggaggattgatcggaggaaatcctatccgggttggtcaatctggtgatgtacggaattaggatgtctaggtggcccaaagaagggatgttggtgtgagcaaacttaccgaacggtgtagggatgggaggaatgtagatagagaaagattataaaaacgaacccatgtaaaacaccatggactttcccctgcgcatgagactttcgtatacgaccatgagtgctaatccctgagcgagctcttcctctctatcttctgtatcccaagcggaagggtcgttggtgttaaaaaacgcgtcgacctctttggcgaagatgtcccctttggtagatcgttctctctgttccgttcccgtcccgccggcttgtctagatcggaagaagggatgtgaggaaaacctggcggcaaaggcgtaaatggcaagggtgaggaccgggtgtaggttatcattgtagaacgcgtggtcgaacgagggccggtggaagattgagcagatcggttcaccaaccgtctggaagaaagtctgaatgagggatcgtctaagaactgcgggaacagccgtcaggatcgacggctgcggtgatgaatggatagggatcaaggcggaacgaccagaagggataacgttgttagactgatgcttcttgatcatggtgttattggagttggtaagtgagccgttggagagggcaggagtggagagatagagtggtttccccatcagcggaacattcttcagattgctgctaccgccggcaccggcggcgaaaccggtcccactggcagcaggtctggaataaaagccttctcctagtaaactggttcccatcgagagtggactaggcttgacggatggagggatggagcctagtggttgttcgactggggcgactgcgacgacgatctttgaacgtttggcaatattttgtttcgagctgaccgatgccgatacggaggtcggagggatggggaccgagtttgaaacaagaagatccggagaatgtcgaccattggaactagtgatagatacggccgagcctgatctcggtctatttgctctcggcgcaggtacgggttgaccggaggaggacaggtagatacattccctgccggagaattcacagtttgaacatggaagttcaccagagcagcgtcttttattctgtaaaggagggaaagaaggaaaaggtaggagtgatagaagaaagaatggtggagtaagttgaaaggtgaggggattgtcgaacagagaattaacatggacgtaccttgtggcaagcgcctatcggtccaaaagaggatttccaaatagaagaggaaggaggggaaacaagaaggttctgtgagtatgagaaaacgaaagagggataggacgaacgaacaggagtaagagagaacaaagagggagacgtactagatagaaaagtaacgacggcgacacacggatataaacacggagaaattccaaagaaaaagggttgagaattgaagagcgcaggcgagacggcttttgatggatagatggatggagaaactaacctgcaagcttttgccaagcgctgagagttggaaagaacggagtcaaacaggaaaagaagatgaaggccatggagaaggaaccaagatgtcagccaacaaagtccagcagaggttccgtaggattccaacggagaatgcaaaggcaaaggacaaagatagcaggaaagagaacagacctttcgcttctttcctttcgtcgtcaactcctccgcctcgcccggttcttctaaaaatgctgttggcaccgagtcgacgacggatccattcaatttggcctctgtcggatttgatcttgaacttgacccgataggggaacactgtctaattagtattgtgagctctggtttgggtgcgggtgcggacgtgattgtggacgcagctactgactgtgtagccatcactgtggacgtgtgggccgtagaggtgcgggttaaggaagaagaagaggaagaattctgagccgctggtaccgtcgcgccaagggcggatgcggttgaaagggctgatagagacggcggttcctgcctggccgtcgatccggttaacgccgaagggggagaagatccatcggctgatgagccggacgaccggtcggacgcgctggacagttcctctgccgcagacagcaagacgtccagtgcggacagatggtcggtcgacgtggcgatggtggtggcagcagtggcagcggttgggtctggatgaacgactgaactgaccagggcggccggcaacgacgacgatggagctgctgctgctggtgatgaggatgaagatgaggatgatgacctgatagaatgagtcttgcgttctgtctgatcttgaggccctgatcttattgacggtgtgatcgttcctggagatgacaacccggaggatgacaacggagcagacggggaggaacacggggacccagtggtcgattggaacacggacgacgagggccgtgtaggtggatgagtgtaggtagaagtagccatggcagtggtagtgacggtagctatggattctaccgggaacaactcagacaacactggtcgaaccgagagatccatcgtgtgtagtatgagtggcggtatggatgaatggatgtaagaggacacaacgctacgagactggatcgacagaacccagagaaccaacgggtgagggcaaacagaccagacggggggataaagattgaaaaagggagcaagaaaaagaagctctcgagacaacagccggcggcggcagcggacgagagaaggacttttttggtcgatttttctctttctttctgctcgatctcgtgaacgtgaacgtgaatgggcaggtcagggcagagtggaagagtgcactcagggcaaaggcacaccaggtgcacgcctgtcaggcacaaaaggcacaacaggcgcatagacacctacccacgcacggtatgcctaacgggccagagccagtgcgggcgaatcgatagcacccatcgactggtcatgtggcccttgaccgatagagcccgaggagaattttgcttatgtaagcttgtagttccgcttaggtaactctcactcggtgttacctcgcttctgtcgatctgtgcccacttggcaagtgtaggctcttctttacccgggtctatttggtctctcgcttaaatgcatatgtgtgtgtttttcgtttgaagtgacgtatcaactttgttgtcgcgggtccgtccggtgctcgtttcgtgctcgtctcgagatccgagtaactggacgaggcctgtgctttctatccactcggcgacattcgatcgtgtgtagtttgtagtgtgcactgtgtgatattgagcattgtacatacatagacccgcacatacataaacacatacacacccgcatacacattcaccttacaactcggcagaatccacgttgagcatgagccctccgaagaaccggacgttgttcacaaacgctaccgctttctataggatcgttttgttgttgttgtttttttgcaccgtcattgtcgttgccatcggtcagtcacagctagtaagaaaaagaaagagagagagaaaaggagagaaaaaacgtacgagcgcttcgttcacagagtggattccagaataagtgtacctacagagaagagtgcaatgcaaagaacgatgaagaaagataagcgaccctagtacatgaagaataacagataagataaaaattaaagagagatgagaaagacttgcatatctccttcagtcagatggttgtatcgatagatctggtccgtcaagttccctacgatttgcaaacagatatttcagtttgaccaatcaaatatccgtcagatcaacaaagaaagaaagaaagaaagaagaaagacgaacagtagtacttggtgctgtttgatttatttatttgttttgaaaagaaaacaaagagaggaacgtcagaagaattctgattcaactaacaaccacatacacacagagaatacctactcggtgtttcctgtcatgatggatggagaagtgatgatttcatcgtcctcgtcgtcatcgtccgactctttgagtcgagaagcatacgcgcccttgatcgttccggaaagaaccttccatccgtttgtcgactttgtcgtcggtgtcaacggagaaggctccaacctaaggaagcaaaagacgttcggtcagttaaatcacaaacgcccgctctcaacaactgctttctctcatgtacccctcccgcaaagtttcaaaaaagaaggaaaagattgtctgtattcaccacttatcgaaagcctcggtcaactcgacatgtccaactccggagtgagtcaacacatccttcccgaacgaactcaacgtaaggttcaactccttggccttctcctccacgatgctagtgattctttgcctcagctcttcagttgatgaagcaacgttgattcgatgattgatcaccgcgaacgccgtctctggcaaggcattcaccttgatccctcctccaatcagatcgaccgcctgagttgtcttgaccaaacttcggtattcccctcggctatccaggaaagtctccaacagcccgagcgccttattactcttggctgatgccttgatcaactttcggagcacggtattcacatctggcgcgtattcagcagcgcacgtcaacgtagagtagaaagggttcgaccgcgtcaggttcgccttgtgtggattcgcttctaggtgagcaaccaagagtgaaagaagtccgatcccggtatgatccggagggaccgacctgtacgtgggtagggtgaagtggggtgaggtaaagtgtatcagtcttccttgttctccttgtcaatgtcaagccaaaaactcacgaatgaccgccgagtgtcttgacagtcattctgacgtccccatagcctttctcgcctgtaccgagagctgcgatcggctttccgtacgccttagtgtaccctcctccttcgtcgaccaagagaccgaatggagaagacccgaacttaggggtgtatgtgtcttcgagatatttcgcgatatgggctaatagtggtatttggaggtgaggtttaaaatgaaattaagaaaagtcagatctgcccacgaatcagatgagagaagaaagacgagtggtacttacccgctcctttgaatccagagacttcctcgtccatcccgaaagcgagcacaatcgtccgcttgggggtgtagtccttattggccctgagaagagactcgaccgcagactttatttgtttgtttccgttcgatgattcattcgtttccagtacattcaaaagagagaaggattagatagtctgtaaatggtatcaaaaaaaagggggaagagaaagaagaaaacgtaccatgataccaatcgtgccagatttgtcgtcgatcgaacctttatcgagaaaggggacaagggacgcgagtgagtacctcaatattccagatagtttcctcaggctggtcggcaagaagggagaaaagagacaaacctcgaccccagatgtaagtcccatcataatgaccggagaaaggaggatggatccaggcgtcataagtcgacttttcaacagggactacatcttgatgacccgtcagaagcaatggcttcagagaagagtccgagccggtccactcgaacacgagtccgtacgtgttgaccttgtccagcttaaggtgcttatgactttaagatagagatttaacacatattcacacgcacacacataagcacagccatcatgttgatcaagtctgaatagagaccatacgtacaccaatggataagatttctcaaggtctaagttcaagggttccaagtcagagaccaatcagcgactgatccaacggcaaggaaagaatcaaagggttacggggagaaactaacaatcgtgaaacttctggaacttgtgccatcggccatctttaccaacctcgtccattccatcgtaactactcatagcaagcatcatccagttccagatcagtccacagaagagtatcatattacaatctattacagtaagaaatggagggactaacctttcggtctcgactcggacagccccaccgagccattcgacggcttgatccttgaacgcatcagacttccagaccttatctaactccttgtagaagtctgtctttggccagagtggttcatgctgatagcaaagtcccccatcagcttcagccccgacggcgtccagacctcttcctccgtctccacggccagtcagtccgatggtctcgtccaggccgaaatagtagaacgcttgggtgagcaaaaagattgggagaattgcctttcggaaagatttgagagccgaagaagatttggccggcctggtgtccccgggtagaggaaggctttctgggtggtaggcagggtttttctcgtcaagactcatgtttgtttttcctttcttttctctgtagctagaatggatggatggatggatagataaagcacaatgatggtaagtggtggtagatgatagatgataaacggacgatagaacaaatccggcattttaaacgatcggccatccgctgtgtcggaggtgaccggggcgaggggcgtatcggcttattccgtcggtcagagccgatgatctgagactcacccgtccgaaacggatagctcgttcttttcagagacagtctactcttgatctgatttgagtgtgactatgttatatttcttaaggtgtttcgttgcttgatctacttcatgaccatatgtgtaacatgcacactcattcatctagttgaatatatgttgatcaactgtgatagtgtcggctgcgagcccggtgggttcctcatccgaagtgggctcttcaaactcgtaatcatcgagctcatcaagagattcgtcaggtctgatggtaaggattccgattttcaaattaaaaagaaagagagatatcacaaaatttggtcaacaacggcgcgcagaaagaataagcagacgcaagaaatttaagacttgccgcttctgctctgctgccgtcggtttgagagattctcctacgatgacgatctccattgatccctcttgctttggtctgttcttcgaaccaggatatgacaccctaggtcttggtgctactctcactcctctagtcttcctctctgcatcctcgtcttcgctttcttctctcggcttcctctctcctctcttctttttctttgtccgcgctaccgcctttcctcctcggccttctccttctccatccaagtcggtatcactctcttcatagctcacagctgacgcaccgttcgctcgtcgactgctcgttctcctcttcaattctccacccaaatcgccatcgatccccaactcatctccgccaagacctctgcctcgaacagcctgtatgccattctcctcgataaggtcgccttccaagaacccagtcatcaaaactccgccgaccgtctcgccttcttcggctgcgaacctcgagtttccgtactctctagattcagccattacgtcgaacgcatctttgaacctgtcgagtccgagatcttgctggatcaagatgatcgttaactctggaatgagtacaaagtagagaaaatcggaggccgtcagaggggacgccgttgcggaggtcacaaccggctcacaaggcaggtatggttcaataggacagctaggtggatctatgaacagttcgctcaaggtctgatgaaacaagatttggccgatctctccgaagctatagaagaagaaggaaaaggagaggaagaagagacagattaaataaacgacttttgaagataacctttgaggcaaaacgaaagaaagcaggacactcactacccaggctggcacttttcaaacacctcaaactgtcctctcgcactcctgctctgtccttttcccagatctctgacacgctccttggcaaaatcatagaacagactatcctctttttcctttacgatcgtctttagtctacgcacgatcggctcactctttattcgagagatataattctcccagttgatctgcatcggccatctttttttcttcgctagaggaatcaacaatgattctgaccggtgaagcgcacaagcgttgatcgactgagccattggtaactttcgagcaccagggttggtgaccgtggggctcggttgagatacagagtggagaaatgacaaaatggcttccagcttggcggatggagcagagggcagccgttcggaacaatacggacacaaggatttaggtttgatcttttgtggccgtttctttgcttgaacttttatcaattccgcccatcggggtcaggagttgaaagagttgatcagagatgaataaagagataaagagtagacaagcgcaacacactcacgacgttgagcagcttcgtcccgttccatcgctttggtttgtaaaaagatccgttcctgcaccgtcaatgacccctccccaccttgttcggcaacattcccaccgtctgcatcctccccgttatcaaccgcgccgacttccttactattctttccgatagattcgcctcctccgagggaggtagacgaggatgatcttgcccctgttaatttagaaatcgtggccatcagaccaacaggggccatcctactctttaccggtatcggcttcttgtcggtctgcttttccttcagattgagagttctttgaacctttcgaatcggactagtctttttctttcctgatcttttccttttcggggtcgcctcgttatcgttgtgggagtcggagtcacaatcggtatttgtacgtgtgcttgggtcatgctcgtcctctaggtccgtcagatcagacaaatctgaatcccctccgaaagctatcgataaacccggatttgaactctgagagttagccgtcaccgtcgttgccgctgtcggagttgaagaagaagattgatttgagagtgttatagggaacggaataactggtttagcccctactatattcgttctcgacttcgagtccgattgcgtcattgtggctctaggcgttaccggatcagtatcggtagatagaagcagagtgtttaaagcgggaccaggaggtgaatcatgatagccggttgacttgaggcgggtcgatgagaatttagagggcccgggcgcgtaggctgagagaggtttgaaaccaggtttagatgatgaaactatcgattcggagagtgacctttttgttggtttgacaaacgacaggctctcatcttcagagctcgagtcggttggttttttagacttcatggtggtacgtgggcgttctttagaggatgagagagaggagaaagcattcgatgtaaagccgaaactttgtccagcagatgtcgaatcatcctttctcttgaatgaaggaagggtatttttctgaatcaaccaatatcaggccagccagtcagtagagtaggaagaaggacgcgacgggaagaaaaggagaaagaggaaagatagtgtataggaagacatacttgctgatgcattttgacttctgctgctcttcgctctttcttatcctcgatttcaaggctttccttggctgacaaaacgaacgcattgtttcttgatcgaccgttaggagacctgcgcgctgcaggcaactcgggtgggggacttgacgctttgagactctgttgtagaggcgagagagaaagaaacatccagaaaggaggaaggcatcgttgagatttctttgatacatttatacagcctctatatctgcagctcttcgtttgcggagacagtcatctgagggaatagtcaaaagaggaaaactgaccatttcgtcgcttccggaatcctcctcaccctcgatcggcccggacatatcaaccatgtttctaagttttgtactttcaccaacaccttcgtcagctgaattctcggtccactgggctgatcctagttcatcctcattgtcgtctgataagactgttttcccagtgaactcatcgagcttagctatccgcctagaccgcttgaaagaagaagaagaggtcgattgatcagatgaatccctgaacggaggaatgcctttggactgaggaagatgatgacgtttcaatggtgggtatggacgtgtcctagttggtctactaatcaggagagctttttgttcatcctgaaaggtatcttgatcgacagaggaggaggcagtgagggctgatgtacgtccggaaggaccagatacgatggttttgggattagaactaggattcatgttgaagcttggtccaagggtctgtcgacgcctgagatcttccatcaggcttgcctcttattatgatgtgatgggtatcccagagcagttaagagacaaatgtcttggaggatttaccggaaggtctagagaagagaagagagaatgaaggaaagagaaggagtgcaagagggaagatagtaccaacacagacgcgtttcggtcaacactcatcatgtttaatgcggaccctgctcgctttctccaagtgcgtttgctcagtgtgaaattttctcaaaagaaggaaggatacacggaagtgtctctctttctattctgtacgtgttcttttctatcatcccatccagcacaatccgaggcaaccattatcatcttcatcgtcacttgttgctggtgtaaagaccaggagagagatgtttttaaacctagtagggcagacgatgggactgatgcatagttagggttatactgacgtaagcagatacattaggggttgacgaactggcatggcctacacagcatttgaaccggacccaaccggtatgaaccttcggtgaaccggagtatgctcgccgaaaggccgatgatccggcggcggatgagaccgaaccgccacaaaccatcatgaaccagccgggttcagccgccgatcacacgtcatgtcttggctgtacaaccgaccgcacaggcctccttgctcatccttctcgactggccccacttaagaaggaaaaccgtctgagagctttctttcctcttattcttctcaacgatcatctcgattctttgctcttccccgctcacatccagaccatgctatctacgtctacagctctcatccttgctactgtgttggcatcccagttttctcaagcacacgcatggaccgtatgcaggaacagctttgttcgtccctatcgtctgcggctttactgacagtggtcaacgaccatacggaaaagcgatctgatctagtgggatgtcttggcacacacaatcgctaaattttctttcctctttctcgcttcttttatttcttttcatccttatccatactctgtgcacagggtcaatactatcgatgcaattcaggactttcggctgcagctcgatggggaatcggcgtgggagcaggttcgtcttcaaaatagtaatctatatccttcaactctcgatccaaacgggctaatcttttccttctatcatatctcttttcccagctgtgttgtttgtctttgcccttcttatgctcggattgactcgaaggcgaaggatccaaaggcaaaatctgtactacgcccaacagcaagctgagcttggtagcggcaaccaattctacaatcctgcagccaatccccagcaacagcaacaacactcggctccgccacagactcaacagacgggtaccttcggcgggttctttaaaaagaacaaccagggttcgtccctcatttctctcttctttttgtcagccaagttgaacgttcccgctaactcttgattttgcttcggttctttcaatcatccatattatcaaaagctcctcctccccctcctccggtctaccctgggccacagcagacctatgccccgtatgtctcattcccttttccttgttttctctttcgttactcacagaccttatggtcttcctctccgaattacattcaactgaccttatcccttgactcaccgtctttcatcttcagtcccgctgctccctttcccggataccagaccacaccagacgtcaacccccatgaagattacgagcgacgtcaacacgaagagaaccttcggttggaagctcaacggcagcagcgaacctaagttccttcgtttagtttcagcatcatagagcattatcgtaacttctggtctgctccataggggttcttttccttctctttcgtcaagtttagacgaagttcttgagctttatcattcttgttctgtttggtcgaccgattcggtatacacacgcaccctggcgtccttcttctcctttcttgtctgaaactatctctatttatgtagccatagcaaatctcttgtaattctttttttaaatagataagcacacgcatgcttttgaacccccggatgccattaaaagatcatgagcatacggaatcttagcaagcgttaaggaagtccaaaagattggatctagcgagatgaccacaaaagattatatacaggtaagatagaacgtactcaggccgacacgataggttcacgaaatatatagaaatatagaaatacagaaagacaaataaacagtttaaaggagagaaagagaggagcgaggagagagggaagggagagaggaggcaaaacgatttactcatcccgagtcaaaaggggggaacgttcatctgcagtaagatcagcgtgcacgctcgagtccacggttgattgaccatcttcggtcgatcggggtttatctcggatccgaatcatcgagagtactttatatcgagtccagtttggagaagaacaaacaaacaaagaaaggagaaaggaggatgtttgtcagatcatatcgaagtcgataaatcagtcgaaaaagaagaagaaagaaagaagggccgataggaagaccgaccgataagagtcagaacaaggaatcccaaagcgagcacaatgaatgtttgaggatagattccagtagtagcagcatacgtcaatccgaacagcatcggtcccaccaccgtacccaacaccgcggtcaacacgctcatcgcgcctaacattttacctgtcgacgtaggatcattcacaaggagtaacgctagagaagagacaaggggatcgactccttcgcctatggtggatacaaggagagagataacgaacgcggtaggcgtggtggagaagatgatactagagtaggtgaggatgctgataaccaaggagaacatgatcagttgatgttcggatttagcattggaggatgcgctggaaggagtcgaggaggtggaagaggatccgatgtatctgaagaaccggataatgactttattgattaaaaaaaaaccaagaagggaggaaatcatatcagagtaagcgtgattggatgcagggacaagaagaaaagaaactagagagaccactaacaaggaaggacgaataaaaggtagacagcttgagtagtaccaaacgtagagatgaaaaggcctatctcagctggtccccagccgaagacgagttgagtgtactgaaatagtgaatctcccgacccctgtgtttctccgccgaaagaaagagaagaattgatgatcatatgagtacatcgatgcaacaaagaggtgataaggctgaaataagaaagggaagagggaacacacagcaaccaatatcataaagcagaatccaacagccaaccgagtaaggttccaatctcgttttcctttcgggtttgatatatccctcttgggccagaagattgccagggggctcagcgtggtccatatggtgttgcctatggacttgatgacccatctgatcctcatcttcatctttttccagactcccgtcaatcctccttcgccgtcgttgtctccttgggcccgtccatattcctcagcatccctctgctcatttgctaaggattgttcccgttcagtctcttttacggcctccatcgattcagccgacaaagattctggcaaaaacagaacggtaaccgctacgaagaacgttctgatggcaagcgagaggtagaagaccgatagagcaccagaaaaccatctgacgatgaatgcgcctgacagtggaccaagagcgacaccgaccatacccattcccatgagaccggcaaaatatcgggagcgttcactgtcagctgtacaatcggcaatataggcttgttttactgccgagacagtgatctgacctccgaagaggccagaaaagatagcacccttttgaaaggagtcgagtgtgagaacaggaagattcgagatggacgaacgacagttgagagatagtattgaggagattactcactgcatagaggaacttgtatcctcctggaactatagtaggatactttgcggtaagaagaaagacaacatcactttgagaagaaaaaaatgatgagagaggaacggatcatcatcagttgagattgaactggtatactgtatgacaaaacaaaacaaaacaaatgaaggagaactcaacccaaccatcacactagccattgcaagactcaagacgggctttcgaccccacttgtcggacatgcgagtccaccatccggtcgtcagcgcggacataacgccaagaaggattccgacgactggaaagaagagcggacggacacggtaatcatcgtatgtaagcgttcagatgtgaccaggatctaggcgccgtaagtcagtgcgaacttacctgtattgaaccttgcggcaattctgaacagaacaacgaagacacacagggagtaacggaaacatcagggttaattagcgtccacgaaagagagaacagacaaaaggaacagaaagcctccgactcacgcctgaacggctgggttctttctacacatgattggatcaagaatcatctgctctttctcaacctccgacgtcctgtcctgctgtgcattcgacaaggggatctcgccaaagtcaacaatgacagaggtcttgttgatggagatatcatctgaatcaagagccgagggagcgaacgaagtatgaacggcctgggcgtttggttgtacgggcaagatggttatatcattcgggcttcgcgaatggtgaatgtcgctgcatagttgggtggtcaatgcaaagatacagcgtaaggaccgacagatcgcaagatcgatgatggggaaagaatgagcacgaaccaggcgagctggttgaagagctcgatctttggccccaagctcatggcgagcgagaaagccatgccagtatggatccagagtaccctatgtttccatgtgccagacgatcggatcatacggtcagcacgtctgactcgagagcaccatcagagactcaagggccgtaccaataaggactggctttcctccatccggacttctgtcctctggaagaatgaccagtggtagcactcctgctgacagtctgttcaagccgaatggcaccgcagaaagaagacacggaagagcaggatgagtgatgagttggatccggatgagcccgaattgattgagcaggaattcaagataggcgttcagcaagggttgaaacagaacacgcactgggaacccttgagtctccagagtgatacccgcggccatctctcctggatgaatcagatcgtcaactactgggtgagcatgatatggtccgtctggaagcggctcctgatggccatggctatggtgatggtgatcatgctggtggtgatggtgatgaatttgtgcgtcatcgatcgttaccggcgctatcggaacgtaagataacgaaattttcgtcaacggcccaccagagttgaccacggcaagatccgagacccaccactatccacaactggggtttgatgtgtgctgtccgtatgatgcatcgtaatacaagatgtgtgtatggacgagtgaaagaagaagaagaagaagactgatagcagagaaggtcatcgattaatgagacggaatgaacagccaaggctgagtttattccggcccgacgttcccacgtggttccccttgggagtcgctgatcgccgacaaccagccggaaagaagacctcatagaaaagaggtattggcaagatagcttcatcagacgcacgtacgcacacatgtcgagctagatagatagacatattatgggtatgcatgtgtgtttgtgtgttagtgtacagataagcacactctccttcaggccagaaagtcatcaaagatctcaaagtctaaaacatcataggaaacccatcaggctctgcctgttcctccaattcgtactcttcgagctcaccctcaaataacaggatgaccgaatcgacccagtcgtctcctgctcttctcgctctgccgacctctttctcgacttctaacctcatctcccggtcccaccatgcttcctggcctctcttcacccaaacgacctctacaaccgtgtcggatcctaccagcccttcacataggtactttagatctcgcacgctcacagccgggtacgctcggacttggacgacttccaacgaggggacggagagcggagtgaacctaggtaggtgtccgatctggtgagaggcaatcgagagaaactcggtgtgggcaagatgatgagctgtgatcgctgcgagagtgacctcggaagaagacgtaggatcaaacaggaacgtccgaggagagaacgtgccgagaagcttggtgatcctccgagacaatggtttaggaggggcgctcgaataggatgaaccgagagcaagatggagggaaagcgtatgtagttttggaaatagcaccagtccggatactggatctatacctgataactctataggaatctaaattgaaagaaatgaaattgaatgaaatcccagtcagcgtttcctcttttctctgaaaagaaacttcgcctctgtgtagaacttggatgcacccaccttcttgagagtagcaaagttcagagtaagcgtctcgagctgtctgtagtcagccaaccgttgaagtttaatttccttcctccagccgtccagatgacctcctaaaagaaaatagctatcatatcctttctgagaagacagctttgtttggacgttcatcccatcgaaatcacgagcaaaagtaagcaatacgaatttcaagagagtgggagaaaagatcgtgaagtaagaaacgagagaagcgaaagaaaagctcacaacgacacgctgataaaacttccttctaccaagctcgtggaacgtccaacagactaacaagacattcgcgcctgactttcttcctggaacaatcgcctgtttcacgatcggttctaaaagctcaaacggaagatcattgatggtcgattttcgcttcgactctggctttgatggcggagggggagaggacgatggagttgggatcgaagaagtaaagatggagggatcggaaataagtgatcggtcggccatgattcaaaggacatctcgatcggtcaagagagatgaaagaagttcgagttgagattgataggaaggtatcaatcaactagattgagagggacattgcgagtcgtcagatcgggttggcgatggtggtggtggtggtgaaacaaagaaaaacagacgatgacgagttcatttttatacaactctgctcacaccgttctttgaccgaccatcctcaaaggcttacagctcgtgagcccatctaacgcttgcctcacttgttagcagccttgtctgtatgaatatggcacagacacgatggaatacctgtccgacgttcttactgatcagctattcgctctggacgatgacgatccactcgacatgtaaagcattcaatctatagtgtgcaatcatacgcggtattgcgctgtccaaaaaaaaatcagagagacgaaacgaaagaaaaaacaatgaatgacaccaacaaagtaagagtaaaaagaggatagcgtttggtttagaagttctctgattacatgcaacatcggctgacccaagttcaagaaagaaaaaagagaagagaaggatggaaacaagtccgggatagataaggacaggttattacatggcaactaacttaaggtctaagaccaagttttctctggattccctcaaccgcgttcttgatgacattctccggagcgtcgtcaatgtttactatgacgatatcgtcctctgactctttcgccggaggttcctctatcgtcgctagctgagagttcagcatctggcaaacatgaaataatttggacatataagcagttgagccgatagaagtgacaaaaagaaaacgagaagacgtacatcctccttcatatagtgtccgctccggcccttcatcctagcagccaagacttccttagtaccatatagatagacaaagattgtcttgacgttctctccacccgatggggcttgcaatccatcaggaaggcagggcaatgtgtttggcgggagggctaaaggaaacccacaggagggtgccagaagagagagcattggtgagtgagaaaacatccatgaggcaacgcacacgcaaagaaaacgcgaaaatgcgcacaatgtccacgctggatttctctgtatgcatgcttaagggatgaagcggcaaggacacagcctgtaggtttgatctctaattctccgactgcatgggatctgatccgtttgagctagattatatttccaagtaagaaaggtataagaacgaaaaaaaggcaggaggtgacgtcagcgtcgagaaaaacggcagaatccttttttctctctcatacgctttcgaacgatgaaagacacgcaaacaaggacaaacccaagggattcggtccgagtctgttaatggaatgttgttcctcatctgttcgacggcctctggggtatgaagagtgtctccatcgacatacgggatggaaaagtattgggcaatccctgttccgaccgttgattttccactacatttaggcagaagagacggacgtcagtctgaagtagtatatacagatcaagagatacatgatagggtaacataccatccgcatacaccctatcggtttccagcacagagagatcagaccggcacatacaccaaagaatcaaggttgagtcagccccaaagcacaatgcactctagcaaggggaacgtaacgaaccatgacatagatgatgaccggttgcgggcccaagccaatcgtcttgataggttctatagccattcgagtaatgtcaagttttgtaatccgagtgagtgagcggttgagcaagtgagtctgaggccggaaagagtatagagtaaggtgaggtaagagttggctccctcagccctttcccctacacggttctctcgttcggggcccccgtctatgtaaaagtcctcgttcgtaatccgtccatctatacatttcgacactttggattcacatcaatctcaatctatccatcatgaaagacagacatttcctcggaacagatggagaaagagaaatgcgagcaaatcgagaattgaaatgaatacaaagagaaaacaaaagaaaaaacctaccctgtacgatgtcagcctcagagttctccaccatcttctcaacgaccgcgcttccagctccttttccagtttgagacatctcatgcgaggccgctgtaaagtagagagcggatgctgtcaagaatagagctgcattgagctgggaagcaaagtttgggttggacattgctaaggcggatgtgtattgccaagattgttataaaaagtgggatatttcttgggtcgtctttcgatagtatttcggcgagtttggggacaagcacaacactggacagagcagacgataggcgaataagagaaaataaaaaggatggtgatcgaggaggaggttccagtttaggtcgaaggaaaaaagaaaaagaaaaaaaggggagatgcgggtatttattcgttcgcccccagaaaatcggaacttcggcccgcggctgtatttcttctcgcacacggggctttctctccttttttgacagagttcacatttcattcgctcatgcataccggtataagaagtagagagaaacaaagatgacacctaaggatacaatgaaattgttcagaaagaagaagggagggaagaagtagaaacacaagggggaggtgtgctaatgcaacaagatcgatgatcactcaagtcaaggtggggaataaggcagagaacaggaggcaggaaacgctgatttttcttctccactggtttacttcttgtgcacggtgtgctctcctcgatcagcgtgctagattggtgaacatatgaacaagaaggtaagttcgaaggatcgtttcacgacagcagaggtgtcatgatgtaaacttacgacagcagcctcggacccagtggggttggggctggaaggcacggctgcaagtaacaagtccattcatccatttatccgtcaggatctcggtatctacatgaatccgacaagacgtagggagaaaaaaaacataccctgatttccaagagctccctcttcagagtggtggtgtcgctcgatctgatcagcagtctttttctgtagctgctccacagagatatccttggacttgtcggccatgatgttggcctctccatcactctgtgttttgcgagtaaccaaacaaggaaacaaaattatgtcatccaagggattagcacatgtgtcatctctcgcatatggacgacacaagatggagtaggtagagagcaaacaaacatacagcaaggttctcgttccatccgggagcgtgagagtcgtcaaacggagccgagctagactgctgtcccttcaagtttcgagccttctcctttgcaaggacatcagggtcgtttccgtgctgagttcctccgctggcaagtcggattctgtgtagacccggaagcaggatagaaacaagatgttcggtattggatcgctcacggagagaagtattgaaaaaatgcaaggaaaggaaatggactccgatgggtcggaaaccgacggcaagtgatcaaaggagatgcaaaggactcacgatgagtacgagatcggtcgaacggacgcgacagatcgggcagggatgttgagtgccttggtaagtctgaacattgtgtgtaggtatacgtgtatgtttgtgtttgtgtttgtatgtgtgagatgaagcgagtaatagatgatctttcgttggttgaaggaagaaagaaagaagaaaaatgaatggcttctcttttttcgccttttaaacccagacgatcatcagaatccgtccgttacgtcatagcgtcatcgactgagttagactagatttatccatcaccatcggatatagcaatacaagaaagaatactcatgtttccgtacaagagcatgtacatacatacacacacacatatacacgcacatacacacaaaaacccatacacgttatacagatgaatttacaatcaaacagaaccgatgtccattcgtacaaagttgttgtacacgtctcccttcctaagaatagtattccatcggcttttagccaattcaggcaagaagaaccctccgtatggagcgtggaactctgaaagggggtacgagtaattcaaaaagcaacggcggccaaaaggttctgtcaattttagactgagaaagcaagaaagaaagtgacattgctcacctaaataggctccgtcttgaaacaaaacaacaaaaaagagagaaaacaggtcgtcagccttgacagctcagaacggacaatacaagaacctggagagaatacaaagaaagacacctacaatcgagcccataatcagggtcctggtcgccctcggtggcatgcagatcttttctcttgactccctttcctcctccgggcgcggtgtagagctgaacgccagcttggtttgaatcaaacttcaaggaaagtcccgactttgtggaagaaagaatgactaaaggtgagccaataggctcagttgtggagagcacggctgataaataatccacatcggccagcccagtctccggaaatattgttgggttctccgaaaaatctcggttcacgtcaaacatgtagaaatcatcatagcccttctcggggtagctcttcccaatcaacttaccctctcggtgatcatgggacgtgcctctgtccgaaggaacgagtgaccccgtaggaagggaagtctttgggtcgagatccaacgtgtgcgaagactgtatcgtcagttggtggctcttaatactgctcgacccactcttctcagtagaaatgtccaggttgaacccccaatgttgggtcaagttgatcggcgtctccagatcgtccactccaacgagagccgctcggtagacgatgacaacgcctccttttccaaatgattcctccgtaagcgcgatcaaaacttcggatttgaccgttccaggatatccaccctctccatcgggtgaggtgtatgtaaatatctgggattgaggagcaggcgtctctgaggtaatcactttcctctcggcatcggaaaacaaggttgaagtagaagtctcaatcggctgccactctcgaagatcccacccttcctttcctccgtggagcgagactccaggggtagaagcaggataagtttgaggagtggcgactcctccagaaggaagctttagcggcttctcggccggtagtctattcacgtatcggccgactgtttggacgacgacgatgatgatgatcagtcataatatccgacactaatcaaaagaaaagaatcaagtagctcaccgatgcaatgtcggaactatttgaataacatatacatggtgtaagtctcaaaatctagaagctcgacggaaagagactcacatctctggtcttgcccgtccaatcctcaacctctgggatgatatcatttactctcccaccctttgctccatccagctcggtcaccaatagcctatggattgtcactatagttcatcagatatgaaaagatcaataagaagaaaagtgagaaaatatgataggtttccccggatagagattggagggtcaaatacccatctggacgaacatccttgatgaaacacagagagggtgagctgagaggaaggaatggagagtacagtcgattgaggagccattcttgtcagtatcaggatgagtggtgatagtttcctgtgtcttttgagcgggaaaaaaatgtatgaattaagaagagaatggagaactctgatgggacgaatgaagagatcttaagatgttcgctaaggatctcggacggaccggagaaataccaaatccggcaagtggccggctaaagccaagttgcgtctattgcctatttatttccctttcgtttctctttatctcttcttcatgtctttcccttcttgcttcttcttctcttctggtatccatgatctaacggaagacgatgccaatcggcttcacgtctgatgtctatcaacatactgattgaatgagcggaatccttaattctactccacggattatttccacttcggcaaatctaatagagcccgatcaccgcggagttttccagtatgtgttttttgggggggaggacgtcatcgtattagacacacgccattcgaagactacgggagaaagaaagacccaaagaaaaaaccaaaagaaaagagcaagtcgtcgaaaaagaatgaaagagatcaagtggaagaaagaaggtaattgaaagaaaacgtaaggagaaaactcaagatataaagacgagatctgatttgaagaaagctatctattaaacaaatggctagtgatcagtgttaaccagatcaactagcctcctatcctagaaaagggaaagttgaatgactgcatagatataaggaacacagatcgagaaaacagcataagcgagaagagagaaaatgacaagaaaagggatatataaggagaagaaaccacctaattcacaaccgaaggagaagtccatgatacaatctaatcagtgttttgattctcgaagacatctctactggaagctcgaccgtactggaggaaccagtgtacagcacaaacaatgggagccagtcggtcagtttatcctcttcttgaactcaaagctttatggcggacgtactcaaatgtggcatggttgagcagatcattgaacgcgtcggcctctatggcggtggatgaaccagcgggttgacttctcggctgagcaacctctctgtggggatatgaatgtaacctgatatcagtatagacttcttttctgatagtgaggacagaccggattaaagacgaacctaaagcccattgaccacgactcaaaatctctcttctgaacaacctgattgatcaaggtgatgatcgtgttgtgtctcggatcgcaggaaatacgatcatagagcggagttactactactctaggcccttcgagaaactgtacaaattggccatcccgactgtacatgttttcaaaccaatatggtacggtttcagatgcacagaaacatgaaaactactgacagagacgagacataagactggataatactaactacaagagtagaccggtgattcctagactagtattgtttcgtctggcttgcctaaggattgtttggatatcctcactgctgatgtttcgtgaatacgaagaagagcaatatactggccagagtggagacgtaacgtacagaaaagaagatagacaaatgaatgacgaatcaagagagaacggtagcggaatgcaaactcacctaactgaagtatctcttcaccattcggcagtggtgatggagtggggagagaggatggagcagaggcggagtcagaggcggagtcagagggttgggccttgttagaacaaggaatggttgagcttgaggtctcaggcatgggctaaaaggattcaggttgttggcttccaaaacacagttcggaaacgtatgtgttgataccgattcctttggaggagaagggaagaaaagaggaagaagaggatgcgttaaatctgtatgtgtacgtaagtgtgaatgaccaccgggtggatgggcaatgggatgtgtcattagcaataccctgagaggcggcaagccaagaaaagcctgcttacctcaggtgttggatgggagcgaggacaatatcaggagattctctttctctctcacaccacacacagaggatgagaatgatagagaacacaggatggagagtggcgtagagtagagtacggtagagtacaggatagaaagtagttgcatattcaacaaacgtagaattagcctgtgggagtgtatcgtgcacattagagtcattaaccctaataatcttggatcaggggaaatctgcgatgaattctaggaacaggtttattaacctctagctgttaccacaccattcggctcccctgccaggtcatctctcatctttctcctcctccttctgcttctcccctctcctctccgctttctttctggcagatgtcagaagacgccttgggactgctcactcaagctttgtccgctcaggagccaacagctcaggctgagcttcttaaaagaaccctccaagctcttgaagacaacccggtacccatcccgcagattgcaggctacctcttgccccatgtcggacagggcgagggacagatggttatcaccggattcttgattaacgtgagtctctgtcattccccctttgtcttctaatgttcctccaagaaggaccaagtcggccaaaagttaggataacctaggaaggaaggaaggagcgaacgaaagaacatgtcgggtgtaccattagccaagaccttctttcatgggctgatatcttggattcgttcgcgtttctatcttacttctctctcttgcaatgttttcgtggcaaacagatcttagagattggaatatgtagatcgacgcttccaatagaagtcaaagttccgcgtaagatcttgaatcctcttttttctctcttcttttcttcttcttcatcttgctgtctcaagtacatacacctcgctctgacgaatatttcctcttccgctgattctgagacaatctctagtatccttgcaaacgattgagacgctcgctcaactgcttgtaccatccactcggcctcaatctctcaaattagtcatccaaatattcacctctttctaccctctcttatttccatacatgtgggttatccaggactcttcttctgatcttatcccagttcattatccgatgtatgacgcacgacacaggtcgctcattatgtctcctttgcttcctccactcaggtgtaacaacaaaaccaacattcatctttggaacactttgacaacgagtaggattaagatcaccgaatgggctacgtatggccagttctcatctgatggaggaaaccaaccgataccactccccccgatgacaaagggcatcagaatccaagctataaagttcttgcagagggttgtgttggtacagagtcggatcacagggacagacccacgcgtgcgtttctcgtttccattttcttcgacgcgtctgctcgacgagcttgttggtctgcataggaaccgcgtacatcagatactgagtttctatgtactttgttccactcttctttcacaattcatacagttaaataactcacggctagaccctaacatagccatggttcctccagatcatcctttcattcaagtacgcgatctggagcaggagggggtcaagcttatcgagttcattctcaccaccatgtacacgtgccggtacgtattctggaattcaaatatgtatagtaatcaacccgtgtcagttccatacgctgaacttgaatgtcattcttctttcttcttacgttgtccgtctctttcttgacgcgcgcgacaaatgaacctttagggataccgacctcttgacgtctctactgacatcattgttgactctaattcgtctgcgaacacatctgtcagcggtgtttataccggcattgaccggatggacaccagacttcttgactggactgccgagaagtgagatcagaagtgtggagaaagtcgtccgggcgcttatgatttatcttgaccggtccgttcctttcctccttgtatcaacccttctaggccttactaatatatatttcgatgtccccttccttatatgtcaacataaaaaacaaataggtcgaatcttcagccgactctgaagcctacgattatcgaagctttgcagcgacaacagattcgaatggacgtatcctatcgtgaaggtctggaagagtctcgtgcacaaaaacgacagttccaagcaatgcagcaggcttccttgattcctccaagatctttttcttccactcctctaactgaagccgaccagcaaggattctcaaacaaacgggccagattagactctgaacccgctggtttcaccgttaaggaggaagaagtcgttcagacctcatcggctcccaaagaagcagctgtctcctctgtcgaggcacctggtagtggagaaatcctgagagggagcgttgagccggcgagagggatggagggaaccttatttgacgtgtcaagattacctgtagagttggtcgtggacctgatgatggcgaatctagacatcattaaagaagatgtattgattcaaaccattcgagtgagtgacttaatcactttttcattttgaaaacgacgtattattgtactgattgggtgaccttctttcaaacggaatgacttgcaggatattcgggcccaactcacactttctctgcctccaaactcgatacctccttcagcctctatcacactccttactaaagcaatcgttcctgaaggtcgttccgccggtggcgccgtcacatctacaggtgaagtcgaggccgagatcgatgaatcctcagcggatgtagtgaatccactagacaggacatcccctgaggacgatgacgatgaagacattatcaaacctagtctgatcgcgctcaaggaggaagaagatggtttctcggaagaccataagaatccaaccttgatgacgacaacgacaatgacgacaggatctggcgacgcactcgaattttctctccctcctccccgaccaatttcgatcccacgaaaacaggcgcttgtgctgagttcattgcgaaggatctgggaagccggccaagcgtcatcattccagtcggcagcagcagcagcggctaccttggtcgtcaaagtggatgagcatccatctgctggtggggtcggcgcaggtgagggcgacgtcgagattcttggtacagcaggtaggggtgtgcagatgtgggagctctggatggtattaatcgcgagactggtcacgagaggcaaggaacaggagactgaagacgccaaggcggaagatgacgttcaggggtctgttggggctgtcgaggcggaaatgagaagagcacttgccaagtttatcgcggatgatttctcggctaggttcgtgtctatattcctccttttccttaaccccggacgcaagagggaggaagagagatcttgatccggcgtgatctgacaattatcttggttataaactacaggtgtaagtttgccgcgctctggttgaacgaagagtggtacaacgatgctcagatctcatcaacaggagagcgcagagtaagtagagtgatggaaactttatccagctctcctgagagttacacccacccttgttctctagtccgaagatgctaactttaacaatcgtgctttctatataaaagaaatcgaattatcgatcgtcgttactcctcctgatgaatacataccttcccagaatatccggtaccagccttattcaattcattcttgaccttcctgaaattccatccgaagttctccagatggtccaaacactttgtgccgatcctgatcgaaccaagggtagagttggaatgaaaatcttgaaagatttgactgtagaaagaccgcccgtacgaggctcaactgtggaggctctattagagctatgtacgcatcctggtaagttgtcattgataatccgtgatcttcttctcctctcttcttttcaaaaagaaaaagtatcaatactatgcgtacacaatgctcatcgatatttctttcttctatttcttagacgtcaacgtccgaaatcctgcgattgccaccgttcgcttgtggattccagattcccaacccatggctttgtctatcaaaacatttgctctccatctcttggggcgtcttcgaaccgcgatggaagtacctacatctatatccgagccaaatcctgctgctacacctaacgaggagactgcagaaagctcgtccatggatgctgatactaactctgatacaccactgaaggatgtggctgaggaacctgagcaggaagaagttaggagtcggtatttgccagcgaagctccaggcacctgtctcaatcgacattgttaggcaacacgttgagcttttgttcgcgttaacgaagaagattccggagttcttggacgagttgagtttacctcgtattgcttgctctttgttttcatttcgtggccgtttgatgttgaccaacgttctttctctttataggatttttaacgcctacgttcatttagagtcatccgttcaagatgcttttgcgcaaataatcacacccctcatccggtcactaggacctagtcacggaaagctcttgacagttcttcgaaagttcccagctggagcggaagcgctcgcgcttaaaactgttcaacttctcacagaagctaaagacgagaagaccaagttgtcggttccattggtagcgcttgttaagagtctagtggcagaacgagagctcagcccgaagttcatcttgcatattcttgtggaacttgacaaggttagttttgtgttcttctttctgatcaacctatccatttatcttctctctgctcgtctgttgtccctcataacgagagaaacaagagaaagagaacgagcaggttcatttctcaggggaagaagacaaaaacaagcactagcccatctgtctgctgtttgtattcgtgacctgatcaaacgcacctttctctttttccgttctctccatcgcgtatctgtttatcaatacttggatattcttccgcaaaaccaggctgagatccggaagcagcttccgcgaataatttccatcctaggtggccaagtacctgaaccagatctcgttcatcaaatcttgtctcaactcttaaccaccccacctcagacgttttttgccgaagggaatgggaacataccgagggtcaagccgtcagagcagtttagtccagcagaattgatggttcttttgcaccattgtgagaaggacagcggattgaaagctacgagggacggtacgtgcaagatctttctattctggtctttttgattagtttgtaccatgctgatcagcggtcatatatatgtttcaattgatctttctattctgcttttttgaattacaacagcgatcgatatctgtttctcaatgacggatgtctatcgatcggaagtcctcgccgttgtgatgcaacagattgtagatgagcccgagcttccgactcttttccttccaacagttcgtttcttcattattcctatctctcttctcggcgaagcgcaaattgatcggatctcaactttcttctcaaaacctcagatcatcaaatccgttcgaacttataaatccctcaccgggtttgtatccacaagtcttctctcccgactgatcaccaagaaaatttggacttcaccccaaccatgggaaggattcttccgctgtgccagagtacttggtatggccagttacggtgctctacttcaactcccaagggagcaactcaaagagatcgtctcaagacctgatggaaaagcattaaaggctggtttgagagacttcgttctcaaaaaggtatggctgtctctagatttgatctctatcagtagttgtctaactttcttttcctctgttgtcctttattcatccaggccggaggaaataccaacaggctacctgcttggtttcctgaggtttttgcagaagatccgtcaacacctacatcgaatgtttccgaacctactaagagcaacacatccgtgcccgcaccgtcacctggatctgaatctgtatctgaactcgcatctacgactgcaccttcaacccctactgcataacctccctccactccatcagtttcttacgccactttccaatctatctttaaaatatatatccctgggtttgatctcgaaaggttacttattcacctatatcatatgtcttctctttccctgtacccggtcgtcaaaatcttgcatcttgcttgtccttctttattgacttattccatgaatgcaaatggaagatgatagaggagaagatctttttgtccagtgtcttgagaatcttagtatattccatgttatacggtttcaggctcgctttgccctttagttttaatgcaaatggtttccgtcacactgagataagtaatgagaagagttaatcaccacctccactaggacctcccattctcgccatcttccgatcgtgaccccgttttctagcttggttggaatgtcctctactccctttgttttctccacggccgcgactgccacctctgttcccatttcctcctcctcgaccacttcctcctccgttactgcgaggtgtgttcgaactgttaccactgacactaccgtctccttttgcccctcctcctttctggttggtgtttgcttgtgcagcagttctagttgggggtttagatgttggagcgaaaaggcccagccgggcgtttaacgatgctagttttcgtggctgcgcgagaacaaaatgtgattagttttgagctcataagatgagaacagttcctaagggttgtctttaatatcagttagagaggatagagaggacgtacgttccgttcaagcatgatcttccatccttcgatttgttcatccgagaggcctgccgatccaacccaaattaaaattagatataagacttccaagcttgagcagaagagaaaagaggatataggagagatgagagaaggaaggactcaaccggtttgttctttgagagctgcccgtggtttccctcgtcttatgttagaatctctatcgaaaaccttcgtgtccgccatatatgtctgttccagcagagattcgatatccagcggaacattggtcgggtttgatgaatcctatcaggaaagaagagcaagcggacagggacatgggcagagacgagaaaacggaggtttgagaaacagttgacggaacgcaaaatacaagaggaaaacgctcacctcatcttcagatctgtcttccccactatcttctccatcatttccaaatttctgaccgacaactctcgcccccggtgtatctccatcctcgtcctcgaaatcaattgcttccttctccttgttctttgccttctctagaacctcttttctggcctcttttcgttctctctcctccctttcttcctcctcctgttcttctcgttgagtctcaacaagtcttaagattgcactacgcattgtatccggaatctctgaagatagcgccgggaagtcttctttaggcgtagccagggaaagtgaatcaaatgtcttgcccagcgcggactctgcttgaagtcgacgttgacgagccatcgtcaagtatggatcatcttctgctcctgtttcagcttcttctagtacactagatgtatgatcggacacggtaggggggacgtaggttgggtcgaggagcggtctaagatgaggaggaaccgtgtcctccaaaacggactgaataatcgcctcttccatcgatgacgatgtggaagcaccatagtattcgtcttccatggcggttgagatgaattggctaggaaggtcgggaagaatttgttgaacggacacaacggacgctttgatctgcgcggagagagcgagtcttgaatttgatatggacttcgaaccagatgccgacggtgatgacacctgttctcgctctctccttaaagcttcggtctcccactctgtcttatctccctcagtctccaaaagtcggaacgccgttggactccattcctgaccgtcgtccgacgtcctacctatcagtccaccagaaacactgaacactgtctcgaagtctgaccatagtgattgaaatggtttgggcagctcccctgtagaagttgaggtaggcagacaagctattacggcacctatcggtggaagtgggatggttgaactaggtgagagcggaaataatcgagcgaggatgtgaagatatcgaaaggaaagattcaggtcggacagcaaaccatacgtctcggtgagcgctttgaagattgtctgaaatctttcttgaggcgagaacggtagagaatccgattggagcaggtcgacggttgaggaacctcctatccgaaggagggagaacagcaaaacagccgctctagggacctcctccgaacctcctattcgatatagatccagaatctctttcaaatattctgtaagatcatctgtgtctattacacctccttcagcctgacgagatcgccggaacatccctcggaggggatcctcttctcttgaaagtccagcttgttccgtttgctcttcctccaatgacgacgaagaatctccagagggtatcgaccatggaggaaggatcacacccagattgacgataacatgaaacggtagtgagtccggtatacgaagcgctaaagccatgagcgattttgtatcatctgagaacgggattagcctcgaggacgagggcggggacgaagcgtggatggaaagggaggacaggtagcttgaagcgaggtaggtggaccatcgatctacagttgactcggccatggtgtgtctctcttgttcctctataaagatgtctgtctatgagagaaaggaagtgagagtatgctatttgatgaccgtctgtacagaggtcaagatgaagtccacaaagaacgagcagaccaaggtgagggaaagatggagtaggcgaaagtgagagtatcaggaaagatctgtagtcgttacacaaaacactacgactttctttcttgtctccaccttcgtccgtctgattgtcgtcatcgatgtgttcatcttttgttcgcttacgacagcaaggtcggtatatatatcgcatagtcgctagtctcggtcaagtacagctggctaaagcgtaggttatcgcatgttcaaaatcggcagttacactcagactaatccatggccaattagcctgctggcatatacactctgatcactggtcaaatactccaccatctgctttctaacacacatctaaacccgatagcgactgatgttttccgtttgtgactgtaaaagacaaagagtggagaaaaaaacgagaaaacaatgtatttctgcaagccagctcatcatgccatagtcccagcaacgacaaaaagaaaagctctgggatttaagctcggggtccacctcgaccggcaccgaaggcaccggcaccgtcctctcgtcgtcggtactctcctcgaccggcaccctcggctcggggagctcggtaggcacctccgggaccctgggccttggcaggtcgggtgggtcgcttgagagtgttggggacaatctcggagggaaggtggaggctgtaggcatatgcaggcgttttgaaaaggaacaggagagtgtcgaaaccgcgagtattaacaggcagaatgagcgagtcgtaattttgaaatcatgagaccaatgatgaggataaacagagaacagcgatgaaaagccaatatgtttgggatgaagggaagagctatgtgtcagtttttctctctgctgtctatctcaagaacgaaaagcaacacgtacaactctcggaggtagtcaagaccctcaggggtgagggtgtagtagtagtactgccacgagactatcgttcgtgtaggcccaagaacaacgtagtcagcactgaatccatccaagccaaaacatcgataaagcagacatacactgggtcttcacgtatcccttggaggtcaaagactgcatggccttgatgacctcaaggttggagacaccctcaatctcggggtgggtggcagcgttgaagtccttggcggcgacggcaactccctctaatgtacgataatttcacaaaaccagaatcacattaagatacagtttgaccgtttgaggaaaaaaagaacgccggagaaaagtggaaacgaacccttgaagaggttctcgaagatggccctcctgttctgtttagagataagcatattggcttttttctgatgaagttcggtagcacaagttaattgcttgtactaggcccggctctaatggagcgagaaacataaaaaatagggatggctggattagtggacagagtccagaggttgcaggtagtgggtacagggtttcttctatggcacaggacggcttgaacggctgggatgtttcttctttctgagacgactccggagtgggagcgtgttgggataatcctaaagagggagtagatccagtctcctgctcaataactcgtcctctgttcctttcatccgttccgtctgcctgcctgaatcccctggctcttccctcagaattgacaagctcaatccctgtcaagatgcaaatcaaagcgattcgttttctcgaaagggaacaaggctcgtcatgcatgtccttctccttcctatgagtgttggatgttgtcgtccttccaattaatattccacctatctccttctcccctctgtatttctatcggacatgagttccctctccgttatttttcattctttcggctgatgtacgtgctgtttgaaacctccatcaaaaccgaaacgaaaaaagcgttctcccccaaccgatccaagccgtgtgtgtatatgtacgtgtgtacgagcctgcaccaaagaagaaacccatagagaggaggacacaaccaagggaacaacactcacggagacttgaagggatgaaggacttggtaggaaaaaatccactgtggctttggctttcttcctacaaggcctgtgcacggggagcaggggggaccgtgcgcaaattctcgttgagtgagttagtaacctcgagaaattcaacaacgaccgttgctagggaaatcaacccgcggccatttcggccagtaccgcctactctgtgtatacacccacacacatacgcatccacaatatcatttatacacgatccatcagatcatgtcttcactctgataagatcccaggctgacggaccagccaacgaacggaatatctgctgatcggtcgtcgctaagctgctgacatatggctcgttctctttagagacgacgatgtattttccctgcgcgcgagggagacattctcattttggatctatgttctctcttgagctccgttatatccatgagtctattcacagcaaacacaatcatggaaagaactatacatagaagtacaagccgaaaatcacaaccgttcttcctatctcatgtcaagtttgaacctctttatttctcacaccttccttctcactcctgctcgctcgaggatactcatccctccactcttcccaactatcggtagagctatctttccttcctgcctctgattacctcggtcttcacacactgatcctatgaccggaaccaccggtacccgcgcgaagcttcgctcttgattttttggaactgcacggacgttgaacgttgttttgtcccctcgttctgtaccacctgcgctcccagtatcatccggtcgatctccggctacagggttccatgaatcatctctaaagccagctactctagctgctgaatacttcaaactatccttcctcatatgtcctttcagaggatctgtcgagcctgctcgagtgtgagtaaatagcgttgatgatggagaaggagaagaactgggtacaccccggtatgtgcttcgggcggagcttcctaatccgacagaagaacaaggagcggcatgagaccctgtggtagtatgtccatgataagaacgggataaatcctcgcttcgcgcatgttggtgagatgctttaggttgcgacctggcaggctggggttccaatcggcttacagaccgagtggaagagggcaaaaccttagaagctgataaacgggataccgtgttctatttgatgaacaggaaacaacgtctcagttttcttcttcctgttatatctctctcagctaaaaacaagaagaatacaaatcgagtaaagaaagatgggacgaactacgcaacctcgacaccaaacaccaccttcatcatcgacttttgcacccgaatctaaaggtcttccacaccctgctctagaatctgactctaccagcgggcttacaagcttggctttgtttggtttttgaggacctcgattagttcctcctccacaagacaagcaactgcaagcgcaaggaagaaacccccattcgcatgacaaagaaactcgggatgtcaacataccaggctatcagaaataaacagaaaaacatgagatcgagagcaaaaaatagaacaaacgattgatgccacctctcttctccgcttgtgttacatcccaatctagctggaccaacaactgaacctctctccattggacctatcgactttgcgcatcctggacagacagtcattcctccgaatcggctcgcacgaggcgtcgtgggctcatctcgaacaacagaggtctcggccaaagatacaggcgaacgagaagcagaggtgatgtttgtagaatgaagtgtcctggacgagaatcttgctgctgaaggcatattcaaagatggacggggaggggcgatattggcggcggtgttgctgacgagaggcaagatatttagatcgggattgcctcgagtctgagaatagattataacacatcaatcatcagatgagcatttgatagtagacctccggaaagagaaagactggaacaatcaatgcgaaaaactcccgtacctctttttgaccgatttgttcttttcctccgctttgatagtctctcttgaatccaccaggcgtccagattccgtgtggctcatccttgctcgccccttttctgattgcgagttcaccatgcgcatcccgtacaaccgccacgcctacggagtgactttttccgtgtcctctatttggtttgtcaaatttacgggaagaaagaccggtctgttcaactgcgggtgtgaatgaaaacctgttcttgaggttctcgacggatggggcgctttcactccatgatcgagcagaataggcatcattatctgccgttgttgatgccgatgttgagagaggagcaatccggagtatggctcgactcgaggatgaagagatagagttaggtagcgcgtatccgcccaagttgctgctcggggagtgtcgaatgggttggttagcgagacccggagggaaggcggtagggatgaatgttggatccagatgaaagcactgctcgcaggttgggtgtcgatgtatattcaacaatgtagccttccccgcacatcctatatttccagtgcaatgatgatgagtcctgagccattcagattcggatcgcctggaagaaacctgaaggaagagaagagtggacgtacgtgtgcactgaaaacaccgttcgtgccagaacgagttacctactcgaatcgacggatcgttgatgattccgagcaccggttgtgtgcaaagtgtacagtctcctttcttataatctttggcgtagcagggggcacataggaatctggcgtccagactgagtagggaaggaaggacagttgaggttcgttatttggtgagcagaatccaatatgatatggctcgaaaaagagacgagagagatgaaattctagttaccaacctggcagggtctgttccaggtaaagggaagattcttccaccaccaccaccaccgccaagtttaccaaacagatctttacagaccgagcatttcgcactctccggagtacgatcatccaataccgatccgaacactttttgaagtgaagcggttgacgcgttggatgaacctgtgagggaagggataagaggctgagcgtcgtcgatagaagaggccgtaccggtagaagacgttgacacgttagagattgatcggtgaaagccgggtggacgaggagtagaggaaggtagtcgggtcgcgccagatgaggtattgttatcgtgagtagatgtgttgatagacgagatggcaccagagctagatgaggcatgtgacatgtgtaatcttctggatgaagaggctgtgggaggggtacaatatctgtcgagagaaaccagaacgaacggaatcgttagcaatattgaaggaacaccatgtctagctccagaaaacgtactgctgggcccatcgatctttctttgagagagagcttgaggactctattcttgctctggccaaacctggaactgttggcgggaaagggatgtgacgcagtaaacgatcagtccgatccgttggcccgcaagagtgatcacaggacgaacaaggccatcaaacatactcttatggaagcacgattgacaacgctcatgagaaaggtcaaggatagtaccgcataccgagcaaaacatgattgatctcaggctgatgatcgtatcggtgatgcagggaagatgagaggtaaagtaggagaagtaagacggaagagttcaatgagaaatgttaaatgagggaaagtgaggacgcgtcgaaagacgacaggacgcgacgcgttcaagatgacgtaagaaacacgtgcagctagttctacttctctctctctctggttttggggggggaaaaagaaaaaggagacccctcgattttgaacaccaacaatcaatcatgatctctgttccagaactcctcgaaaggtacaaggacagcccgtttgtcgttctgtctgactttgatggcacgatttctacagagttagttctcgtcctctgtgtgtgttccgaacaccaagtctgtgatctccgagaaaagcgcccaaggctgattactatttaagcaactcagagactcgaacgatcatgttgtacgtcttcatgcctctcgtcagatgagccaacataagatgcgctgaaacgtatatacgtactcatactacttacagatcgacaaatttggtatgggcgaagccaagagacgaattctttgggacaaggtcgtcactggtgacgactgcttccgggatgccttccgagtctctctccagagtgtccgagacaacttgacgttccaagaatgcgttgacattctgtcaaaaggttgtcgtcatccgttcgcatcatgttgatttgtgtccagcaatctgagagtctgtgctgactgtacttgaacgattgaaaaacgctgtactccaacgacttcttcaaatctcgaatcagagattaagcttgaccctggcttcttgacgttctacgaatggtgcagagcgcagactccagccgtcccggtgattgtggtatcatccggtatggagcctatcattcgaggaattttcagcaaccttctcggaaagttagtctgcatctctctcgcacagataatggaatctcctggatcggccgggcgcttaaacgatgcctatttgagtgactattctctatatactaatactgttcaatgccaaaccaacaggaaagaggccgacgagattgacattgtttccaacgacgtctcccttgggtttgttccgttttctttctttcttaatcttctcgaattgatacagaaatgtgaccgaagtctgaccgactgagctgttttcttcgtcatcctttcttcaaacaccagatccggcccacacgactgggagattgtgtaccggcacccggagagtgggttcggacatgacaaatctctggctatcttgccgttcaaggagctcccccatcgacctactttgttcttctgcggagatgggatctctggttcgtgtccttcttttgatcgtcagtgcatctgattgtttctttccgagatctaacttgcgggcttcgtcttcctctcgtatatatgtgtgtgtccctgggatgtagatatgtccgccgctcagcatgccgattgcttgtttgtgaagaacaaggaaggaaatgacctggcgacgtactgcaccaatcaaggattccccttcaaagttcgtttatcctcttttctctctttcccttatttagctcagaccatctgaccttgatctgtccctgccaataacgacacaattttctttctcgtactgaacgacaatacagttgttcgatacgttcgagtatgtgttgaaagacgtccaggacgtgatcggcggaaggaagaccgccgaggaagtgatgaagtcgtaaaaggctttttctttgggttttttttttcaccactcaagattgaagcaagccgggggttgaacgtgctgtttctttgtttgtttattttctcctttctttttctccctttgcatgttctcatctgtcctagactttctgtcgagttttctcacgttggtttcggtttctcctgactagatctcttctctttcacataaaataaggaagataaagaaacaaaaaaagaaaacaaaacaacaaatccttccttatatagactatccaagatttcatacggagccatagatgttgattagattttcacttgacacgtcgacgtgaccgatcgctcaaagatcggacagatagagaaagaagaagagaagatgcaggcatgatgggaacaggtcgttctagttatcggccaacgagatgacgacctttccgtcgttatctcctttgagcatatcaacgatcgcctgttagtcgttttcaacccgaagggtgtaaaggtcacaagtcaacgatcagcaatggatgacatagaaggggaacaaaaaagggggatcgaatacatcatatgagaaagcaagaggcgggttaaagaggaaagagggatttactaacctgaggaacggtcttcagacctttgtacacgtcctcctcgaacttgatctccccggtagccaacgtcttggggacgttctcgtagaactctttgacgtaagctgcttcgtgggagctgacgatgaaaccgttgacggagagttcctgactgacgatcctcatgatgttcttgaacacgtacgtcgagctcgagtctgtggttgtttcatagtcagaggagtagccggtcacacgaggagagacagagaaagagcacatgtcagaatataagggggtaaaaaaacaaaagcaagaaaagaaagagaggttgaaattcaatgaagaaaacaaaaacgtactgtatccggagatcataccacactcgatagctcgaccacctttgttcatcgctcctagagcactgtattgatggtcaagccaaaatggaagaggacaaaagaatgtcagctcatgtatcatcgagagaagaagaagaagaagaag

SEQ ID NO: 2282 - DNA, 5531 bp, Xanthophyllomyces dendrorhous
agaagaagaagaagaagaaaaaaaagaagctcaaagagaaacacaacaaggaaaaaaaaagggaaatcgagtggactaacgcatcaaagacctctccaccgacggcgtcccagtagatatcgatcggtccaaacttctgaagctgctcgaccgtgctctcggtcttgtctgcatgttccggcccgggcatgatccgtccgaacgagtgtcaaatgaattcttctgtgagaccatgaaacgacggcgaaagacagaaaggaaaagaaggcggcaaagggaagacgtatatgtgtctatccatacacgcaagagaacgaggacgaacagttgaaagcggtcaccccgagctccttcctcaaccactcgaccttcttatccgatccggccgaggcaagaacgtccaggccttctctctttgcgatctggcagacgagctgtccgaccggtccgtaggcggaggtcacaaagatcttttcgcccttcttggccttggagtaggccttcattccgtacaccgcggtcttaccaggcataccggctgctcccacccaggcggtctgggttgcaaggaagagggagagagacggtcgaaagcaccaagtcagccttccggaaccacactcgcgacactgtagaaagcaggtaagaacagaaacggagggacataccacagggatatcctcatcccctatggtcttgtaagcaggcggggagccagcttttgaatccgtttgaaacgtacgccgaaaggagaagaaaagattgggttgggttggttcaaatcgtgtcaagggaaaagtagcgagagaaggagatggagtgaaagcacatacgggaagcagtgatgatgttgtagctctggaactggaagaatccatagagcttctgtccggggttgtaggccgagttgtttgatctgacgacttcagccactccgaagtttgtcaaaggtttacccaactcgaagctgtgttttcaaaaggaggaaaacagagcgcgagagaacgagtgatgatggcgatgacgataacgaggatgacgaggaggatgacaaagataacagcatcgttagtctcatcgtgcaaacgataagaaagaatgagcagaaaacatggacttgcgcaggggtataagacttgatggaagcatccctcatccttcctctcatgtaaggatcacaagacaagaccagcagcttgacgatggcctgtccgtcttcgagagacacgttctcgatgtcgatctgttcggtttcgtcgtacaccacatcttcctgtaagattggcgcaaagaagagggtccccacagaagaagaaaagagaagaagacgaaagccgacgacaagaaagtcagtttagcaactttcccatccccccctccttgatcatgaaaagctggaactatgaccaagaacaaaggacgagaaggacgtactccaggaacagggcatcccttggggacggatgcgaaactacagagtcccgtggcaagttgatcagaacaaacatataatcagtccagaaaagtgtcggtaaacaaataaagatccaatcgtatgtattgcacaacatagtttgaacactgagaacgcacatgactcttgggttggcgatagcgggcatgatggagtggggggttaaaggtgggattcaaagaaaaggcgcaaggaagagatcgatcaagaaagatacgttgggcgtacgaaagagcatcggacgacttggttttttttaataggctgatgtattttcattgtggtcgatcttttttctgacttactgatccaaaaatcaccggtaaggaaatcgccggacatacgtcggtttctgacggccgttccgggttcggcgttcgtcataagcggcatagggttacgccttacgctgatgaaccctccagatgtagggcgcggggatcggagtatgacaaaggtaaagtacgcttgggattatgaagcggcgcttggagtcggcgactatgagcttgaaatcgagacgatgactaaagtaggccagactatcgataagagaaacttcgagaagaaggtttcaactcgaggaatcctcacgtctaagcaggcgcgagagcgtttcccttcgtgtcgggggacccgtcacacatctggccttgccattcggcggtctcgttgttcatcatgcctttccattttgttaggctcctgctctttattcggtgtttctcttggttagtgtcacgcctagtgatctgttgtttgacaatcttctgcttgataatcattctgcttagcgacctcttgcttcttgatcatcattctggtcgataatcccgtcgttttggtaatcgagtggcaaccagagcatccctcgttgactgcagtaacaactcgtaacctgcgtaaccccggcctctaagagtcgctcagacttcaaaagacgtgatacgcaatccgttttcctagccacttgattcgttaacccccattgaacagtgcattcgatcagtctttcagagggcatcgcacgtgccagttgttcatggagaatcacattgtccatcatgaaaaagaaaaaaaagggaaaaagatatgtagatgtatgtatgagagaaaaaagaaaggcaaacagacaagagctataggaagaaacaacggatgcaaccggttaaagtccgagacggtttgacgaaatgaaaaggagaaaaaagtacgagaagagaacgaaccaatggtgtataagtaataagggatggatgaagaagagatgattaaagaggggaggttggaaaacagacacgaacgagggtagaaaggaaataaaaaggtaagtggcaggggagcgttgattatctatcgcccgatccagcctcgaacgattatgctgactggacggtcaaacggtgaaaccatgaccggtccttagaaggcggcgaggaggagggatccagcggcgataacaccgagggctccgacgggggcggcaacgttcctgaaagcgttggaaacggcggaggaggcggcagcagcggcagaggaggcggcgctagcagcgaccgaggcggaggtggaagccgaggcggaaacggcagcggaggctagagaacgagttgagatgatctggtatcagtgaggagaaacaagatgacttgggagattgtatgtagggtaggaacatgacatacacttgctagcagcagaagcggaggaagaggcaacgacggaggacgacttggctgtatggtttgtcaaacaagagtcagctacgagttcgggtgtttactttgaaaaggaaaaggacagaagaccatggacgaacaggcagcgacgatggaagacgaagcggcgctggaagaagcagagatcgacgaagcagcggacgaggcggccgaagtggcagaggaggcggccgaagagacagaggcggcgacggcggctgtgacgaaaggacgaaagcaagtgagtgttctggctagggagttgaaagcgatcaaacgaaaggaaaggaaaagaagagaaaaacaagacatacaagagacggtaccagagaccgaagaggcggtggcggcaacggaggaagcagactgggcggcggaagaggccgagccgcaggtggtagctccggtggggttagcggcgacggtaacggcctgggcaaagttggtggctccggtggagtccttgatggcgacggtgacggaagtggcggcagcgatgtcgacgatccaggtgtacgaggtggcagaggaggccgagagaagggtctcgagctgatgaaaagatgaggaagcgggagcgggtgaatatgggaagaatcggtagtacaaaattggattttggacttacgacagccgaggtagatccaccctggttgatggtgaggtagtatggcgcggttcctccggtccacgactaaaggaaatggagaaagacaaaaaggggagatgggcgtgagaaacagatcgagaagaagaggaagaggaaaaagaacaagaggtctgataaagtgaaaacaaagattgacgcgtccatctggtctgctccggtaccaccaattttttggtggtaaatcggacgacaaagtggtggcaatcgccgagatggggaggaacaacaaaggaaaaaaaaaaggataaacaaagacatcgaacttacaaggagggagggctggcagaaggtcaaaccaaaaggagtgttgactggagagatggaggcaagacgttaatcgtgtggtcaagttagttcttgtcgttagcatgaacggagagacgacagaaggatagaagacggaggaaaaaaagaaaaaaaaaagagaaaaaggtgtgatggggactgcgtttttttctccagaaagaaaagaaaaaagcaatacacgacgagaaacttaccagtaagtgcggtctgggcgacggccgagacggcggcgagagcggaaacgagaagagtggaagcgaacattgctttaaagtgagttgagaagggaggtgttggtgagaaagttttttttaatctgtcaagtgagagtgagagaagtggttgagtgaaggaaagaaggaaggagaaagaaaaaggaacgggaagttgaagaaggaagaatcgacgaagggcgcgaaagaaaaagcaggcgggaggtcgaaattgaaaagagaaaagagagagagcgagagagagagaaaaacaagaagatttcgtatttattctcttgtgggggactgggaaggcgcgcacagaggccggcagggccgtgcacaggaacaggcaccatgacgcaggaacgaaacaggacctagcatgtcccaacaggcacacgtacacacctcccacggccgttgactctggtcggttgcgcgactttccgcttgggcacgtcgacatcgattggggtgcggcaaactagccgcgcagtcggacggttctttttctctctctgctttttcgcctagactgccagtttttactacgcccgcgctcggatctgacgttcacttttagcctttccgcagcagtcggtctgtcacccaggatgaggaaaataaccttgtttttgaatagatcgttgtctctcgccgacacgtttggttcggttgtgggtgtatggtccggatgttctgcgtgtgtgtgcgttgtcgtttatgtattcttatactttatgcccgtgcccgtgtcggtgtctgtgctatgtctggtcttgtgcctgtgtgtgtgtgtgcctgtgtgtgtgtgtgtgtgtgtgtgtgtgtgccctgaactgtgggatgtcactctgggttctctctctctctccctcgcctccctctctcctagtgcttgcgtcgccttgcctcggctctttcccttccctggctgttcgctctgttctctctgtggcctctctctgtagtctctctgtagtcactttgtagtctctttgtagtcactctctattgcctttctctagtcgctctgtctcttccctctattgcctctgttgccttcgcttccctccctctttcctcccctcctgctctcgtgcctctctctctctgaggtgtctgtcttccccccccccaaagctggg

SEQ ID NO: 2283 - DNA, 410 bp, Xanthophyllomyces dendrorhous
ccttccatcttgcttgccttgcttcttcctcatcactctgcttccccccccttgtttctctgcttcccctcccacttcacaccacccatgcggccttgctactcggtcctcactccccttgtcctccctctcctccctctcctctcacttttactccccctcctcccatccgctctcgcccgtccgatcgagtttgacggaccagagttcaaaccaggtggccgcctggtcgacctgctcaacatccaggtcaacgtgtggaagcgacaagacccaacaaaccagacgatctcttccagtgagtttaccgtttgtttgtttgtttgtttgtttgtttgtttgtttgttctctcttggtctttcttgttctttctcaccttctccttgcgtttcttcttgcgcttcttctt

SEQ ID NO: 2284 - DNA, 1889 bp, Xanthophyllomyces dendrorhous
gcttcttcttgcgcttcttccccattcccctccgttcccctcccgacccagcctccagccaaacagtcatagtctcctcctcaatccccgcaacctcgaccgacacactctctgtcctaccggtcaccacaaccttccagtcttcctccgccatcacctctgtcgactcttcttcttcctctacgcccgagtcaaccccgatatccacctcaatctcagcctcaacctcgaccacaatcgctgatacaaccaccctcacagttgaaccctcttcggcgtctttggcatcatcggccacctctactctagccccagtgtcttcctcaccctcaccctcgcccacgacctccttggcaatctcacctacgtcctctgcgccgccgcaatctaccataaccccatctagcacatcggcttctctcgatacctccgtatctctcacttcctccccctcctcctcctcgtccccttccccttcctcctccggctccacatctgcgctcgtatcgtcttcttcttcctcttcctccccctccccctcagccacagtcgaatcaaccgtagccgtctcgtcaacgccgtaagtcaaagacccatcgctctcttgaccagaacgagattgtcttcatgtgtcgtctctgccgtcattggactcatggtcacacctcgtttcgtccttctcttcctctctcttcctctcaaccatccttcttcctgcaatctcgttgccagaatcccgtctgactctactgttccctcctcctcgtcctcgactgcatcggtgtccccgacgtcttccgcgctctcttcacctaccaccgaatcttcggtaacgtccgtcccgacaacgatcatctcctcgatcggatcattgtcctcgaccatcgtcatcgtcctcactccctcggcctcctcgtaagtacaccgttcaccgttttctccctactcttgaccttcccttccttccccccccctctccatgaccctcaaaagttgttccgcgtctctgaggaaagaaagagctcgaaagactcatgacaaccttgttactgtgttgctttttgtctggggtgggggcgaggaccggttgactcgatagttctccttctgacggcctgtcttctacctctacactcttctcttctccttcgtcaacattgaccacaccctctccgacggtgtcgctgtcgccgtcgccgtctctgtctttatctccctctacgaccctctctacgacgatatcggcctctacatccgtctcggtgtctgctctctccccaacgtctacctctgcttcttctcctgtaacggcatctatctctccttcctcaacattgtcggcatcatctgtcgctgggtctttcaccggatccctatcaaccacatcatctgcctctgtctctggcacggctcttctcaccgtttctggcgccaactccggctctgtgacgatcacggtccctaccaccactgcctccgctatccccctctctgcttccgtctcaacctctactcccgcttctacgcctgcttctacttcaactcttacctctatctctaactccggctctatctctacttctatctctggctccatctctgctctcatctctttgtccgtgatccaaccctcggctgtggcctcgcccatcctgacatcctccggttctgttggacctgactcgtccgggatctcgacgtcggatgtgtctaccaggtctagcacatcgtctttgatcacctcggccattgtgacatctgtttccgcttccggttctcttatgtcagtctctcttgctcttatcattccgttccgtacgaccatcttggaaagttctccagtttttgacaaccaaattgaggggtctttcttttttcttttttttttt

SEQ ID NO: 2285 - DNA, 14092 bp, Xanthophyllomyces dendrorhous
tctcagaccgtcaacaattgtgcccagcgcgacgcctaccaccgttccttcctcggttgctatcaccgtcgccaccgctacagctaccgccaccgccaccgccaccgctattgcgactgcaactgcagctgcgaccagtctgccacagacagtgtcgactactgtttcttcctcgaccaacgccgccggctcggtcatacccgtcaccaaggtcgtagtcgtcaccgtaacgcctgatcctcaacagaccaactctgtcataccgttcacgacaacactaacgggcggcgcgacaggcttaaaggttgtgacgataaccaaatacttcacttccaatgggtttgtcccttcatgttctctctctctctctcactgcctatccgaaacagttgctaacgttctcttccttcacaacgttgtctttttcatcccaaatctgatccaaacagagcgacatacacatccattcccatagcggtggaaacaataacagtacccatcggaggcattgccaccagtacacaatccactgacgcagttcagcgttcgtctctcttctgtttctttatctcccgatcgcgcaagagaagactgacatcaatgattggatcattcttttcttctcctcctcttatcaagccgtcatcgtcacaatttatatcgaccctacggattctaaccaggctacgacagggatcatgacacaggatgtgacgtacaccgagacttatatgtctaccggagacggatccgtcggggtcgtcgttcaggtttgtatttcctacccccttttcttttccactgtcttcaaacaatgaaggtagaaaagaaggcctcggaattgaattcggttctcctctcttcccaattttggacttctcacctcagacattgacttcaccagtcatcgtcacacgtaccagccaagctaccgacacccccgccctccaaaatcacggagtccggtcgatcggctcgacaagcgacatccacaaactcgtaggatgggcagtcgggctttcagccggcttccttggcttcggattctttctataaggacatcttttaaggagaaagaaacgatggactttcgctaagtttttttttcttcccatgactctttctttgctgtttctcctttttttctttctttcttttgtctatggtctggaccttttcgcccgtatgttgaactttgttctattcgtctatgttcttgatcgtccatcttgtctgtttactttgattgtcttcgtcgtattcttcctcccccccctctttcttttaaaaacttttttcttcttcaaaatccaaaagcgaaacttgaaaagtgaaaaatcaacgttccgtttccatcggttggaacgaagtagcttgtcattctttcgtcttcatgtgttcatcttccgtactttgcaggcctcctcgttcttcctattttgctcatacatgcatcacacaaacatgcatatacatacatacatacatacgtactttacatacctacataaataaatatatacacaaacacaatatatacaatacatacgatacatacgatacatacatatatacgtacacacgcacgcacgaaacctcacctctcatccctcgttgtccgttccgttccatcgcatcgcatcatgttccgttacaccatctcgcaccgctcgttcacttcacgttccttcaacgctttccatgtctttcacgttctttcaacgcacggtcttttcctttcttctagattgtctgcccatgtctttttttctcttttcgtctcgtctcgaggccttcccggcggcggcgcttgctacttcttcaacctgatcggttgctgatgctgatgatgatgctgacggtgctgaccatcaacgcaagacatacgctgtatacatcgatctcttgtcgcctcacccacagatccgttccaagaatcgagtcacagataaatacatccagatcataagtccttatctcctttcttttcctttcttcttcttcctccttacatcagaatgataagacgacagattcaaaaaaagaaaagaaagaaaaaggaaataaaataaaatggggggtggaaggaagtagctagataggtggtggtggatggtggtatggaacgagatgttaaatgggtataagagcataacaaggaagggtgatacaacggtctgagacaagacgagatggtgggaagcacccgacggatgttcgtttgtccatgagaaacaaggtgaaaagacggtaaggaaaacgaaaggagcagaaacagagacaagaacgaagaaagactttcttcttcttctcttcgcgagaggagattggatcaacatcatactaaaacaccacgggatatactctctctatcggtcgaaccgccagaccggaaccagaaccgagcagagagaatctatctggacagacctggttggataaagatcgaacgtcaagccggtcaacctatcgtctccacaatcgattcaagcgccagacgagacataccaagaagtaagattccattctgtttcgacacgaaccgttgtcgtcagtttggtcatagttgccttggttgtagaacatatgagcctaaacttacgcatgttcttgaagaaaacaaggcacacatgtacacgatgtcagcgtcgcgctcgaaatagaaaagagaaaacacgggccgactaaccaaatcgagctcgatactgatcaggaggaatctatcgaacatgggttcatagaatccagagagcagagcgctgatcagatcaggaggatagtacgagtcatcaaaccagataacctttgagacgtacaacagtgatatcagatccatccttcctcgtgagttgtttccctttactctccaatgccttgaacagagtgaaggcacctaacaagagtatatgcatcaacagaagaagacatcgccggaaataaccttccaatcatctatatactagggaccgggaaaggagaacggctcacctatggcgtcgacaactcctacagccagctctttacgaatttcatcgatctacagcagaagaggacggtaacaaattcggactttagttccgaacccaaagcacggaagaagcacggtacgtacgccgaccagaagcgaatagtccattacaaagttcgttgactgaacgaaagaccaagacaaaacgggaatataagtctatgtgcaaccgtccgctcgcaccaacaaagcatgacgtacaagaaacttggtatcgttcaagatagcgtcatgaagtatgctcttcccgtacggatgaatcaagagaggtacagctttaagacctatcaataaacaagcaatttctgccatcaataatcgattgaaccctcagaaagtcaaaggaacgatctccaaaccttcaacccaatccatatcgtgtccaagggtcaattgagaatttccatccaacacattcttgaatcgacggccttcgatgcccttgaggtcaaacgttttggatatagtttgatcgtagaacaagttttccatcacgagaaggtcaagcttgcgcgtctggttggtatcaagatcgtgtactaatgggtaaagtaatttagtacaagatattcttaggtctgatcatgacaacaaaatgaacgaacccttgcaggtatagaatctagtgagatacgtgggagtacggtcagtcgagccaagtcatcccgtgaactgagagattgaatacagcctacccaacaattttggctaacgaggttggcttggccgagccgctactgagaataaagtcaaaatatgccggtgcgatatcaagaagaccttgctggaaagagtaacgaaatatcagcatatgtcgccaggcgctgagcagagtgagaagctcacaatatcactgatgttccatttggagaccagttcttttacgacaaacttatcatccgtcgttttgaagaacgcggctttacctaaaagtagagaattagcgtcgacgtcgacaagacaggcagtcacaacaaaaaggatcctatcagaacgtgaattaccaactttttcctccttgggcatcccatagattcgtgttctctaacgactcaattattgagacatctatcccaagtctacgtcttaatgtctcgaacgcagcagcatagtagatgatacaggtgatctcccgccttttgtttgttccacttcctatggtggtggttagatgtacatgcggtttcgattcgatggggaaaaccgggagttgagcttcggatccaagaagattatgcatcgagggcgtccgggaagaactcagattcttcatcgaaggcttccgacgggtgttatttggaccatattgtagaatagcagatactgaatcacccaatgcagaggttaaagaggacgtccagccttcacctttatacccgaacgttgccgaaagaggaggtgtaggaagcggtgtcgagttagccgattgagagaaattacgtcggttgaggttgatgctgagagttagaggggtctcttcaggaatgactgacgatccatttggggtatgggaaacctccgaaaaccgctttggcaaaaaatgatgagaagcgggagagacaggaacagataagctaggggtgacactgccagagtctagagatgaagctgaagtggattgagaaatagaggttggtattgatgaccctttgtcttccagcagacgatgcagcttctgcacgtctaataagacttcatccggattcttctcatcgctcttcaccgaactactcaaaggtcctctagaggtcagacacatccgtccttccgcttcctcaaacgagattgtcggatcattcccagatttctgtgtaccaaacgcgtggctggatcttccatcttgtggggtggaactgaaagccgaggggacagagaggagcgaatcactacgtttccgcctgaggctgaatagggccgcagaaaagtctttagcgtggtcggcacgagtaaggttggccgtacagtgagggggagcaaagcatgaattgggcaagacatggtccgtcttcatttcagatggagatattgaaaattcgctgcttgtaatcatggacgcgcgtggagcactgatctctagagatggtccgatactgatggactgggatttcgatagctcctctaaatactttgtggacgacagagcatgagctataagacttgcaggttggtctttcgggtaagatgaatcaaaccaagaagaaagggaatgttagatgaaaaaaagaattccatgcatacatgttgaagatctgacaaaccttctttgtaaagtacggagctccctggaagagcatgagcatccttgtcgaggaaatattttggagatcgtagagtcaaatccatgggcggcaggtttcctaaatcgaagcccgacccatctgtttcctcccacgcagtcaacttttgcgctgccgacctagacttttgcatgaatgttcgacggacatcatttaaccctccagatttcaagctggactcatgaatagagaccaataggctatctttttcagtacagatgtccatgagcagcttgtgaagtttggagtaatgatgtgcaggatcatcgaccacatcaagaacttgcgaggtctgagttctattcttcatgacaaatgacaaccgctctttctgtataagaacaacgaacgcaaaatgagatgatgggataacttgattgcctaatcccctagggaaagacttagacgtaccagcatatcgattcgttcttccagaatctcataaaatccctcgacctcccgtttgactaatctttttctcttcaagcgagctctctttctttccgtgtcctcgctacttcctggtgatccatcccttctggtgttagccttgacggtcttggatttaggaacaagcttgctcaagcttgtctcgtagacgttcaaagaggacagcgatattgtaatcagtacattctgatgtttgaactgtcgcaaaagattcggagaggacttttgcccgacgttcgaaaaggctgatgacatctcgggtaccggagggactatatgagaacatataggcatcgttggttgtaggacacggtcactatagacaagtatctcgaggtactttccgaatgggacatgtctgagtccaagtacaataggacttcagtacaatcccacattgtcattgacgtaactctggtcgataaaaagaagcaggacttacaaagcagcatagctcaaccgatggtcttcacttttcttaccacacattcgacattcaacccagcacaatacatcgttcccttccacgtgttctctccggatagcacacctgctttctatcttgacacctccatggatccagacctttacatgatcaatctcaggtttaccgcaaccagctccatcacaattctgacctttgctcgctcgatccgacgttgctcgaataaagccacccagagaagggtgattaccgagaacagggctggtagtggctgaatatgggaggtggatgagagacgggggcttgcactcaggctggtcagatgttgtagaggatagggtaggagtcaagggatctgtgggctgtctattgctgtaggtcgaaatgttgggagccgcacgcagacctacagcatacaaaaccacgatggtttctaaacaagttttgagaaatgcgtcagacagcggtagaacgaacctcacagctaagagataacatgaacttacgctgtttccagaacccatcaggtccaaaatctccattattttccgagcagtcagtcaagttgatcccactgaaagcactcagcccacttcgtgcttccgctgaaagtctaaggccctcgggcgctttctctccccatcggttattatatgtactgttattatggtttgttttgtcagagcttgtgctcttgagaatagacgcgctgggcttatccgaatcgtccgactcttcgaatagagaagactcgaccttaggcgggttggttttgagtagttgattttcggtttctacaacgtgaaacgtatgctcagatggatgtcaaatgctcaagggaagaagcgtgataaagtaatgacaaaccttgaagatggagaaaaataggagggacaggaaaaggaccgacagccggagaggtagaaaagaccgtcgttctgaacagatcagcaagccttgtatattttagttgtaccttcttttctttttcctttgctgagttcgactcttcaacctgggctttttggtcatccttggtagattcgagagtattacccctagaagacggagcagtcggttcgctctccactctggtcaaggccgtatctgagtcttgtatatctcgaaccagtgggctctgtgctcgttgaccgacaatagcttcccagaatcctcctagcaagttgttcttctgtctgccccgtttccgtgcgaaaaaagtcccccatgtccggcgtcctagagcattgcaatcttctttctctctaatcagtgctctggaagacggaaggccgtcgatagatctacttctagataacgcctcgttggaagtcaacgtgtatcgctcgtacggcattggcattgggagaggagggtcgaggatataaccatgtgatttgagaagcgggatctctagggagttcatagaatgcgtgtagatctgtttcgcgaatggggcatcagcaattgagtgtcaaatagtgatctaccgacgagagataacctctgtgcagagagagctcacagctacccgaagtgtttcctctaggaaagaccgaaacttttggttcttgagctctgtagcttgaataggatttcggacgaccaaagatcctcccaataggtgataatcctctggtgacgacgaagaaaaacaatgggctgttgaagaccatgacaatttatgagggtcagcatcatctagaaaccagtacactcattcttcaatatctgcacaaaggcaaaacgaaacagggacctcctcatttgcgctctggtttgactaggaacaagtatgaaaggcaagatagaagaaaaactcacgattcacgcctgatgaacagaataaaatctttcctttcatttcttctatttcagcatcatctacccttagattatcggacgaaacgatcggtcttggttcatcattagctgccgccggttgtggtcttcttccgtctcctgacccgatcacccattcttcagagacccaacgaatctcacctggcccatcatcaggctcaacgcatgctctatcttcataaagcacacaaatcaccaatacgaccttcttccttccttcacgaccgggcaaatgatcttcttgttcgtccggaatgataggcacggcatcatcttctgttgattcgagattcatggggattctttctggtcgaagagctctatccgatctgttcggattctcatctctgatcctgttcctaagctcactggtgcccagctctccctgtttcctcgccaatggacgagcatcaccacgtcctgaagcaagcttgagaccggcaggtaggcggtaggacgtgtaattggggatcgatctgataaacctatgtcggtctccttttccgtccgttccctcctcaccaatcttctgctcttggtcccccttctccgaagcggacggcgtagatcctccgagagccttttgggagtccctggacacacggtagcggtcacgttcactggttagaatcaacgacgtctgagcgagatcatcagcccattcgtcaagaggaatggattgcactgatcttaggataggctctttccatttcttgattgacaggccaagggatctcatggtttgaccgatgagagtcgattgatgtgtagcgtaggacgccggtaagggttgagcttgaacatgacgttgaggtttttctgattcagtcatcactcgagattccttctgagtgagcagggatgcgccgagaagacgaagagattaagaataaaatagcaagaaagcaggctatgctccctaccgtacatcaatcgaaatgagaaactcttgtgatgacgccctagatggaggtgatgggtaaagcagacgacggcttggcttcatccggtcgcggcgggcagccattcgataagcatataataatcactgcgtatgttttgcgtttccctgcaatctctcaaacataatcctactcataaaacattatataaatacacttaaaacgtgatagacagataaacaaggaagagaggaaccagaaaagtgagtagagaacctagtatgacaaagagagagaagaaagaaaggaaagaaggaagatcaatccagccgaaccccaatatagcttaaccgaacaagacaaacgagatgtgaacgggaacgatgcagaaatgattacttatatgattgttctcgagagaaaacaggaaaagactacgaaaacagaaagtcaagaaagagtaataaagaacgtacgggcctgccaaagcaagatttcaagaaaaggagaactagatgattatattttttttttggaaaaggggcgatgtttagatatcatcataacggcggtgaaggacagaaaggtacccctactgagtgggcgagaggttagactgtacgtgccaaagaaaagaaaaacaagaacaaatcacaaagaaaattcttcatcagcggatgttacgcgatcgggagagagcaacgaagaaaaaaggatcaacttacatccatgagaccgatagtcagcatcccatccatcatccttcaccattcggtcgagcgcgccatgatgtgtgtttcgcctcttgagcacagtggcggggtccatcttatcctcgtcctcagagtccgagctatcgatttcgaacggcctgctgggcgttctgtgaagcccaagggagggtctagcggccgaagtccctacgtcgaacgacggccgcttccgctgggaggccgacgcgaagaaggaaggatgctgtacaggatggggctcggcagggactcggttgatcgaggttgatgttaacggtcgaagcgtgtttgtgttgagcacaccgcccgttcttttcaaaccggccggaggttggaccggattgattgaaggaggtccgcctgatggtggctgttgtgctcccgaaggtgattgcccacgagcgttcggtttggattgagcgtgatgaccctctgtggccgagcttctgacgacgttcggtcttgggccggcctggttgatctctgcattcaacttgggagtcgaattacttcggttgatcatcccgccgccaaggatacgctgtctggacattcgttcccagagcaactgcttcctcaattcctccggaagttcggccgccaacatctgacgtctggtcgtccttggagactgaggagcggccgatggggcgggcatcagctgctggggcattgtcactggggttgttggtgaaaccgaggcgggaggcggagagacaagggcgacatgtccagtcgcaggaggggatggcgtgctcggtcgaggaggaagcggtcttgtggtcggcgggtattgacattcactcttggacgatttcgaagacggggcgagagcggtgagaccagaaaacgcatggttccgaggtgctgaccgactggaattcttcgaagaaagcatcgagagtcgacgttgagcctcagatgttccgagtgtgagcttgtcggccgagccaaactagtgagaaggaaggaaggagagagaaagaaggaagcaaagatcggtcagcaagggcgtcaatgacacaggctgaatgttgagtggcaacaaagaaaaactgacttctccctcgctgtcgctctcgagatctggtttcttgaaatcctcgcgtccaactgagaattcggtctctagaggcaacgcgacggcactcctgttcctagagagcgcgagaggcgcccctccggtcgacttggacagaacgtcccttcggtgttgacagagattctgctggctctgttgtagggaaacgaagagaacagcgcaagagagcaaacgaagagaagaagagaaacccatcaaaaatctgatcaaacggcagtgaaaaggaacaaagaagaggaaaccacacaaacctggtgagtcctactaacggagcgctctacctctctcttctctcgctcagttttaaacatatcactcaacaaaccggagcttcttccggctgcgatacctctgccgggcgcatcctgaccggatcctttggaatgaactgagctatcctttccttctgtctcagacgagtgaacattggaggagaaccccgtactgattgcgctatcccggcacaacccatacaaatcggccgccgatttagaaatcggtactttgacaaacatcgttctctgccgctctgcttctttctccgcgaccttcgcctgcgcgagcgccctggcggccgcgagcgcagtggccgcactagtagactgtcgtcgcatggctatgcctcccggtccaccggcagtgggatgagcaccaggtccacctgtcgtggtgctggtggtcgtcgagtgagatgtctttttcatctttgacaagccagattgggcgggcttgtggattgctgacttcttaggagcaggctccgagttgtcagaagcccaatcgccatcggattcgtttccgtcttggtcatcttccccctcggtatgggatgacgaggaagacgcatcctcataatcctcgtcgttgtcctcctcctcttcggcatcctcgacggtgcttgccgagattgttctaaataaaaataaaaagagaagagagagaggctcagaatgtgagacgttgtaatttcggaagactgacgcaaggacagacgacggtacgaaagagagaaatcgacgtactttgtggaagaaccggtactgttcgttgtcgtaccacccagcttcggtctcactgtcttgatctctgcttgctgattagtcttcgatctcaatattccggccactctagctttctcgattccgaaccgaccagccagaggaaatccgccacctgtacctctcgcatgggacggagggaggggcggtggatgcatgggaccggactgtcgtccgaggcccttagcatttatagaaacatctgaggtggcggcggtagacggggcagtggtgacagagggggcgacaggagcggcagaaacggtagcaaaaggtcgggtgggatgatgagcggccgtcgtggacgatcttctcggtttcaattttccgcttggtccatgggctactttctttttggtcggtggtccggtctgttgggctggtttagacagatcgggagaggacgacaaggtggttgttacttgggaagccggcgcggtggcagcaacaagggcaggagtagagtcagaagcagattcagaagcagttgagagagcagatgcggaaggaggtggagtaggagggagagaggtcaaattgacggattctgtagaaggaggagggggagtaaccggttgaagtaaaagaggtctggtctgaatagaaggagagccgatgggagtagcttcgactgaggctgatgccgaggccaaaactgtatttttgagaggagaggatgaagtgagtgcatgttgctgttgttgccgctgctgctgctgctgctggtcgacttggtaagcagcaattccgctctcctcttttggcggatggccctttcgtttaggtccgatactgagaatcaatccgccgtcctcactgtcacaatcatccacgctctgaggagaacgtgccaaagatcgatggtcgactttgcggtggacggcctccggtatcgcttgctctgccgaactaacggacccaacggtagccgacccaaaggacgagccttcttcaccgcaatcaggagattgaatgaagaacatgtttcgtctgacagcacccgacccgacgatagcaacggaggatgataccgcagaggaaggaccactgacggccaaggtcgaagacatcgttggtagaggagaggttattctcggaggggactgtctgggccgtctagatagtctgtgattcaagttggactctcgttgaacaagttccaaattgtttgacgtcaacggggtcgttccccctccggctgggaccaatggctgagtctgtctgataaggccggcaccaagctgcctgtcgagctctaggatcgggctcgaggggatcgagttgaacggggtcggatcggtaaaagtaagggtaatgtccgaatggggatgatgtggtggggtctgtagtgaagtaggtagtgttggtgacgagccggtctgctgttcgaccgtctgctgactgtcgatcccgcgttcggacggcccagtgctcctcctaccgttcacgtctgcaaacgaaagatccttcttcctggccggaggaaccatgccctcaagaaagacgtgaccgagaagccgaccgaacgagacgacgccatccgcatcggcgaagactgctctgtttgtactaccgaatgagctatgtgtggaagaatgcattgagcacggggtcgagtgagctctggtaccaattgatggtctgggtgtggcggtgcccgaaccggagggtgtgccgtctgagcaagaaggctctctttgcggaatggaagcgtgggctgaggatgatctggagatggcccgtctgtcaaaagatgttgaggccgaggtcagttgagtttgccacgatggtggtggaggtaatggaggtgagcttggatgggggactttaggcagaggctcaattgatggtgtaggggtggctgtttccgagctagacttgggtgacgtagtggcaagacggacagaagaagatgcagacagagatgatgagatgggattggagatggatggtggttggaaatctctgtccgaatggtaggaagcgatggaggacaggatggatgacgtggacgaataggatgacgaaaagtgggagggatctgtagttaacgagtcatgatcggagcaggaagctgcatgggctgttgtcgggtggaggtgtctgtaccatagtctgtgtttagatcgagaggaagaaagagagaacagcctcagtcaaccgttagaagcacaagagagagagagagggggtga

SEQ ID NO: 2286 - DNA, 3878 bp, Xanthophyllomyces dendrorhous
tcgtcgtggtgctcaagccaggctattatcgtaaagtacaaggtcgaatatgagtgtcttcaactctttcacaaccgggataaactgcagggctcggacggaccatcttcgagaatctctatgatttcttctggcgtcaacgcaagcgcctgtaaataacggatgagagagaagtctgaatcagaatgatgtgtccgaagacatatgatataggatgtctcatggaattgatgggcttactcgatcatatacctgatcaacatcagatgaaaggatagctaggtcatcctcgaccacctgagattccgatcccttagtatatatctggtttccaggagtggtgataccaaagaccaaggacagcggtcagtcgcccggagtagggaaggaagaagacagggcaaaagagtaggaggagaggagacgtacaggatctatcttttcatcattaacagggtagacatcagatacgatgtcttcatctttctcgagctcatattttaacgcgggcgccatgaggaggatttattcaggatatcaaagaaaattccttacaaaagccggcgaggagaagaacagaaggaaagcgtctaggaggatggtttttggaataggatcagtctatcgacgcgttcttctctgttctttaagaagtcagtacactctccggtcctctttgcaatcgtccacaaccttcctccgtattagtagtcatcttccttgcaagatgacacaatctcaaatcacccaatcagtctcaccatatggactacttatcgacaaatactcaggacgttctcgccataaatatcatatcaaagggacccgatggggaaccggtggggaatgaatgaatgaaatcaagaaaagcaaaggaaaagtgacaagtttgctttcgaattgagcagatgagtgaccgggtttgcaaatcgcttagttcaagcctcaagtcagtgttagtgcggggagtcgaaaacaaaattagtctcaacatcttcatcaagtcatgtttgattgtaggcgaagaagaaggaggaggaggaggagcaggttacaataaagaagaaaagtaatgagaagccaagaagatcagcaaccgatcacctaaccgaatcctacctctgaaaataaaatcaattatgcttggctcctgtattctcacccctcacaccccacacccaatcacttgcaccatccaatgtcgaacgcacaccataccgttgttccctcgcaccggaccgttgctatctaccggatcttgacaacctatccttcagattaagagcatcaacttctttatccgtttaatccgattttatactctttaaacggagctagaactctcaactggcacgttagattatcttggtaagtagaaaagataaccaaatgtctgaaggctctaaatatctctatatgtacaacaaaggaaagaaaaatcaaaaacaagaaaaatactttcaaagatcgaaggaagactcgagatggagacaaaataagacgaagatgaaaacaggaaaagccgcttgagggatggaagctggcttggtcgtaagaagataagggcgttaaagaaaaagaaaagctcgacaaacaagatatgaggagggacatgcacgagatgaacaagattatttattccgaggtagatactctgttgagagatgaaatattagattccccactggttctgaccgacaccagctcctccttgttgttgttgctgctgctgtcgctggttatgggcctgtagcaactgctggatctgatctgtggatagattaatcaaattcaacccgctttggccaccttgaccttgaatttgaccgacaggctgtccctgtccaggctgaccgacgttcattccagggattcctgatgtatcaaaagaattacccagatgggattgggtagcaaacacagaaggagctgctaacccttgattaggttggaatgactgaaccacttgttgttgttgatgttgttggtgttgttgaagaagctgttgctgttgctgctgttgttgttgctgctgctgctgaagcataagctggagttgttgctgttgtgaaggttgaagaggagattgaagaagattcgaagaggtcgatgaagtagggccaactgcagactgattaaccatcgattgaggtggtgtcggctgagtcggaggtagagtgtttgaattggatggtccagagggtgagaatggaatctgtacatgttccattgattgtcagacacattcagttccgtcctttctctgcttcttccatagctatctggctaagagggacggaaaaataataagaagaagttgacttacaggtactttgaggaagagcatccccattagcttcacaggtccgttctgaccgccactcatcggaaacacgatcataccagaacccgggggaccgaacctgatgtggcccatctgtatatatacggtaaattaaaaacgtaaatacgagtagtcctccttgagaaaacaccttttaacatagggtaaattaacacgcactgtcttcttgccctctaagtttttggccagactggtatagctctgttcgccccgctgggcctcatccttcgtggctccgggttgaggagaatgatgcaagctaacgcaaggcatccgaccgttcgtcacataatttcggagctcgttgatcatcaacggggataccgctgacaaatgaagtctactcggccagagatgcttttgacttgaaagagaagatgattatgaccacaatcagcatctgacctacgtccatacttacacgcgcacaaaagagaaacctctcaacgggagacttacaaatcttcgagaggaatcacatgtgctgcaaaagccgaaattttgcatcccaacaccgcgccgggtttccctccttgagaatgcacactccagctgatctctccgttccagaccaacagttttcctgctcctggctgacctccgcctgtattcgggccttggccgatagtctgaccagtcgctggtgtttgaccaatcttgatcccacttgatccattgtgaccgttcccaattccgtttccaccgacaggagcgggagcaggtgggggaacaactgcaggctgggcttgtgcttgtgcttgtgcttgcgcctgtgcctgtgcctgtgcctgtgcctgtgcttggagtttctgtcggtaatactgttgagcgagcgccgcggtctgagggttcattcctccttgggatgtgttcattgtcgttgtcatcgagtctgggttgtgtagaccgttcggattattgggttgcccgaggttcggtccttgccctcctatgacgggtgtaccgatgactatcgagttgggttttccacgcccggtcgaggccatgggtgattgttggagtgatggctgttgagacggtaatggtggtcgtggttgttgttgttgctgctgaagtgttcctctgagctgcccattcgaagtattgagagcggcctgggcagcttgagcggcttgagtttcccggatccgtttagcaagaagtaatctctgggtctgaatgtcttgaggtagctgtgtctgtgcctgaccttgagccggctcgttgaaggccgatgaggcggacatggaatattgtcctaaaggtaaagacattgatgtggccgttggggtcgagccagggggtttcgatcgcaggttggcgtttgtcgagactggagtggtcggattggtatttacactggaagacgtttcgagtgggggttgagataccggttgaatggagggcagttgcgatgacagaggggctggcgtggaggttgcggtaaccgataccgacaagggaagagcgttcgggggagccgtccttcctcttttattgttctcttcggagg

SEQ ID NO: 2287 - DNA, 1645 bp, Xanthophyllomyces dendrorhous
agaaggcgccggagaaggtagagaaaacggatgggtagtatgtagatcaaagagctgaaggaaagaacacacggtcagaaggtgttcccttcgattcacagacgcgttcgaacaagagaacaggacagaagaacggaagagaggatcaagcaagggagaagaaccagaaagacaagaaatcaaactatctgcttacttctatgccaccaacgaagccttccatgatgccttggccaggattgacggctctggagcctggtcctctaccggatgacacgatctcacctgagcctatcggttcgtggtgttcctcctgactgagcggtcgaccggcccgaacggactgccagaagccggctggtgactggaagtactgggtgtgagtgatcggggatagcgccgggttccttgacgaagctgaaaacatcagcagtgctagccggagctgttggcaagggagcagaggaagtagaacgggaaaaggttggtgaggagaaagaagagagagaaagtaaaggaaaggtctaagccgtgctgttcttgatattcctgaagaaaaacaccggggatcaagaaatgaagctttcacttaccttggcagagccgacgttggcttgtagacgactaacacactgatcgaggtatccactctgtccgaacagttcgttccatctggcctgtacgtgtggagaatcgtctacgacgacgacgactgcgatctctttcggcaacaatcttggcgagggtgcggttgttgatgttgccggcctgatcgaccgacctgatgggttccctaacggtttcacggacgccatgggaggaagcgacgaacaggcgatagggaccgacgattgtagcggggacgatggcgacggtagtgatgagactggtcacgaagccgacaccttcagtcgtctgtagatgggttccaggaacaggattacggagaaaaaaaggtccgtgcggctggtgagagccgggggaattctgattacctaagcggatcctccagaagacaccccaaccgagatcccggctaggtcggtgctacaccaaacatcgctgtccggcatggctagcgtaaggaagattgtttgtccttgagaggtgtatggatataagtgtgcatgtgtgtgtgagcgtgagcgtgagtgtgctagtacaggttggcgagtgtgtggttgctgctagtgcacgggcgcgaagaacgttgtgaatgagatatttcatacatatacgatcgatctgatgtgtcggagagcaaggaaagaagcaacgcaagtatcaacactagcaaggatgatagcaagtacatcagaaccacagagaagggatgcgtttgttctctgccggaaacattctagctcttgatggatggactgaaagggagtggctgtagtcgctccttctactgattcattgaccatctgttctcttgccttctcagaatggaagagtaaaaacaccacaacgtatgctcacgaaaactctctgaccaacccatcgagaccaaagactatatgaggctgttctctccatcttccgttgtgtatcaattgttgatcgcctgtgggcttagaaatataagagaaaagtttactttttttctactttttttacaatttttcatttttatttttatttt

SEQ ID NO: 2288 - DNA, 100374 bp, Xanthophyllomyces dendrorhous
tccttcttcttcttcactttgccttctcagaacacagacaactgtcgatttgtaggatgaagcagcgcccggatagatcgatagccttctgatcttaccgaccgtcatagccaacacaaaggacaacggcaacgacaagcacaacaagttcgcccacatggctcatcatcactcccagtacgacccggcccggccatcgtcccagtactactctcaatcgtttcttcattctcatccatttcagcagcaacagcagcaacatcaacagcaacagcaccatcaacaacatcagcaaatgatccagcaacagctacagcaacaacaatttcaccagcaatctcttgctcatcagccagatatctatccttcctatgctcactatcaacaatataacacctatccttcctccgctcctgccggccctccaacaaccggtctcgtcccgtcctcaccaccttatctgttcgaatgtcccaacgtcgcttgtcctagggcgtatagttagtatcacctcttcgcccttgtgctcttctctcttatattctcttcacttggacattatcaccgtcgactgattctttttcttgttctcgcgttttttcttggttttttctaaacctctcttatcaaattttcttgataaaaaaaactttcaccatctttttattctttgttctgacaacaatccattaaccttgcaaaccttctcctttcacctcgtctctcctctcccttcgtttgctcttcatatctgctttcttttacctggcctaattctcaacctggctcgggctcttcgtagaaatggtctcggagcttaacgcgcatcttgctcagacaaaatgccgaacggcgcttacaaacacatccggtccaccacccgctccgcgtttactagatacccatcccggtccatcttcctcgtctccatctttgtcgtcggtaccatcgtcgtcgtcgtcgtcgtcatcagcttctcttccgttaaccacttctgcgccgacgccatatagacagctttccggaatcgaagccatcatccatgcgagtttacgtgcggatgccgaggcagaggcaaaggccaacctgggcgcgagtccgggtctttctcatgctcagatcgatcgctctccaagagcgcaggtgaccgtcaaggaggagaataaaaatgatgccgatgtcgatattgatgctggtgaagttgagatcggagaggaccaagatgaggatgatgaagacgaggacgaagaagatgaggatgatgaagatgatgaggaagatgaggatgaagatgaggacgaggacgaagaagatgctagggcagcgggaaatcaactggaacgaacgttcaaatgccctaattttggttgcagtaaagcttacagtttgtttcttttgctcgtcttcgtctatcccatcctcacatccacgaacccacatgcttacaatttctttgttcatatatctcacctttcacagaacaaagcaacggactaaagtatcatttcaaaaagggtcaatgcgactttggtgtcagagatatcatcgccaaaggagcctcggaagaacaagcagagaaacaagtcagaccgttcgtctgtctagtcgatggatgtgagaggaagtacagacaacagaacgggttgatgtatcattacatgaattctggtatgtctcattcctttctactccgtctcagggtatcccgtttctgaaactgaagactagaccatttcttctttcatttcttacccttcaggcgaacacggacataaaggtatagctctgatcgaggctggtgtacatcctcatcccaagggagggatgatccctcgatatcgctcaatctaccttcacgcccataaagcccactatccagaccctaccgtcaccgtcaacgtacctactcttattccttcctcctccaactcgatcgactcaaccgccttgtcctcttcttcgtcttcggtagcctcggaatcatcaccttccatcccttcttctatactcgttcgtcaggcgacatcgattcaaacccagtcagcaatgaagcaacatgtcggaaggatcgacgacgatgaaggaacggaagacgcgctcatggctctcgtcgctctcgctggtggccttgccaagcctcgttctgatccgacccacccagggtacatctcgactcctgctatccaagacgatatcatgttggacaatgtgtccggcctcaacactctgccacccattgatggatcatcccatcgatcacctatcaatggaacgacaagaggtagaggcagaggagcaagaggtagagggaccggtagtgggactggcagagggaggggtagacctcggaccatcgggctcactcagaccacactcaaaaaaacggtctcgccctcgatggagtattcgccaatgggtgaattgatcgatagaccgaaagctagagacggaatcttgtttgattgtccaaataccaggtgtgttcggacgtatggtgagtcttccttcttctttctcttctttctctcagaccttgctcgtggtcgtatgtttgctctcagatttctcgttctcgatattgaaatcgcctttgtatcatggttgacataggaacaaaacatgaactcacttaccacatcaccctgggcagatgcaaatacaaaattttagacggaaggagtcgaggcgggaccggaaaaaatcaggataaggattcggatggaccggatgagattatggaaaaaacctcgttcggctgtcctaatcccggttgtggaaaggcctacagtgtgtccttccgtcttttctgtctttgttcttcactctaggtggaccgggagagctgatgaaatttggggttttgtcttgacatttggattcagaatttaaaaaaggtttaatcaatcatctggagccaggcgtctgtccatttggtgtcatcgagaaagagcataccccgattcttgctcgatcacttcctcacactctttcccagaatccgagcgggatttcgaatatgacgacgaacgagagcgcgacaaaaactttgatgttaaaagtcgcgaaaccgtatgcctgtcaggcgggtggaggttgtctgaaacggtatgctttgatgcatgggttgaggtaccattattcgaagtctggttcgtccttctttcctcatcatcgttcattatcttccccctttttcttgttcccatcgaaagaggcatctaacattgggtgcgggtttggggattcaaaccaatcgtataggcgagcacggagagattggtctggaattactccgacagggtaaacaccagagcgcgaatggcggtgtttttcccccaacgacgtactagctctcttcctgccctttcttcactagacaagacagaaggggaagtgagaataacgggtatcgcaaggctttttctttccaaccaccacatctatacatagaccatcatcatgtacatctacacacttacatacgtacacatacttttttgtcatataaacacatgtctttttacccatatctctcgttcgttctctccatgccaactctaagaatgaagaaagacacggtcttccaagacggaaggagctctcccaaagtcaaggcccgacgcgtcgaaaatttctggcgcgtcctgattttcgtcgcgtttctcttctcatcctgctagatccattgaagcccaccatcccaaccacgacgtccctccgttcagactcaaaggagaggagagatgaaaccttcaccaaaaggacattcgtttgaactgccaccgtcgatagatatcagattgatcgatgaaatcgttctgcattcagggccgaactcgacaacgtttctggatatctttagggcttataatcgagtgcttgttgaccatggattagatccttctgatgatgttgtgtatgccttctttcttcttcttcttcctcttcttcactctcttcttttcgtaatccgagtttaatatggactcgggtctggctccaggtctagtctttggctgatgcaaagttcacgagcatcgagaaagaccaacatcatgaactaatcatatcttatttacctctctctttccttcgttcatctattttccgaacaaatacatgttctgacctcccggaaaaaaagatactaccggttcattttaaaagtaggagaaatcccgggaacagactggcaagacaggtggtccaaatggaaatcaacctctcgactacctcatctacaaaaccgatcgaatcacatgaacggcggttctttgctttcttcgtcgtcgtcttcgcctcatacacatacacctgactatcgactcttgaatcaattcgatcgacttgaaatcggtagacagggcgaagaatatggcagtcaagagcaagaagaggaggaggatggagaagaggagagcagatcagatgataggtcccagacagcatttacggtggatacagatccgaggaccgtctcggcggtaggatgggaaccaacaagaggaacgagtaccgttcgcagtctcagtccaccgcagagaacaagcactcctctcgctagacaaaggcataatcgtaattcatcccagactccgttggccagcagaggagagcgtagaccgacaagacctaggtcaagtatggattcggccattccgcccaggccataccctcaacttcaggtccgggcgcccatccctcgtcatctgtcacccgccatccctcaaatcctatattcgcccgtccagatcgaaccaccgccgatagagatgtataatgatcaactaccggcccctcaaaagacgacacagtataccactggaccagacacaccagatatccttcctccacctcagtcgaatgttggtagggtctcgctgatgagagcagcaaaggacgcggcgatagaagcagaactgagaaaggaggatgagatgagagagcaagcagaaaggttctattcgcttggactcatgggccgatgttgggatgtctggaaaagaggtcgagattgggtcaaagtatgctttttcttcttcctcacagctctttcctcgctccaacgggcgtatgtatctgatctcttgtgccttgcaaatacttttctgtctcgattagactacagagcatcagattgatcgagcgcgcgcatttcttctcttaggttcatctttctctacctggaagaaatccgtccggatgaacgaatctctctcgatcttagcttcagaactcgcatcccgatctgctcaagcccgatctctcagcatatggcttcttaaactagaacaccatcaagatctctatgaacgagtagctaaagatgaaaacaaacggacgatcgctcgggtttggttcggctggaaagcgagttgtgaagctcgacgccgaaaacgatgggaaatctcccttggcgaacgcgaaggtagattcaaatcgtgggccgagacgaacgcgctcagaagatcattcgaaaagtggaaaattgttcgatcaaaaggattagcggtggatcattatgatgccaggttgattgctgagtcctttgcggcctggcgtcatctgacactcaaggtccaggatttgagaagcctctgggaaggttgggaggcagatacaaaaatcttggtcgttggtagagcatgggacacgtggaagatgaaattagcgaggagacaaacggaggatatcgtgggtgaacgtagggatcaaagacttctgaaaggcatactgagaacctggaaaactgcctggtatgtgacttgtttcactcaaaaccacggaatcaaaagctgtcgctaatttctttggaggtgcaattgattctagtgacgagaacgtattgcagagagagttcagacggaaaactctctcgcagtttgggtttacgatcatgaaggcacgaatgagccagataaatgtaagttcctctccgttcggtattctttgaagccagaggaaatcagtatatgaactcacgttcagccatgacttctcttttaccagtacaactctcagatactcgcacaaatcgtggccgagaaaaaagagaatgtcatccggaacgcacttaggttgtgggctcttgagactagaggtcggattgtccgggcgtcgagggaatcgaatttagtctcttccgtgttctggaagtggaaggatcaaacagattacatcacacaggatcttgacagtcagtactcgttcacgcttcatctttgatctgcttaaccaaggaaaagatttacagagttgtcatttctacacctcgttggtagacatcggaacggtttttgtgaatacgctcgcccgtcgcaaacttcattccaccttaaccacttggtcaaatcaattttatctcctacaagcgaaccaagcgaaagcagacgagcacttcttacgaaccacgttatcatcctgtcttcagacctggcgagatcggttgaagcggcatagacaacaagaaagagcggcggcgagagcctatcaaatcatcttgaaaaggagggcttggtatatctggaaattcaaatctcgaaaacgagctcaggatgattggatcgatgcacaggagagaaaagtcgtccggaccgctttcgaaggtatttaacaaattcttttcgctcggcgtagactggttgtagctaactgattaattaatcttactactcattttctttgtgttcaacgctgcctaaacttagcatggtctttggcatgtcgccgttctaagagtctgaacgctctggaggacgtcttcacagacaacaccaatcgtgtaagctctcattcaatttcaagagtagaggcacaagacacatctatcagtgctgtattgacccatatcgtcctggactatctagcgtttaacgaaccgaacgatagaggtctggcgctctcgtcttttcatgcaaaggaacgaagagcaaattcaggtgaaggcttacaaccagaagatagtctctcgagcgttcgctcagtgggtctcgggttgtttgaagcatctggaccagcagatgttgatggagtgtcacagaacagtcaaagctcaaggtagagttttcatatctcctaagaaagaatccatttacgactatctacttacagagtgaatatggcttatttgtcatcctctagaaacacttcggaaggtgttgaaacattggcgacgagcggcgaaagagtctgtttatgacaagattgaggaagctgagagactagagagaataaggattcgaacgctcacaaacgcgtgggtgtcttggagggataagcatatcgagtatcagttgaaacctattgtacgttctttcgtccgatcctgtttgtcttgttagacgtcctcatgttctctttttctctctttctcaaacgatgtgtttctcttgttgggcgtgctgctcgtcgctgtcgccatctgctgatttgctcaacttccatttacaggaagctcaagttgcactcataagcgatcgaaatactctggatgctgctcttttccgatgggagtctgtagcccacgtcgctgccgctattcacttctacaagtcgcacactaaacaaagagcaatgaaccggctaagagagcgtcttccagtgttcagggataagaaccgggcggccgtggtcgagcgcaaacgaattatcggtcagtctttatatttcatttcccatattttttttaccgagaaacattccgaatcaagtatagcttcctctaatccaaactttctaacaatttcttgggcttgataggtgtcatatttgaaacttggcagatgaaaacaaggagaaaaattgcagcacgaccacctccgtaagcctttgtctttattcatggcagtgccttcttgacagccgagaagaatatgccgcctaactgccccttcctcttcgattcatacactcctgtcactcagacgacttagaggaattgctcgtgctcggccaagactctcaacaagttttgcggaccagcctcgaagatcgagaggcgagatctagatgaagattgagacccatctatagccatgtaaagctcaaacggacatatcactcttgcatttattgaactttatctaattttatgttgggttaatttaacgcggcatgtgaaatactactggtacactttctgtacgcgttagaaagattccacaactcgaaaccccttcccgatagctcttatatcccaccactccgtctaggcgtacttcctcctaatcgactcctcggagtcgacccggccaaacgagcagctgctcctagaagaccacttcgacggggcgtcatacctcccacacctgcaatcttaggcgttgccgacggtacgacggcttgtttcttgagaagttcttctttgacagcgctatagagtataagaacgaacaaagtattgagcaaattagggatagactagactacacaaattcaaggttgacttacgcgtcgcgctgctgtgccatctccaatctacaagcacgcacaattcgacagtgaaaaaaaaacagtcagagagagcaggagttcaacagtctgaaaaacctatcaacgtactcgagttcagctttcttgctgaaatttttagctgcacggcttcgttccctgccatcaaagtttttctctcgaacgctgaaaaacacacttccaagctcggctgaattagagaatggagaggaacagtgggaaaggtcaactgaggaaaacgaaaaaaacgtagatatctataatgaaagacgtaccgagccagtacggatcaacggacgtgacacacatcatgtactgtttggaagtcatgacaactgacaaggagaacaggagcaaaacataattgtgagttttttttgcgagtatacaaatgaagaagaacaaagacctacgctcatgatacacaacgtagtctggcatgactgtagatgcaatacattttgaaatgataagtggatttaatctttcttacagaagaaggaatactttggagacagattcagcactgacatcctagaccatataaagcacttgttgggtgaaggacacaagaaacctatgaataagacgacccatgcgatgagtcaggaaagctgattgaaccgtgattcgtgcatagagacagacttacagcagttcggcaattcatgtattctccaatacccttgactcgagctgcctggtggaaataaccagcggtgatacatttcctgttgtcaaaataggtaaaagaggagatgttagaagatatcatcagcaagtcgttgctcgctaaatcaattaaaaaagaaagaaaaaaacagaatgatgtcaatgactgacctgacgatatcccaatcggtcccaactgacttgatatctagcttctgggtcttaaggatatcttccaactgagttcgaacttccctagctttacgcaataacttcgggtgtaggaaatgcttcatggcccaatcgtctcgatatctagatggtaagaataatcagagacaagaaatatgaattcctatacatctatcgaagcagcaagagcaattgaacgtacccgttactcttccattgagtataaacatgaagcaaggtaagatggtcactctccggaacaaagaacttttctcgagccgcatcactctcctcctgtctttccttaggtcgatagaacaccgaagggacagaaagcatcgatacaattgacaacatctcgttggcacattgatagtcgaccgagacgatcaacatcttcgcaagcgaaggttccatcgggtagtccgacatctttctacccaagggtgtcagattgccaatgttgtcgagtgcgccaagaacccaaagttgatacatcgagttgatgatgttttcctttgatgaggaaaaagaaagaataaggacaacaacggtcagaaacactctttaaaattgagatagataaggatgacacatacttgtggtggaggatccataaaatcgaattcaagggtgtttttcactccaagtgattttaacatcaaaactgtatttgccaaattcgtcctttggatctctgggatattgttcgggaagagttcattgatgaaggccatttcggtaaaaagtcggtaacagaatcttcattatgaagagcgattcgaaggcaagaactgatatggttagaacattctctctcttacgacacaggattgaagaccagtattaagattagacccacccgcttcctgttcgtccagctcgtccagtcctctgaccggcattggcttgactgataggcgtgatctgcagagcgtccattccgactttaggattatacactttcaactttgaataacctgcatccacaacatatagaataccatccactttttttcgtggacaaaatgaaattatgatgcctaattagtcaactttgggtcagatagaatagggtaaagataacaagacccacccgtcaaggaggtctcggcgatattggtagcaacgataacttttcttctaccatcgacagtcggctggaagattttcgcttgtagatctgccggcatctgagagtagattggcaaaacagctaacggagcgggatcatctaattgactcagccggtcttcaatgggatggcgacgcaggaagaggagagagttaattagggttgacacgtgaaataagaatagaaccatggagcacaacataccttcgactaccgaacaagtagcctcgatatcctcctgacccgtcatgaagactaaaatgtctccaggagggttcgacaaatgaatttggaggacctgtttaacagcgctatcaacataatcctcgcaaggcgctttgctatggaagatctcgactgggaaagttctaccaggaatagtaaaacagggtgctccgctgtagaagtttgagaactaaaccgataggttaaagagttaagattgagatcatggccatcgggagaagccaaaagaagaagaaaaaaaagacaaaccttctcagcgttcatcgtagctgatgttacgatgagcttcagatctcttcgacgtgtcaaaactatagtcgagtcatcgaacaatcaagagggaagaggacaattaagacgtgttaagaagcaaacaaaacagacgcatcgaagcagatacgtactttttttcaaaaggcccatcaacacatccgtactgagagaccgttcgtgagcttcatccaagatgatcacgctgtatctatcaagatcaccttcattcaaagattctcgaagtagcactccatccgtcatgtcttaaagcagggcgggagaaagagacggcaaatatcaatctcagtcctgaatatttacaaggggaaacaagataaggtattttcaaaagacttacacttgatagttgtctttggagatgtacagtcttcgaatcggatcgtatatccaaccaaatcacctagcttgacctccatttcctcactaactcgcttggctacactcatagcagccactcgtctcggttgggtgcaaccgatgatcccatacttgcagtacccgtcttcatacaagaattgagcgagctgggtcgttttaccagatccggtctctcccaccaccacgataactattgttccgaatcagagtcgatagcacggatgaagcaagtgccttatcaatcatttgtacatgcaaggaaggagctagaacaactttagagtgacaaggatataagacaacaaaccttgattatccctgatgattctcatcagatcctccctacaggcgaacgctggaagatattctctctgctctttcaacgatttcgtcctagagaacacagaggctccttcagctgctttcagatgagttgagaattgtgattcggatttgtagtttccgtcgtccggcttttcgtctatccatcaggcattttcgagacacaagcagatgttagggtgggccggaagaatggcaaggtactcagcgacaaagagaaaagatcgcataccagaaggggtatgtgtagcgccgtcgatcccatcctctccttctttcacacctagaatattcccgagtgccgtcccgcctacggaagcaagtttggcggccgcctgttctcgttcacaagaaaagagagcaatgatgattgggagacgactcgatgatgacaaagtacagaaatatgagaaagaagatatagatcgcaccttggcccgttcctgctgctctcttctctctctgacaagagcactacctttctttgaaaatatagccatatcacttgttggatccttgatcggattgataggttccaattgtctggtgtaagccgtagttccatccaagaaaggtggtcttaggtcatgaaccagaacgtgaactctagaatcagagtcgtcttcaaagtccatgtcaacggattctcgagaggttataccggaggtgtgaagtcgatttttctcccagagatcattatcggcgttgtattgggcttgtcgagctgtgacttttttgacagccttcttggtaagttcgtcctcttgttggtgtgtgaaatcttcgtactgagcgaacggattgtgatcgccatcaccagcctttgcagttcgggatatcaaatgcttcagccagtggacgaataatggaagtatgaggaaaaagcaaactcactacttcggattcctccccataccaatcacgatccagtctgacctgttcttcttcccactctctttgatttggtgtgaaatccaccccgtcctctccataccgcttttctccgctcctcggcgtagcatcccaaccattgtcccttctgcccatatcgccaagctgaccttctcttctccgaggagtctcgtcccatcctcggttaggaactctgactgagccatctcctgctcggcgctcagttgagggaccgcctctttcagatcgcggggtaggcgcatccgaccaggatttagtgttgcctctggagttggagtcaagattagggttttgagaacgaggggttgactgaggatctgaagactgagacgatatggcagaggtcgaatctcgagcatatcgctcttgtttattgagtcgacgttggaagtcgccgagacctcgaggttgattctccggtgcttgattctcgaccggcagaccctctagatagaatatgaaggagaatatagcggtcaaaacgatgaaagagaacaaaggaacgcgacaaacaaacctttggctttctctcgagctcttctgtgctcttcgagtcgcttcttagccgtgtccgagagtccaggaccatgggaaggtgtttctgatcctcgctgtcggatgtttgctgctctcggaggtaaagcggggactttgaacatcggggcatctccggtgtccgcctcgtcttcgttctgtctagatcttttgcctctttttgacagttcctccagccgtttctttgcggctgctgcctccttcttctgttctgccagcttgtcaagtccgagtagcgatgcctgtggtgctctaaaggtatgttgaaggccaccctctctgaccaagccaccgacacctctttcctcctctggttccaacatctcacgatcctctcctttggctctctcctcgaaccctgtcactctgagtccttttgtgttttcttgttgagacagatgaacgatgatctctgtatgaagcgcgtcaagggagtctgggggaaacttgccgaacgcggagcatgcccgaccgaacgcggtggaagatgggttagatttggcgatatcgatgactcttcttgcgagcagatcgttgggattagggatgttcaatagtctagaaatcgtgattgcagtgtgatggataaagtcctgatggacccctgctgatggtgggtccatgttgatgatggtggtggtaggttaggtgggtgataggaagtacgaaatgtttgtaatgctttaccaaaaattctctagtctctttttctattcgttcttattgatctccttcgtccctccgctcttcgtcaagtttgacccaatccacatgctcaccatccggtctcgtttcttatactccctacatacatttccggttcgccatacaacacatgctcttcatcgacgttccttccggtgttgtccttcacgctatgcgtcgttcaataagagatcgatagccagcccatcgaaggatgaagacccgtacggtagaatatatgatcctctcgaagttactgaagaacagaccgttaaggcaatcgatttaatcagacaagcttctggggttcgtctcttcttcatgcgctcggtatatggtgggcaggtgctcaaccagagtaatggaaactgacctgccaatcccgcaatatggcaaatttcaacgaaacagccggacgtcgatctcaagtttgcataccttccgttttggtcgattgcttatatctattacggcaaaccgctgttctacactcagtctggaggaggtctcttggcctgggataaaggagaccatccgttcttgctgaccgtcgaggtttcgggtacagatcaggctgatctcgcgttggttctttcctcatacctttcttattctccttgccctgtctaccgattcgtccatccgaactgaacgctgctgtttttgtcttgtggatatagaacacttcaatttccgatctctcctcatgtatatgtaccctccatagcctcctcttcctcttcctcagtgaatctcactgctcagcttccaatcccacaattcacaactccctccagtccgctacaaggggatcatgcagccgcgatcgtcccgttcacgcttggccctccgacagggcggctttcgaagctcgtccatgaaccgttttccagcggcaaagaaaagacattcagactttcatcttcaaccaacattctcaacagtgcctcaaatatgaggggttccacagacgagaggacgaagagaaagggaaaaggaaagggaaaggaaagggagaggagaaatgaacagaccgttggtagggttatggattgggatccggtgtttcctcaaggaggaagtatatcaaggatactacacgactcagtccatgtttgggtgagaacgtttctcacctctttatctgttctttctacgagttgcctttgacatttgcgcttgttgtacgattctcgcttgtctgacaacaggatagagtggcatttccgatcagaaagccggttatcgttgcctccaagacaacaacagaaggcagacagttacctacagccgcggttgacataaatacactccaaatcaaaagggctacgctacgaacccaacgaaattcgactggagaggatgctggaaggatcatctgggatgatgctgtgcgttcttcctttcttcttcacctctggctacaatttgtcgtcgttcttttttgaccctctttgatcactctgggacgggaaacgcaggcaacatcgtttcatcagttcaaaaaaatttctgggctcaagaccgaccaatttacagatgctcaactatccgctaacgttcgggataggctagattggtctagtccgttcatccattcctttcaaccgtaccattccagatcgcttcatgaaccaggcccgtccaacctctctggtgttcgaatcgaattgaccgccaagctaagtcggatcaagataggctcggccgtcggtatcgtcaacgggaatggtagtggagaagtcagagggatagacgacccagatagaatcttgtcgccagaggcgtggacgagagaagtgttgattcggcctcagaggatacgagaaaagcaggatgagaagcaaagactgaaagaggaagcagagctgaatcaagctcgaaggcagagggaagctcagatgaacggaagccgtcctaccacaccatatctcaggacgaatcatcagacaaaacagtctcctaatacacaattcaaggttcgttttcctgtgtttcgagaagacttgctcctccctctttgccatcgcatttacgactgttcttggttttctttgttcttcagaactggggatcgtccgcttcgacggactctcataccccaaatgtcgagatgaagggcatcccggctgtgaagattagatccgactcgttcaaattaaacgattccgataggttctactttcacttagggatttctctgactggtcgggatgccattccgacagatgttgaaatcgaagttgctcataagcaacagatcgagagacaccaccctgatagaggcggacttgcgagtatggcagcgtcgatcaatcaggctagggataacctcaagactggttcgtttttcttttcgccgtctttccttttcactgttcattttttgtttatttcggattgaactcagctgaattgagtttgattggactggaatattttggctggtttgtacccaaatggtgtatgcgcacgaaacagaggaacaaagaagagtttaccaggctagatggatacgaccgttataagtgatgaattataaatgacaagttacacgttatgagttatgaatgacaagttgtacgttataagtcatgatgtgatcagatagcgttccgatctgcctcgccttcttcttcgcttttcatctctctttcatcctccttctattgaccaagacagcgcacagaatagggaacaagacgcaagaaggtgtacacagaagcacgcgcactcgtacgctcgctcgctcatccacaccccacgcgtcaagagcccagaccctgatgacgtgcaggtacgtcatcaaaatcaattacgtaagaccactatatgcgcttcccctcgctcgctcgctcctcgtgcctgagaccgagagatgacaggattcgacatctccctctttaaaaaggccatctctttttttcctcgttggctttctttccctcttctctctttaccacccatcacagagcttctttcgccttctcttcttcctctcaccccatccatccttacatcagctcgcgtttccagttgaggaaaaatgaagttccctctcgccactgtggtatctgtctcgcttctcttgtcttctcaggctgaggcaagttggttcaaaaaagacaaacgtatgtgatttctagatcgtgtaattttcttcttctctttcttgccatctatcctgtatgagttgttgtccggatatgtaaagatgatacagaaaaagaagacgaaagaaaaaaatctactcgccacttttggtcatattttctactagtctgggtcactcactctctccttttctatcaaccaatagccgactacactacctgggactccaataagcttgcagcatatctccaagagaagggtgttaccgcgccgtccacactcacgaggaatgatctgttcgttcattcactttgcttttggaaaaatatcaaaaatgagattgaaaacccgttatcgtagcgtgtgatcgttctcgatgacgtatatgacgtcttaactcgatcgtcatcgccatgtattctaacaatcattgtgctgttctttcgttctcatctcttgtgtctcaacctttttttcagtgtcgcgctcgctaatgacgcatttgacgctgggttgcactacaccggtcggggtgccggcgccgctcaagctgcttttgaggccttgagcgaaaagacttttgacacgtatgtctccttcttctatttatcgggctttcgccacattgacactcaccacacttgcttcttttcactcagttggaccgagtctcagcttcgagagtaccttttggagcaaggcgtcatctcgccttcgactactaaagagaaattgatcgttcttgccaagcagcggtatgtactatgtttatatctgtcttgctccattcgagaaattgatccttaccgatggcattcgacctcaatcccctttgtatatgcagatacaaccaggcttctaccgccatttacggaaacccctaccagcaggccaccaaggccgctgccgctagtgcctcctctgtctctgcctctggatcatctctcaccgatgaggctgctaggaccgccgcttcgctcgcctctgccgcgtctgcctctgcttacagcgcctctggagctgccgcttccattgcttcggaagtatccgcttcggctgtcagtgcctccagcgttgctgctgccagcgcaagctctgcttacgcccaggtcaccgacggtacgcctttctggttgcttgcacagctctctttgtcaagatactgattccgactcatgtacctctccactacaggtgcttctaccggttccaggtccgccacctcagtcgctagtgctgcttctgccggtgtttacaacggtgtctcttccgtttcttctggtgagtagtactggtctgtcgaatttgtctagtctcctttactgaccagtttatcttccggaacaaactaaagctctcgctgccggagccagcgccattatctctgctcctcaggccgctaaggattacatctactctacctgggatgacaacacgtaagctattctctgtactcgcgcacagtactcaaatcaacaaaagcttatcggttcattttgtcacagcctccgagactacctagtcgagaagggtcttatcaagagcaacactgtggccaagcgagacgagctcattgcgctcgctcagcagccctacaaggacggcaaggccgctgtctatgagacctggaacgacaactacattcgaagctggctcgtcgcccacggcgtcatcaagacccctgttcaacaaacccgagactccttgctcagcagcatgaaagagaactacttcagcctcaacgataccgtttggtccacctggactgattctcagatccgagagtggcttgttgaacacggcttcctcaagtccaccgttgaactcacgcgggagaagtacgagcgattgatcggagagaattaccacaaggctgttgactcgtgggctcccagttggaaagactctgagattcgacagtggcttatcgataacaactacgtcaagaccgactacgaggccaagcgagacgatatgattaagcttctcaaagacaagaaggccatcgttacctccaccaactctgaataccttacctggcccgatgcacgactccgagcttacctccgaaacgctggggtcgacgacaccaagtacaccacccgaccttccctcctccaggaggtccgaatccgatacgttcaggcttccaccaaggctgaatctcgttagttatcttacaagttctctctccgtcggctggaagagtcgttgactaactcgttgcttctcgctttgtctgaaagttcttgcctccatccgggagaagttgaacagtggagctgcttacgctgaggacacccttcacggtattcttgatgctcttgccggtgtcacccgaagccccgaggagatctacaacaaggccgtcttgggactcaaccgagctgccagtgccggacaggccgaggcttccaaattgagccgagctgccgtggccagtgcctcatccgcttcgtcagtatacccttgttgaaccttcaatgtgattctctatcaagttggctgactttgcttcccaatcacttttacagtctcgctgctgagtcttcctactcttccctcgtctctgctgctgctagtcagactggttctgccgcctcggctgcgtctgccagcgcctcggcctactcgaagagcgcctacgcctctgcttcttccctctccctcgccgcacagagctccggacacggcttcttgtcgtctggttagtgattacgctatacacctgaacatgccatccttgagtctgaccatccgtctcttttaattcatttttcaaagcctcttccgttgcctcggttgcctccaagtctgcctacagcgtgtactccgttgcccaggcttctgccagcagcgcctcggtggctgcctccaaggagtctgcccgagcttccaagagcgtgaagagcgagctctaaacctgctgtgcttccctttactcctctcttgatttctatctcgcttttctttaatgtctgccctgtctgctccttttcaataagaaggtggtagctggttgagcgtacgtgcgtgtgtgcgtatgtgtgtgagatgtgcaaagttgactatactatttgtttcgttatgtactatcttccctttccaccattgatctctctaccgtttctcaatcctcactggtttttgatatacacatgtagccattgattttcttgatgttttccgctctgtgtggcgtctgtaaggatagggctgtgcttcgcgcaagaccgatgcaacgtcaccttctatctgaaatttggatttgtcgtctaaccatcatcttgaaacacctcgagatgcacaccatggaatctttagaaaacccattagaaagctcgttgagattcccgttctctggttaccttcttcctaacaggctcgtcaaggtgagtcgttgcttcaagtgaaggagacatctctcgactgatcgtctgttcgtgtttgccaggtagctatggccgaatgtctcacggtgttcggagggggaccaccgacggaaggtcatcacaggatatacagatcatgggcacgaggaggttggggtatgatcatttctggtaggtcagtctcttctttcagattcaaatggagacgtagaggaagaatgtcctcaatccgagccctggcctgttctcgtctttctcttttttggatttctcttggggtggaatacatcgtcgaacaggaaacgttcagattgacccagattggctagcaactccatgggatctagctgtacctcgatctcttgatccaacatcctcctctcttgctccctggatatcgtttgtcgattcaatctctcaggccgcttccgacgacgacgacgttgatgacccagactgtccttcggccggcccattggtgatccagctttctcaccctggccgtcagtcccctctctttgcccgccgtaaaccactttcctctcctctcgctccctctccgatacccatctccagcgaaggattgatcaactccatcctcaatactcttctattccggacacctagaaacgacgtatctgacgaagagatcgatgacgttctaagaagattcggacagacagctaggttcttagaagaagcaggggtaaagggagttgagatccatgctgctcacggttatctactcgctcagtttctgtcccctctatcgaacaagcgacctcctagttcgatcttcagtcttcaaccgggtcttggtcccgacgatggagatgatcatgtgagcggcaacggcggtggaggcctggaagtcttgaggagagtgttgaggtatgtgagggagaatacaaaacgagagttcatcgtagggatcaagatgaactgtggagactttgtcgatggcgggctaggtgaggatgaagctattgagcaggtcatagatgtcaggcagatgctcgttcgagtttgcagggaagggaaggaggaaagcaaggaaggatgggattttgtagagctcagtggtgggaattacactaatccaggtgggtctctcgttcttttcaaccattcttctccttctctggtgcctaaaaaagaggtaaagaaagctgaaaactagagagaaaatcctgcttttgaaagttttcgcatcatcctctggtccaaacattccgtttcaatcattctcgacccgtcttctcaagattcaaccttccccatccctccccccacttctcctctcatcatctcttcgttccgttccctcacttctctccgccctgcatcctgctccctctccttcagctcatctcttgggatttgcgagaccctcagtcgcttacccttcgttaccaaagtctcatctcttacgaaaaaggaaggagataagagaattcgagatgcctaatcttgatcacgtctatcgatggtccgatctcttcactctttctttccttaccggcaggctcagtcagcgcaatcacgccatcaacattagtaccgatatcgacagtacatcagacgagagaactccggaggtcaagacgaagaccagaaagaaggattcgtcaggtctgataggtgccggcttggggacggtttggtggacgttccagatcaacagactcgtcaacgaccggccgttcaaaccagatctaggaatatgggaaggagtcctctatcaatttggaccgagcgttgcttctatccggccctcttggtctcgatgggctttcatcgggctcgtcggtttcttagcttggtggctgggtttgacatgattcgatacatggctttttttattaactctctatccaggctcaaagcacgatctcggctcgtccttctctttcttaaggtaccgcacagacctgagttgtgcgcgaaaaagaagaagacaaagaaaaaaacgagagagagggacatgaataaagagggatatcaagaacatgcactagagaacgaaaataaggaccgatggattcctcaagatgaacagatcgaaaagacggtagatgtgtaagatataatgcattggtagagaacccaagatcaagagaaatccgaaaagaggcagaacagcttgaaggcaaaagatgacaagaacgcttaactcttctataacctcctcggcgacggacccaacatacttccttccacctggacgttcagctcagtgagccctctgatccgtttctttaagattgtcttgactctcctgacaactcgatcaacatttgcgtatttcaccgcgttaggctgaagatgacgaactgaagccgcatcggtcggtcggccggggtcggtgtctaaagtctgagcgaggtggatatgaattgagccgaccatcgtggattcatccttaggccagaaccgaggggcaccatatcctgcaagtccttcgaccgaggcgagctatagaaacgaagagagagacatgaggaagggctcgtctagaaaacaaggatgtcgcacaacgtacctcggagagggccagacggatgtctttctcgttctcgctaccagcgtccaagcagagaacctttccactgtcgatcaccagaggcaccacacttgccacgattaatgccgcaatgaacaacgaagcaatagggtcccagccagtccaaccagtgtaaccgatcagaagcgtagaaatgatgactccgacggaacccatcgtgtcggccaagacatgctatcgtatcaagagaagggaaaaagagtaaggaaggctctcgagctaacattgcaagtcgacaaaatagctactcacgagaaacacaccccgcatgttatgactgtgtccttggtcgttctgtataggatgacagttcgagttaagacgaatgccctgaatctgaaagagagaatttgaaaccacataccgaagcgtaatcgccgtcgtcattgtcatgatcatcatgctgtagattcacacagataacaatagaccgatggcacgtcagtcggatctaaacaactcatcagtcttattatccacttacgtcacaaccagcctgattatcgaatcatttttgcagtaaagaaaacgaatgtttagttttgtttttctttattcggtacttgaaggaacgatcacatgaataatttaccgagtgagaatgtccattatgcgagactggagatggagcagaaggagccgaatgagaatggccatgatggtcatcgtggtggtcctggtggtcatgtgcctgggggagagggaagcgaagaaaaaggtaaggtctttgtacaaacgcgacaagtaggctatgcattgattacccacagaaacttcatgtccatgactgtgtccgttgtggtcaaccttgttcgtcaatcaagaacaaattcaaagtgaattagtaaagttgtagatataatcgctgatcaagacgaccaagacctacgtgctggtcaacaggtgcggcatgagaatgagaatgagcgtgcgcattcatagtcgggggtgggggaggagcagctttgggtttaggcgtcggaccgtgcgaatgtccacctccgtgcgagtgctgtcgttccatggttcaaagttttgtttcagtttccaaaagggtcgtagagagccattagtaaataacagggttgaaaagtggtgtgtatttacagaagcgaagcactgatagaaagacttaccccatgatgggcatgacctcccgtcgcaaacattccaaacaggttgattgctagtccgatggaactgacaagcagcaatcgactggtgttcatctccgggggttcggcactatcaaaagaaaggagactttcatgtgttaattcactatcagcaggaaaccagcgaggaacaaaaacgcacattctctggatagcctcgaatacgatgaagatagaaatcaagatcaagaaaataccattggcaaaaccagacaaggtctcgactcggccgtatcttgagtatataattttgaaatccatcgcttatcagtgtctggtatccatgagaagataggacaaattaacatacccataagtgaactctccgttgggtttccagctagccatgacagatgcgaacagtccaactccgagcgccatgcagtcgaagaacatgtggatagctattcagaagcagtaaagtcgaagatcaattgagctggtctccaaagcggagaaaagatggacgtgaccaggatgtaaggcctatcagctcaccatcacttattagacccaaactgttggtccacacgccccaaatcatttgaacgagcatgtatcccagattgagcaacaagaaccaccagatccgccttgattcgggattgtcgaggatcactttaaggtatgtcttggcgagccggtacgtaggagatgtagttgaagatgtggtggaggagagggaagaggacgaggaaagcgaggtatggttcagaggtgagaacgtttgaggcatcgggagaagttggtatggagtgagatagatggctgaatgtcaaacaaacagtatcctgattgagcatctgtgttccaagagacaaaatgactggaatagagacgaaccaagccatacgcctactcccaatccaacttcactccagcttccgcggacgccatgaaacagccacccaacagccgctgccactttgatcatcaagaggaaggctgtgcccgcttttggcagactagcgttggcagccttgttgaggttcagaatcgaagggggtgatagaagaggctggatgactacaagggcgtaagccatcttctgaagagctggccaagtcgtgggaagacttgacgaattctgagaaggttagtcgtcatgagtcagctgactgggttggtttctagacacagcgaggattgctacttacaaggagggactcgaatccaaagataattgctgccacacacatagcccacgatcggatccgaccaacttcatccttaatctctcctttaattcctcctccgtttttgatactcatcaaaagcttatcttccaagacctctttcaagttccccgttgatatataaagcacaatagagaggtgcgcaaatagagaactcaaaaaagctatcgagcgaaaacggaaaagaaaaatgaagggaaatagatgaaagacaaaagagagacgtgtgagacatgaggtagatttgatattgcgcgatggcgaagaacacgtacaagaattaacgctgattgacatgagaattgaagcgacaaaagtgattgccagagtcactgttcctatgagctgtgaacaccgtcaatgacccgaagattagctgactgcttgcgccgagagtatccggaggcgcaacactgcgacccatcttggaacaagttgtacaatattgagtgaaagtatgcataccgccgactttccaaatgtataactgacagcccatatactgggaagcaatgtgaagattaatactctggagaattagaaagccgcagatggcgaggaaggaagaaaacgaatagaactttagcctaattcgagccatggcgacgacaatgatggaaaaacaaaccgaataacaggtagaacacttaaagcccagtagaaggaatattgatggaaagcaaagaggattatatacaatccgaataacggagactatatattgtgatttagaactaggcgagatgagcattgattcaaagaaacgagaacaaacaaaacagaacaaaacaaaatgaatgcaatgtggtcttaccaagatatcgtccagtcctttgcgtcttgctttgagcaaccctaccaaaccacatatacccattccacccgacagaaccaaagtcgttccgacgttttctattccccaagattttacggcatagcaagcgaatgctcgagtgagcgtgctcactaaaacgatcagtgttggttcagacttgagggatgctattgtgggtagaccgggtgatcgatgggagagtgtcgagaacggagtggaagggagagagtggaaggaatgaatcttggactgggaccgacgatgagaggaaggaatcgacgacatttttgttaggatatgaaacaggaaataagagagtgcagcagatgattcggatgtgcgcgaagagaagaggagggccaatcaatggtcggtcgttccggagaaggtccgaaggagcttcctgctttatctatcgtcttaagtcctttctttctttttctagagcaagtggttatggtagagtgcgaaaacagatgatctgatcgaatgtggagacaggcaaggatcagaacaaacgagggaacggcactgagtctccagatgtatgctacgcctatcggtcagatcaataagtttgggctaaatgtatgaagaacctacttacaaggatgccgtgccgtcttgatggcaatgagactctccagatgtccgaccgttctttccagagaacaaggccgagtagaaagaagcaaaggcgaaggagagggtgcgtgtgaaggtgagagtagaaccaagagagacaacacaagagaccgacgataggatgggagaggaaaacgagaggcacgagatggattctaggaacaggattaggaacacgggaggatcgaccggtgtggttacgaattgattacatttgcgaattcacacgtgctaaattgccgccacatgctgtgcttgctttgaaaatcagagaatctatctgttcaccaaaaaattcccattcccactcttgagcagtcagccagccttcctagacgttgaacttgacctcgcactctctcggactcacagacattctacactatggcgctctcttccctcaaacccgctcttatctctagaagctctcttccggccaaccctccaagaaagaaggaagttgtgccctccaaggtgtcgaccgcccaggccaccaaggctgtaaacgctctctttgcccacgccgagaaggagcgagtcaagaaggaatccactcagcttctatccaaggatgagtttgtctggcttgtcatcgccaccaagaagatttctcctgaaaaacgagtgaagcctatcaagatgtgagtcacattctctttctctttctcttaatttaccaatcaccatattgaccagatatacatatcactcgtcttcttcctttcaccctcggtagccaacttcctactcctctcctcgatcctcgatacacttcgatctgcctcttctctaaggatcctcagagagagtacaaggaccttctcgagacctcgtccatcaaattcattgaccgagtcgtcggaatggagaagctcaaaggcaagtttaagccgtacgaggctcgaaggcagttggttaacgagcacggcatgttcttgtgtgacgagcgaatcgttacatttttgcccaaattgctcggaaagtactggttggatgccaagaagtacgcgtctcattgtgttttcttgatcttattcacacggcttgacgctgatcatgttctttttggacacactctctaggcagcccatccctgtgtgcatgactcgaaaagacctcaagggtgagctggagcgagcagtctcgtcgacctaccttcacctctcccagggtacctgcacgtgagtatctcgtctagtccttctcttcggtcgctcaacccggctaagctgaactcttctaaccttgacgtgtcgttggttataatcttttcctctcctcacagctccgtcaagattgcccttctttcttcttccaactctagcaccagcccacacactcctgctcaggcgctcgccaacttgatcgcggcgatccctcacataatagctaatattcctggcggatggtccaatatccaatcgctcaacatcaagacttctacctcgatctctctccctctttggacgtgtccacttggaagcggtgagggaggaaggttcgaaaacatggctggtgtcctgctttctgacgatgaggaggaaaccgaggatgttgagattgggagtgctcttaagccggaggaggtcgaaaaaatgttgaaggaggagaagcagaacaggaagaatgagggtaagaagcgagctgcttctgaggagaagatttctgaagaagttaaggagaagaagatcaaggcgtctcctgccaagaagactgctgccccaaagacagaggcacctgtcgaggtcaagattgtggccgctcctgttgaagttgtgaagaagtcggctgtcagcaagaaggccaagcccactcaggttgagaagaaggtcatcagctcggcttccgcaggtgtcaagggtaaagagagcgtggtcggaaagaagggtggcaagaagggtggaaagaagtaatagagaatgaagaaaccgatcgatgatactcaggattctttgtcactacattcaccctattttttcactcgcattcttctcgcactctctctctctgtctttctctttctcttttcattttgtaaaacgttgttcttacagttttgacttctgggacccgatcgcctccgcgctgctctatcttggtttttctcctttacacttcccttcctcctgtcgtctttgtctctatctattctaaaaacgtcacttctagtcaatctgactgatgctctgtgactagtcgaggtcctggtagttatgtctacatgtctttatgctctgcattctgtgttgtctcactagtttcccgaacagattgggagagaggccagcaatgtgcttacataagacatatttcacggcatcttctccttcatactcgtcatttcatcagttcgcacatcaactttgatactctcattctcaaatcaacagcatttttcgccctctatctatcttgcgctctctcgccgcttctctcaacacagttacaagaaccagatcataattatgtgccgaatgacgaagatttccaacacgcttatggctgaggccgagctcaggttcgttctcgagaacaaacgagatttcttgccaatatatcgcagagtttctcttgaaaccaaaactgaaagcactgtctctgtccttaacttcacgtagcgatatgggtaataagcacggttcgatctttccctatttcttggaattttagtacttgtatctttgtgtactaaccgtctttctcggtcgatgtaggagccgctctcgtcaaaggaggaaagatcatttttcaaaatcacaatcagcagagaacatacttccagaataagtctcatcgttcgtccttctaacgctatgatttccactcctttcttagtaatatacctttactaattcagtaaaaaggttctttctgcccgaacgtgtatgacaacactaccgactgaattcagaatctatgcatgctgaaatggccgttagtgagtgccgggccattcactgtacctcacttatcgtttatcagagactaggatggcgctaacttttactactcgattttcaagtttctcaagcattcgctgcttcaaacattcatcgagttcctatcggtcgatcgacctctcgtgtgacggtcaacaagaaatcaggtgtttatattcccggtccttctgttcttaccataccctcgacgcctcctccaagccttgagcccacgacgacgaatataaagtcgggaggaagaacgcccggatcccgaactggcctcactgacagtcctcagtggggcgtttcagcaggcacctgttctgatgagtggatcgatggtgacaacgtctatgaggaaaaagagacaacatcaacatcaaaatcaacatcaaaatcaacatcaaaatcaacatcaacatcaatatcaacaccaagatcaacatcaacatcaacatcaacagcatcacgatcacgatcacgaccgtcaccaaccactttgcccatcctcttgcaggcgtttagccacgtcttctcaaagatctccgtctgcctcctctcttccaagatcgagcttgtcagtatatgagagacagcctggagaggacaaagagaagatagtgaagagtgggaggaacgatttggacagacacgtgaaggcactggatatattggttgaggagatgagagaatttatagaacggctcagccccaggttcgtcctcgatgcgcgagcagctgctatttctttcgaacgatgaaacgttgcctactctactttctctagcctgcctaacagtttgtggtttcttgcacaaacagcctgaacaagggaactaagaataaagcactcgacaagtcgtcgtctgtctcgcctaggcgtagaccaaagttgaggttgatccagggggcagacctctgggtatgtagaataaaaaaagaaggcgtactcgcttcttctaagccatgttttagatgtctggagtggatcatcaagtgtgtccgtcgtcttacttatcttcttctctcaagctcgcttgataagaacacgaactaaacatttacgccctcctttccgcacaacagagcgggtatcaagcgagtgttctttacggaatcgaatgaaaacggagatattgtctggatgagccagtccagttcgtgtcttcctcgtacctcacttctcccctatctgacgagagttctcaagtcacagtcaaacaaaatccgctgaaagctgaatgtatttgcttactttcacttgaacggattctggcgacagctcgcagtttgtttgcagatgttgagaaaagtctgaaacaacgtgagcttttgctatttcatcagtctgcgtctctttcctctttcattgagttggaagtctgaacgaactcctcctcttaaaatctttcgttattgaattatcgtagtctccgaagaaaagacctgcgcatgattaagggaacagtggtctttaaatactgccgcctttagtggaatttctgccgcccatcagaaggaatgggcgaggaaatatagattgttctgataacatggttcttttcttcaggtccatcagtatcatgatgatcgtccctccttcagcgaggagaagtacaacgtcagaaaacattaattgaacacagaaagcctaataatctacaaatcacttattctcgcctcgatcgcttcacctgtgcatcgacctctgcctctccgtcttcgtcgggatctgcttctgcatatgattttacatctcctcgagatgggtttttcctcttgattgaaggtaatggcgccaggctacctttgttccggttcgtcgaaggcggtggtgatgaaggtggtggggtcaggtcatcattggatgataccaagtcgatcgattccgattcacccataggctcaggttcatgtttcggtttcggtttgaaaaacgaggttatgctcttgctcgtcttggccctttctagtttcgtcttggaattcggatccgctgtcgattttttcgctcctgacttaatcctaggctttggtctttcctttcctttgcctccgttcaacaacttccaacagttctttccgcccgttgccatgcttagtccttctacttcatccttcccttcgacccattttgcacgatccattaggtcctgaggtcgtctgtcgtatttgtctcctgcacctaagatctgggacggtggaggagtgagtatcaggtgggatacatgatacgtcatgcttatatgtgagaactgatgaaagactgtatctagcctgacgaggttcttaaccactggtctgtcggacgatcgaagtgaaggaaacagataggaaagaatggttgtcggatctggtgaaggatcggttgacgagtgaggaaaagaggggaattcatataagcctgctaggagacctgatgtagagttcgagaaaaacgcgttcaagaagcgatgatgagcacgcaaagatggaacaggttcaaaagagaattgaagcaactcacctttttctggtcgtttgacaaccaaccaacttgattgttcgatagtctcactcacgcccaggccggaagactcatcctcctcaagttgatattcgactataaatacgtcctctgattcttctctcgctttctttttgatagctttcatcggaaacactgtgggatccagaccagtagcattcgttgagtttgtgtctatctttggagggaggggaacgcagatctggcacaagtcctcaatgtcctcaggtatgggcggaggtattcctgagttcatctacctcgagtgaatgttcgttggtcaagaggaggatgaatgggttaagaatacgggtggtcagaacgagaaagttgaaggaatgtgcgcaaactgattttgatggctataaatgttggcatagagcggacagacctcagcgttagctcgacaagagttcgctagcggacattctccgcactttgcttccgtaggtctacaaattctagctccaagctaagagggaccaagagcaaagaaaaagtcttacagtgaatgagcaaaatgatgtggaagcaaagacgcgggcaagaggagaggagacgagagaccaacctccatgagtgcctcgttccaatcacccggccggtctgaaggaacgagttctgccgccttttcccagagcgtactaacaagcggcttccctgttggattcgaatggatacccagcaatctagtgagcactctatgaacgttaccatccacgagcggtgttttaactccataggcgatgctcgatatcgccccagccgtgtatggaccaattcccggaatgtctttctcgagaatctgaggacttgatgggaggtggccactgtagtcggccataactttttgagcagcagaaagcaaccgagttgctctagagtagtagcccagaccggtccagagtgcatgaacctcttcagtcgtaccctgagaaagcgcatgaatcgtagggaactagaatagagagtgggagtttataaacgataaaggacgtcaaggacactgatatgtacagtcaaagaagcagacaggacgaaccttgaggatccatcgattaaagtacgggatcactgttgtcacctgggtctgttggagcatgacttcagagatcataacctaagtatccaatcaacagcgtgggaaagtccagttaatcggcatggtacacctacacatctttccacccatgcaccccatgaatacatgtatcagacagagaacgaacggtcaccaacctcgtaggcccattgtgccagctgatccctcgataactttgctctcatctgcttgaatgactctccctcggccggacgccgacgccatggcatcaaccggtcgtgacggacggtggagaaccactcaagaaaggctgctcggtcggagatgaacgcagtagcatgatagcctgcagaatgtggcctctggagagattgcattccaagaactgcgtttcggtatgcagcacacaggagaaatcgatggttgatgctatgttgaacgaagatctctattcctcacaaaaacgcgtccgatcttgtagtctctcaggacgcgttttcgtaatgaacgcgattcgaacgtaaccctaacattcaccgcctgtactgctcacttctccatcgctctagccgtctctcactcccaccgttaccgttccagtgccaaccttgttttatctgatggcatcactcacggcgtcgcaacaggtaggagagatcctcaagtcgtgagttgtgtttcatctcttgctacgtgcttccggtctagaacaggattgacgtcctctcctctttcactctacttcggctcagcccggacgacttgacaaaactcccttcacttcgtaaacgacttgataaggagaatgtcaccgtccaggcacagttatcgaatgctgtgagagatcagctggcagccaccagggatggcctccgaagactagtggaggccagagaggctgtagacagagttgagagagagatcagagcggtcgaacggttggtactcgatgatggacatggccagactggagacggaaagaccggaattgcagagtttcgaaagattagtcgagtaagcaaccgaagaaaggcgtctcttcagtattcaaagtatttactgatgctctcggcaagctcatgccatatctttcaataggtctcgttcattcatcgaaaccttgcacaaacaacatcgatggttcagtcgtttcaagagatctccgaaaaggtctctgtagtatcctctctcctggcgtccgacatcgaggctggcgtgtacaactctcaacacaatctattaatcgttcattatcagctgatcgagctagagcagtttaagaacgagacaatccaccaggcaaagaagacccaatccgaccggacacttgatgaagtacaagcatacttccagaacctcgatcaggtgcttagtgttttcgagcagcatttatgggagatggtcgagagcataatcgatatcgtcagacagggcagaacggatactgtcgtcaagattctcaagattgtagaggcagagggaagggaggatgagaaggtttgtctcttgccttcttagtcctctttttactcttctcctccgctcagcatattaggacggaagtgaagaatagcacgactgacaggaagcgcctttctgttcgaataggcagctgctatgaagttgatcaaacgagcaaagggagatgtggccgctcgattcaagtaaatgaccttttactacctctcaatcttcatcattcgcacatcagactaagtctcttttccctcttatttttttcatcagatcgatgcaagccgaagctcgccaattcaaacactaccgacaaaaacttctagccaccttgcgccaatccatctcaaatagctttgacgaagccttcaaacaggcgtcagacgacccaagcacttttatcgagaatcttggctgggtgtaccaggatctgatccggatcgaatccgatgtagtcagctgtttccccccggattataacatctacgcattcttcgtcaagcagtatcatatcaatttggatgcccgtctgcggaccatcgtggcatctgcgccagacgctagcgtacttctccagttacacgcctgggtcaaagaatacaaggtgtctatgaagcaacttgagattgatccagattggacggaccctccgttgttggatggcaaggagcaggagcttatcgatgattacgtcggtgttatcgtccgaaagatggacgaatggacggcgaacctgatgagggacgaagaacaggatttcatccgaagagaacaaccaccagaggtagaagaaggaggcgcatacgctctccaaggagcggtcatcatgttccagatggtcaaccagcagatcgatcttgctgctgactccggtcaagcagctgttcttgccagagttgtcaccgaagctgtcagagtgatgagatcgactcagctccgctttttgaccctcgtccaagccgagatcaagaaaaatgtcgaacgaccagaggaatcgccacccggactagttgaatacgtcatggctctcgcaaatgaccaaatcaaatcggcagacttcgcagacgcactctccgccaggttggaaccaatcgtatcggataagtataagcaggtgatcgttggtaaagtgagcgaggcaatcgatggatatctagatatcgcgaaacattgctctcaggcgctactcgatatgatctttcacgatctgcgttcagtcaccaaattattcttcgcacctgaatggtataacaatgctgaacgaccgatgccggctgtagttgaaacgctgcgggactacctgtccgactatcaggaacatctcaactcatcgatattcgatctcttgttgaacgatcttgttgaaacattccttgttctttacctatctgcccttcgacggacgacaaaattcaaactaccggcagcgatcgaacatatcagggatgacataggggacgtgatcggtgtgtttgcagagtttaaaccgagggaggaactagaggtttctttcgaattgatcgagatggtcctgcaaatgctagacgccgggaaagaaatgttcttcttagattattggtcgttcgcaaaggtccatggtccgaacttgtcttttgtcgaggctctcttgaaggctaggtacgcgtccggatgtttccgctttcgaaggagttgaataaactaacttacgttttctgacgatttctgtagagacaacctggaccgatcatctgtgaacgagatcatggagaaaatccgtaagaaggtcaaggaggaaggcttagaagaacgtacgtctcatctctcccgatggtttatctagatatggaacaaagaaaatgaacggaagatgccgacacgtactttgtctccttttttttcttcgttcgctcggtgaattatagcgcaagaacgaacagtaatgaacaagattgcagagataaaaggggagagtatatttgccagctttggattcggaaacctatctaccaaagttcttttgtcataggtttctccttctcttcatccttacgaatagtcttcttggccgtgtttctttcttcactcgcatttgatattactctgcatacccaaacacaattgctcacacttgtctgtattagaccattctaagctatgtattctattacgtttatccatctctcacgcatagatttgtttctatttgaattgcaattctctctatgcccgactttcaatgagctgaaaccgcgctgtacactaaagagaaaaacatatttaatcatcctctccttcagcttctctaatctctctctcgagccgttccctctcagcctgcctcatcctcaacagtgtcgcattttcataatccacgcttccttttgcatcaggtggtgatattccagaagatggaatgaatgcttctgctggatcaaacccgaacgatggcattgtagatggtcgagcaggtgcaggcgcaggcgtataagcaaaagtggatggatatgtctgtcccagttcggttcgtggttccgcagacgactcgtccactaccttcagtctatcagtatcggttttgccattcgatgatgataacaaggatgaacctaaacgttcgacccaatccggctcttgaccaagaccccatttgatcttgatgccttccagtcttgccgtcctctttctcttaccgtcctccatcagcgcccaacagccagctaaattatccgacggaaacacaaccatcgctgtaacctgctccgacggttcggaagaagtaagtgttgctgatgatttggacgatttagatgatttcttggctattcttggaggacgaagaacgacattggcgagggaaccatacgattcagagagaaacgccgataaagcagaaggagagcttgttgatgatgcatattgtggaagtggaaacgtcagcgtgagagttcgctcaatctcatcgacttgttttcctcccctcgaagatgaatgagtgaaatccgctcttgattttcctttcgccctttcactttccctatcgagtcgcgttctttcagcctctgtctctcgtcggagccgaagagtgtcgtctagagctgctaatcgagctgcctctgctgcctctcggagttttcgaccttccgattggactgaggcttcctgagctttttgacgtgattgagcggcaagatctagacgggatcgtttgaaagcttcttctttggcgacaaggtcctgtacatcgggatgtatgctgccatcagtatcgcagctggatgatctgagcagctctaagggagagaaatcgcaagtgaagaacggacctggaccatgtttcttttacgagactcaagaccagccatcttctcggcccgtttacgggtagcctcaagcttaacatcgagtgcagctcgtttcggcccgtcgagaaggagtgcttgggcgagagaaagcaggtggaactgatgcgctacatatcgaaaaggatacatagatcgtcagacatgatatctataacggtattaagaaaatatatacacaccagcctctggattatcagggttctgacatcattccatgaccacacacatcgaccgtgaaggcgaaacagtcagattagcgaccacacatggttggaagtaaaggaaacgtaaagaggaatggaacccactctatcgggatggcatttcaaactcttttttctgtaggcggacttgatgtctttctctgtggctgtatgactaagttcgagttggacatatgggttgaggtttgcttcgtcgtccatgttgtcgagaggatgtgtactagccaatggtgttggttactgaggaggaatcgaaataaagattgtaatgtctaatcaagttctttaatcagcgattacaaaatatgtgtagtttccctgttgatctacctaacttgtcgttcacaccatgtcgtccatctcatctggcctgccatcaaccatgccatccacatattctcaagactctaaattaacaaggatcacatccaccgagagtgatcaaaccaacttttcctcagagttcacagatgctgtcagttgtcgtcttgatcagtgtcttgctcgagaaacccttctttcactgattccgaccgatccgttataacatgttcttccagcctatgctttatgatctggtccctccacctccgcctagcgcttcactgttatcaacatcaaggtctacgccgggtcatgtggaaatcagaattgtagataatactgtgaacgaacgactgcccttcgctcaatcagtgtctattccgtcgtataatatcgtcggacagactaagaacccagtacgaggaaagtcagggactgaatcacccgttggatcggcagaatgctgggtagtatacgagattgagatcagatcgattcgaggaggggttgtggttagagagtcaaaacgatattccgagttctgtgagctgagagaaagtctgaaacagcggttcccggtgagtttgatcatttacttgttaagaatgattcttactgaaacttgagattccatcgcttgatcgaaaatgatggattcagcatctgagagggacaatccccaagctaccctccaaatctcctcttcgttcgtgtctctcttaattcgtaccaatatgagctatcaagttgacctaatcatatttgttgacatcttcctactttgtagataagttcaaaccgtcattcttggagacgagacgtctgagattgcaagaatggctctcggttatccttcttcattccgtacgtgaaagttcttctcgtcctctaaacaatcctccgcgcgtctttgccctattaaacatgtcatttctttctctggacggagtaggaaatgggatcatcggatcttatcagagattggctcctatctacttgaactctcctggtctcagctcgacggagtgaagatgctaaacaggaaaatcttcgaacttctccatcgagacctttcacgaccttccctctccttcggaccttaacccgtcttcatcccgttcatcagccgttccaagcgaggtttcaatgttcgaccaggagatccaccttctatcggtaaaataaactctgcagtacttggcatcaagggaaagtctagacccagcgcccatcggcgtcacgattggtctggtccatctacaaataaaaggagagttgacaagcagagatgggccgaaggatttagaggggttttcgcgtagtcttgctgtattgcaggcatacaaaaccaaaagcagaacacagatgtgtgtatgttcgaagacggtgatagccagagagaggagagtcagagactggcgagggaacggtagttgatagattctaagaacgtatctgataaatggaagatagatgaatgtcttatcggtataataagactcaactaagaatgctcgatcagctccctctgcaaacgcattgacactctccattgttcttgcctatctacctgtgaaaacgaatagacacgctaacacaggctgtctacatttatgaattacgtaatattcagaaaaattgttttatcttttcagttttatattttctatctgaccgataaaatcagcaactcctcgaccttttgctctccaaccatcagcggataacatgtcctctagctctacacccgcacctaccgcctcatcgtcatcgtcggcgtctacagagactcttgctctcggacactcttccggaggacgagtctctggaaagttctggaaagctagtagggctcctactgtgtttgtcctcatacttccattccttcttccagtttagtatagttgaagtggcacatcgagctgactcttccttcttttctgttgtttgcttttcggaatatgaatacacatttttttaaatcaatgctactgctcgcttctatctggttaatcggtcaaactatccagtcgatcaatgatgcctgcaggcgtcaagtccgcttcatgggaggctagacaagaaaagcgaaagaaggacgaggcaatcaaattgttgcagaaccagttgaaggaggagcgagaggctgaggaggaaaggttcgttctcttgttctccatccttctatcctttgttctttctatcatgtgtgtctgtattatttcaactcaccctttatctctatataaacccaccttcggtcgaccaaaataggaaaagaaccgccatcaaggataggcgaactagactggaggagaagaagcgattggaggagatggcagccagaatgagtgctaagaagcttcagaggatgaagaaggttcgttcttgatgtctcatctatctgtcaagattcaaaggtctattcgatgctgacaggttttcattcccttttttgtgccgctatagagactcggccgatccaagaaggtcaatggttaaatcttcaaaatctcgatcctcaacgtctcttcttactcgttcttctctccagttccaagattcgccctatagcacatcacatatacatcttctttcttatcttcctttttttggtagcttcttgttcgtttttagacattcttgcatgtacatctactctttgccaatctaatggaatctcaacaccatccagcttaaactctttactcccttattcgttctttcagaataaggcaggaacaagtcagatgaaagggcacgttaattcatatcaaaaagataccaatattaacaatgtaagcatttccacgagcagaacgatcgcaatttccaaggatgggtggattgccgtatacattcgaagaagggaatgaatgagagaaagaacgtcaaaatgatgtgaacaaactcgaagaaacgagagcggggcacagaaccaattcgattagagctaaatgtatgtatcgatacacatgcacgagtcaaatatatagacggaagaaaacgagaagagacacaaagcgagcgcgaatgaaagagagttgtgggtcatggactgttctacgtccaagaaggagcaggggcactaatcggatatctgtttgatcccaaacaaccagaaaggtaagagactaatcagcaaacttttcaaaccagctgacgtggaatattaaaagcaaaaattccgagagcgcaccctttggtctctccatcaccttgtttgatttcgacccgaatatcaaaccggagtgaactatcttcatggatgtagtctactatcgtccagtctaatgatcccgcaaaaacgtataccataaaatacaaagaaagagaaaaaagttaaactcagagctggaagcctacacgtacaggaatgaaaggagcttgagacatacttcgcttagccatgatctgaggatgcttcatctttgactcatcagtgtccaactcgaagaggggaaccatagtctcgtcagtgttagcatctttgataggtgaaaacaaatgaaacagaatcaggaatagatcagtaactttagttttattgggtcagcaagaacggaaatggcagttactcacagtctatatatggattaacgatgataggaaggattccgttcgtttatttcaaaagccaggttttgtcactactttctttcttcctttcttcgagacgagcagagagaggaagagagaaattgttacgaacgcaaggtcttgtgtctcttgcctcccaacctggagatcatcgctccaaccatcgccggtggaggcgtgttcacaatggccgacgtgacgacctgcaacatccactttgggtcctgttcggccgggatcggatcatgcttatggtggggaaccgtatggaatgtcgtggctgacgcacaatggacgtctccagagacaaaactgattcgaagccgttgttcgactgagattcgttgacattgctcgaccagccaatttcgctcatgctttcgagctagagtatgtgtgcgcgcaagcgtcaggtcagttttcgagagagacaatgacgattatagggtaagaaggtagacgaagaaacgaacagctcgcggtccagtgatcgttgcaatcgtccaaaagctcggcttcctcattgaatctggttgattctcacatgagaatagagtcagtgatatgtgacaattttgcatatacaagcaagggctgtagcggtcgacgtacttgttgacaaatcctggaaccagtccaaccttactcaacttaacgagcgggttgagctttgactctaggactttttccacaaagttcattcgggctgtacacggccaatttagatcacgtaccaggttcaacgcacaatagaaatcagtatttttcaaatgcatatcttcacaaagaagcaaagcgaacgatatgaggaacatacgataagcgatagggattcctaattggaatacgaggtgctttacttggttcggaagctgcttgatcgcgttgaacactcggtcgtatgtaagcttactgcagactacgtctttctttcgctcagctctatatcgatcaatgtaagaacatgagacttctataagcaacgatggattcattcagacattgaggggaaattttatggagctgaacggaccggcaatccaagagaagcatgtaaacttcaggtcccaggtatattagcatcgaactagggaaaacaacaaaagatcattggcgacagcgcagagaaagagaaagaaatgatagactactaactggccaggagagggaatccaaggactgtgcaaaaagattggatatgaaaccatcaatacgagatcaaaccaacactttgcaagacttgtcttgtgtagatcgatagcaaagactcacccatctcctccgataatcatactcgccatcgtatgaggcttatctaatgacgtcccatcgaaatcgtctgatagatatgggtacgtaaaaagagataagatcagtctaatcgtatagagattttggggttgaagacacaaaatacgtaccgacgatgaaaagctggaaaagaaggtaccagaagtaccctctgcttccaatgtgtttgaacactggagcttgttgaagatcatccgggtatgatccgaaaccatcaatcctgtgagggtgacaagggcttatgagtaatttgaaagaaggcaagattaataagggtagaggtgactcacaggtcgtggtcgtcaagacactggtgatgatcaggcattgttatcgcgcatacatccaaagttgaacgaggattttagaattgactcagaagtgatagtgattgaatatgagctatgcaagacaaaggcactaacgttgaccctacaccattaaatcccataagaagaaataggcttgagtttctatataagaatcctgcaggcgatgaaacggagaaaaagacaaacattgggatactggcgttcgcaagtccaaacttgccggttcggaagatcttgcagtagtgcgagaaataataccgatcgatgcagaacatgatatcattcgagagagggaagtcctttctcttctcaggcgtgccacactcgagccaatctgaaatggggcaaagtcaaaggaatgaatggtttatgaaagaccatcgaaggacgatagagcaaaaatcaaacgaaccttgcatctcaggctcgaacatcaatgagtcgcctgattaatgtcgaagcagagaacaccactcattcagttagccacaagtgatttcaagattctaaaaggagggaagaaagacgacaaacgaacagtagatctgatcaccacctccaacctatgatagagagccaaggagtacaaatatgagcgtgatatctattcctactaaggaaagatacgaaccatgcagtgaatcggcttttccgcgtgtttttccaacatgtctgcccatagagggtcgtatccattgtcgaacttgtctggattaaagaactgattaacgattcaaccaagaggaaaggggtatcagccgtttagaagccaagctgacgaacacgatcggaagacgcaaaagacgactgacgtcttcagttttgacacctccagagaatccattgcagctgtgcgccgcccatctgagattctcccctagaccagggatccaaaagttgagttcgacacctccattgacacggtagtcgattctagtcgagaccgtttgggtgatcggaattcgaatttggaatcgggtgaatgtgaaggagccctgatgatgtaatttacattgatatgaaagaagacgatcaagttccgtccataacgatacaaggagacaagttggtcggaaacagtgaggaaagaatgaaaagtgcgaacctgaggaccgtgataaacaaagatattctctccgacgatctttcggtcttgccttccgttgctcccctggggagtagctgcatatccgtttccattgacatccaacttttccattcctgcgttcactccgtcaacacccgtctcgatactatgtccgttctgaccgtttccgctcgttgtctggctggatgtccaggacaggctgagggaaggcatcggttcgtaaactgaccctgcgtcagcagtgaccttggttacgtgagaagaatgaagcgcattcaggtgaacaaccatccaataagagacaccggataggctctagagaacaagcagacgtactatcatggcagctccatgccagatcgaatctttaactgtgtggtacgtcaacatctaagaatccaattgtcccgagcaagtgaatcaagcgttagcgctcagggtcagtctagacgaatagacacaaaggtatgaacagatgaggagagcatcgtaccggtccagccataaactgtaaatgaggactcattctctctcgcacagaatgatgtctatcgcccatgctaggcctcagtgtgttctttgagtcttctagcgaatcttcctttccagtctgagcatccagtttgggctgagcaaccgtaggtcccgcgtgagactgtacactctgagcctccgcgtggaggttggtcggaccagggatcgtctcggctggtctgtagacgagtagggttaagaaggatgaccaggttagaccttgagaatagcgggagaggcatctggacgaaacattactcacacccacacaggaggtcggtaggaatgaactgttggatattacaaggcacagccgtccgaaaacgaaacacacaattaagacgacgcgtctgtttcggggtatcgagaagaaagacgcgtagagagaccaagaagaagagaaggaaactgaacgcgtaccctcataaccgttggccgaaatctctggaatgacaaccgattccttgacatgagcaggagccaaggtactgtcctcggtgggtgttggctgataagcttcgttcaaaggatcgaccgtttcgactccgtgagattgggaggaactaggatgggcactattggagtatgttcataagtgaacgcgaaaattgtctccaagataaagcaagaatgtgtacgaactaataggcagcttgctgttggatgaatcgatcgagaaagaaggaaggaagaaggatcagctatcgaacgcacagcgtggcacacgcattgggagtgttcggacggaccctttcgtttcgccatttcgctcggattcctaaacaagctcaatggatggatgtaagcatcacgtgggttagcgcgacgaacaaatccacttaccaggatcgtccatgttaagatgtaagtgagtgtttggaagggaaattattcggatgccagacgatcattctcaaagtcttctcaaccttttttcgccaagagttttttttgctgctataattgcgcggtggatattctctatcaggctgtttgacttcattgatatagaaagctagtatacaacatccgtttcgttcttgtgcatctgcgctcctatgtttgcttgttcacacgcccacaactcatagaccagtccagacaatcgttctctctaactcagtcgttcccttcagcgtgggttttgtggagtttcctcccactctaatctcaaattctccttgttctgcggcccagtgatgtttctgatcgtcccaatatccaagcgcctccctctcgagcgtcaaagtgacctcgattgattgtccaggcttcagagagatttttgtaaatcccttgagttccttttccggtcgaggtagcgaactcttccggtcagacacgtacacctgagcgatttcgcgcatcgctacgttgccggcatttcgcacggtgaaggatacatcgaacgttccgtccgatccaatctttgacggaagagagagagagctgtactcggctgccgagtacgttagaccgtggccaaacgcgaagagtggctcaaacgatgggtgtcggtatccgacgtaaatcccctcgttgtaaatcactttgccgttctctccggggaacgagatgaacgaaggattgtccgatacattctttgggaaagacaaaggcaactttccgcagacatctctctttccaaacagcacgtccgccatcccatttccgagttcatttcctccgtagaacgcttgaagaaccgttgaggcatcgtcgatccatggcatttctacaggcgttccagattggttcacaatgatgacattcgggtttgcgtccaaaacggaacggaccaaatcgttcgttgcacctggcaagctaacaagatgacagaagacgagaagaggacgagcttctatgagccggagtgccatcagaaaaacttgccaaccaagtaggaaatgaggacccactccatgttggctcgatcgtagccctcgctttcccaatcctggttcaatccgataaccaacacgacggctaatcgaagggtcgagaacagaacagagataaaaggttgttagttcagcatgttcgacaaaatgaaaaaagcgacggaaacccaccatcaacatttctagcgacatcgacagcttcctgaatagcctccttctcctgaatagtcctccacgctccgactctcagtgcgcctctcgaaccaaagatctgcgttgagcgcaatggtttctcgttggttgatctcagctcgagcgagtattccttccctgacttcaacccaggaacgatggccttgacctcgatcgaaccttgattgaagaagtattcgcctgggacttgattgtgcgtattatcgaccacgagcttgccgtcgatatacagatcacctaattaatgcgacgacaatgattatccaagtttagccatgcccgttgatgcctctgaacaagccaacagcgaccctggtgacgaaagagagaaaagaacaaaccttgaccggcgatgactattccaaactcccaatcgccatcctcgtcaggaacgaaaatcccagagtatcgatgccagcagatcatgttcacgtcgtccactgatgatgccctcgcccacgcataagtttaagaagaacgggtattattcaaggtcagtaccaagcggtagaattagagcgtaagtgcgcacatatacggggactctaggaagaaatggaaaaccatcactcaccgatgttgtcaaagagcatcatcgttgatgtcgtggtagctaccgagtagacagcctcggtcttctgtttcccatctttgtcgaaaggctcgttccagaactcgactgattccagaccacaaggatgtcagacgagacgaggctttttcaacctgacgagatagctcagcgaatggaaagagaagggtattccaactgacttttcccgttcttgatatagttacttgccaggggcaaaaatcgatggctggatgctcctagagcataagggacttgatcctgaccaaggacctccttgacagcagatcgaataccgtcaaaaggcgtgacggtgtaagtagaaagcaattgcgcagaccctccgccggatgtgtaagctagtttgacgttaggaccgatgactccgattgatttgatagaccttgaggccaatttctctcttgttaacggaaggagagaatcctcgttcttgagaagcacaatggcatcggcagcggatcgtcggaggagctaaatatggcaagagagacaggaacgtatgtattaatagatctattcagcgttgagtacgttgagtacaatgtcgcaagctcatacatacatcccggagttcaggggtatccacagctttctcttttacgtcaaaagggatgccagaagtctaatggaatcagaagcaagaatcggtcaacgcgtgtacaacagccgtggtgagagagggtatagagaggacaaacctgagctttttggacaagttcaagaacctgttgttgattaggaaacaacaaagagaagagctcagtcagtttgacaattcagtcataggatagaagaggagaaagaaagacacgagcctttaggacacgagcgtccagatcttcgatagatagtttgcccgctgtgatcgccctctggacgacatctacgctcctcatcacgcccggtcctggcatctagaggcaaaacgacagcaagcactccatgttacacaagagtttggcgagatgaatatgtggcagttaaggagaaaatttgacttgaccaacctcaacgtcgagaccggccttgatagaggtatcggttgaatagaccccagtcctgcgattaaggaagaacgaaggatgagccaagtggagtaagcgaatggtgttcaaggtttggatcacacaagaatcgctgggatggcaaacccgactaagaagaaacttaccagtcactcataatcaaccctttgtatccccattcctgaaatggtgaacgtcagatcaccgaaggagaacaccaatatcaattcaagatagtagttaaggagagagaggagggaggggcgaactttccgtaggacattctctaaaagatcataatcttcagaaacatggattccgttcactcgattatacctacgtttaaaatcccctcataaacacatctcagttccggcctctgcgctccttttaggaagaaagaagactcacgaagtcatcacagcctggggatcactatccttgatggcaatctggaagggtttcagataaatctcccgaagagctcgctcggataagacgctgtcaatcgactgtctgtttattacaaataaaagggaagaagaagggaaagagtaaacaccacatttgcttagcgcgcggatagcaagtgagcaatgatatgaacggacctctctttctcttggtcgttgcagactatggattgaaaattagtttgtaccaaagcgagcgcccttcaatcagcttcgattattcgattgaaaggctcaaagagatgattgaaactaaccgaaatgtttgatagtagcaaccacgcccttttcctggactccattgatataagcagctgctatcgttccattcagataagggtcctaacaaagtgcaaatagccaaacgaagaaaggcacaccaatgaatggcctggctatatgttgatgcatacccattcgtctcgcggaaagaacctacctcagagaaggattcaaacccgcgacctcctagaggagatcgctgagtattcacagtgggtcctagaagtacatgggcgccttgaggaaacaacaggtaccatcacgaatgaacttctgttcgactatcctgactggatcagatcaagctggacaaacctttttctttgcactcggtacccagagctagaccaatctccctaacaaggtcgacgtcccaagaagatgcgactcctgtggagcaaggaaagcaagatgagagtgtaccgttgaagacttgagagcagaattgaacgggtgcagaatgatcagccgaatgacaacaaggatttggactcttgtaccgataaggattagcttggttgagctcacaattagttcctcgaacaccattcggtccatccgacatctaaccattgaaaccaagccatcacgtagagatagggcatatgatcagatcgagcgtcacctttcgtgctagtctcaatgaacaggatgagatggctttcatgtgaaactcactcgaactgcaggaattccaagtcggtcgatcttatatgtgtgccaggcgtcacttccagataagagcttgatctgaacgatcggaacggacagagagaggttttccaatcagtatgacacagtgcggttgtgcgcgagatggagcgaaagatgaagaataccttctcaagcatcgaaagcttcgaaagagtatcttcgatgaccagagctgatttcaagcagagagaaaaagtgaacaattcagcttgctatttctcttccggacagatgaacgatgagaagccaggctttgatgaatagagaatgaagacagaaaggaatacgtacacatcatgagcgcgtttcttgataactatcagacgatgaacagaataacacaatagagtcttgagagaaagttgatagggttgagagagatgggcttaacgatatatgtctctttcccaaacttctcatctctcttaaaagactaacgaattgacagaaaagcctcaagatgttgaggatttgatggaaagacgaaccggcgaattaattgctaaacagccggtcgggattttttcggcgaaactctgaccaagtgacctcatctattatgggcgcatatgtgtgtgttgtgtgtggacgatatgttatatctgacgactgagactcatcagaagtaacgggaatagactgctgatgatctcgtataggacgccagagctctggcaaggagaggatagagaaaatactccgggtgtttggtctagtctggaggagcgagaagattctcgtgttctcatccaaaatgatgcatatatatccaagagaaacaagtagaagcaaaaagatggagagtgggcaagatatttaggaacaaggagagaggaaagagaacgaaagaaatgtcccgtctacgagactagaggtatggcccgatacgaacagaatttgcaaggatataacgacgtcttcaagacgttcactccaggtccaggcctctcttgtttaattggagaggcttgtcttaaaggagcacagcactgaggagaaggagcgcagggacagcagcagctccagtggtcaaccggttggccccagaggtagcagatggaatggcagcagaggcggatgcagcaacagaggaagccgccttggagattgatgcagcagcagaagcaccagaggaagcagcagcggaagcagaggtagagccggcagcgacggcagcagaggtagaaccgacggcggcggcagaggtaactataagaatggagtagattccagatacagagatcaatttcaacccaaagagtaaaaaagttatcaagaataagagatgatattagactgaccagctgcaacggcagaggacacagcagtggaggcagcagcggcagaagatgcctgctgagtagcggatccgctagggctgggaaggtcctcagtggtggtagggaccgaggtgagtcctgcggcgaggcaactctgagccaaagtctaccgataagagatgaagagataagattatagccaaatcacaagtcattttcaatgcgcaatatgaatttcacggatgatgaacccaaagatcacaagggaaacccccggagaatggagaaagagactctcttacctcatactgggctagcgaaacagttccgttcacgccgttggcagcgctgcaacctgcacagttgagaacatcttgaagataggaggtggtgcacgtgcaggcctgatcggtagcatcacaaaccgtaaagccgcctgataattcattcgcaacataagtcacacagctctatttctctttcttgtcctttgacacggagataaccatttgaccggacgtacattcgaaagtgcagtcctagatgaaagagagggcgcgtggttgcgaagaggagttgtcagaacgatgacatatggaacacaaacaacattggttgatatagatgtaacatcagaacttacagcgagctcggtagggcaagctgttccgagtgcagcgagctgagtggcaatggcagtctcaccgtttgagttgaggcaggtagcgcaagaggacaagtcggatggcaagcctgtagtccaatcaaaatttgaagagcgtggaagttttcagagggagcaaaaggccagtgttcagtcgggataatccttgaaagaatctctgtatctgatgtttctcaatctcatctcgctcagagctttgaatatgatgtacgaaccgttgcagacacacgcaatggtctggttagtagcggcgtactatagaatgcaaacatcacatttggtcagctatcttgttgagaaaagctctctaggtgaacaagagaggaataacaagaaaaggataaacaaagaagggtggctgtacataccagagtaccacaagtctgaacgacggataagctattgcgatcaaagcagagtttttaaacatcgagctcagcattagttctcaagtaaaatgacatgtctcgctcttgactctagtacaaagacatccatacaccgaacgatcggcgaacactcacgtctggctacagtcggaagtgcacgcggcgggaagggtagtgccagcaggaatagagatcgactgagccttggcggtcaaggaaagagcgagggtgaacgcgacgaatacggaagttgaggagatcatcttggaaagtaaggagcgaaagaaacctaaacgaatgtgagtgagttagtgtataaagatggaaacttgaagattagtagtcaaaaacagaaggaaagagaaaaaatcagcccgaacaggaacaacaccaccggaggcattcgccacgtggtttcatatggttacgaatttgccaagagcttgtgattgtagttacggtggcaacatattgcccgctgactaatcaggcgcctctcggctttcctcttgccggtctcgtctttacctgccgactcgctttcccactgtcttcaacccaaatccatcgacacttgagtagtgaggatggcgacggtagctcctcccaaaccatgggagcaacctgcacaacaacagcaacagcaacagcaacaacaacaacaacagcaacagcaacagcaacaaccggcagcgtctatgtcgcctgaggtacctaatcggccagcagagatctcatcggcagacaccgtcggtaaggactttttccgttcttttgattattacaggccacaagtgctctgatttcatctcgtttcactgaatcctttccttccactcaacccagtctcactcaaccaaaattcggctctatctccctataatagaatgggccagactggatattcatcagcgtatgggcaatctggctacggtgcgttggctagctcatacgggggtatgtcttcgtacggaaacagttattcgtctcgtaagtgggactctgtttcctttgtatttcctcctgttcactactttggagctgaggtttgcaactgactaaactaatcacatcttatgacgacatttcattaagcctactcccggttcggtggaggatacggaaactcgtacggtggttcttatggtggctacggaggctatggaggtatgggaggcggttatggtggaatgaatggaatgggagcttacgggcagatggggatgccgggtcaagaagtaagcacgttgtacacatctgttccattcgattatctcacaacaagggaagaaaactcattcttgaaacatatatcctctttactgtcctctgtcacctccgactctatcaacgtagggtatgccagtttcattcacgtctcaactcgccatgcagacaactcccgcattctctatcctcgagggctttatcaccagtatcacctcacttgcccaactacttgaatcgacatacatggccacccactcttcattctttgccctcgccggtgtggccgaccaactcggctcggccaaattgtatctaggccaaattctcggagtatttagcgtcctccgctggggacgaggcatactcgactttttgaaacgtggaaagaaccgctcgttgtcagggctacccggttcattggaatggggtgaagagtttgcctcgctcgcacagatcggaccaccatcgggaagaagtagaccctccggtccgccaacgccgaagccgtcggctaaaccattggtgtttttccttttgaccgccattggtttaccattctttatgtcgaaactgattagccatctctcgaaagccctcccgccagggtctcatccaggaatgcatgggcaagatttatcagcggcagggagtgaaccgataccgacaagtctgacgttcgcgagagcgtctttcaagtttgaaccaaaagacgcgctcgagttggcgttggaacaaggagagattgtggccgtgttggacagactgaaaaagtcgccagcagaagggggaggtgaaggggattggtggagaggtcggacgagagatggaagggtcggttggtttccaaagacgtttgtcgttccgtgcgtatccgcttgctttcttaatcctctttcatcaatgttcttcgtaaatgacaaagtgcatagagttctatactgatcgatcaaccgtcttgtgttcaggttacctaaaccggaagattcgactgctcctccgagtataccggctgcaccttgaatgtgaaactatgtatctatgctatgtactttaatccgctcactttggcatccgtctctttcttcctcgttatgggagaaaggccgaacagataaagagcacataaacgtatctccgtcttacccaatgtaggtcttgacgtggttccccggcaggtagaaacgcatgcgtggacacagcatagtcaaatcacgtgatcgtttccgaaattctctggtctctactatgataaagacgctcacacattcacactctgaaagaaagcccaagaaacatcagacgtacatacatatataaatatacacgtacctacacgatcaatgtctctatcggacaaggtctctatgatggaaggatctccaacggatctgaattccgagatggatccttcggctttaccagcgaagacgtcaaaaccagctgatggccaagtagacgacgaagaggaagacgaggaggccgctggagaagaccgagggctcgactatcgactacttagcaagatcaacaagtttgtcattcttctctctctgtctcggcagttattttatggttaacttcacaactgaacttctgggtgtccatgctgattcgtttccctctggcctcgaaatggaacgaactttccccttgtgttttggaaatctgacaacgatcagaaagaatgagatctttattccgaagcgaggcgaaaaagatttcgaacctttagagttgggagtgaacgttcaggaaagggcgctcagggaatcgagaggagcgatgtttgccgctcttcgaggtgtgcgaggaggtacaaagtacgtgtaatcgctatactctttcttaacctgatccttctttatatatgctttctttcctgtgttaacctctgccataaccaccttctttgcttcctttttttttctctcttcttaagcaaaacaatctcccatgctcatctgtcgttgccgaccgcttcggaccctaagccattaccatacactatcctaatccgtggtaatcacttcaacactatcggccacacttatcgtcctccgaaagttccaggctctgaaatgaaacctccggcgcgaactgtactcttacctgaggaagctttgtacctgctcgagcgaggttcattattcatttggaggggtgatattccatcggatgcggaggagagagccaaggaacgtgatttagcgaaaggaaacggaattggtttggtagaagaggtctttacagagttgggagcgaggaggatgaccgttcaggaaggttgggctctttggggtcaagacgtcacggaaggacggtacaatgtatgtagtcttctatttgttcctttctctttcctccaactttcttttgttttcccttctttcgagggcaggaaagagtctcactatgtttactcttgcctgagacttaggtgtacgcaagtttaaaacgactaggttatgtggttcatcgagcacctcaacatatgccttcccacctacttcctccaccagcatatgttccaccggtggttcctccgagtctagctcgtcaagcattccaccaagttggtttgggtctttctttcgttcggtcgacagcatggtcggtgtggaatcaactgggcagatcatggactgcattctggacgaggatcgataggttgaggcataagagattggagggagaggacaggtggaagccattaatcgaacagcgatcgacctgccagtttgagttttactgtgagtaattcgtctgtttgagttcgatagaagcgcgcgcgcgcgcgctgggcagcgtaactggagactgaattttgaccttccatccatcgtcctttcctcttttctctccctactaaacactcgtctggtaccttctacagccgatgtgttctctcatctccggattttctcggctcctcgggaacaaagagcggttacacaaggaggaaaccctgtagagtcgacaactgatcttggactaaaagaaccgaatccgtacgacgtgtattatcatgtatggaaaccgtcggggcaatacaagaaacgagagcctggggaaccagatttcaagattggagtaattgagtacgttatttatattctatttcattttgaaggttcgatctatgcatcatgtgaacgcccaggaggctaactcaaagttgttattctttatgactctttctcggcaaaacagtgctcagacgcttcctctaccttcacacaatgcgttccaagaaatcttttcgaccctgcctctactcggtcctccgaaacttcggtatccgcctcgaaaccctcgtcctattcctgctagcagcgagttgataaaagaaccgacgttcctctcgagacttgcaatctctctcggactgttgaagcctgttcgaacggagaccaaggcgagagggatgttgacgaacgctttcccttcgctcaagcagggcgataaggcgttcgtgttggctgttgtcgatggtggagggagtatcagctggctgaagtttgggcgaggcgtgtttggagattggacgatgcagtgatgcaatgatttctatgttacttcttggtgatagaaagatcgagatggtcatcgatttctatttctccagctctctctgctgctaatatcattattctccggggaaacactcgagcaagcagacagggttcgaagcacaggtcaagatgactgaagattcgcactctggctctctttgtctgggagatctgtattgataccatgcttaagcttaatagtcccattccagtgcatgccgatcaatcttgctgatggtgtgatgaccatgaacggagatgtacgtatgttttagaaacagcgagatttgtccaccttatccgatgaccaggtggcttccttgcgttctctgctcggcggtgtctcggtccaacatgggctaagcagccagctccggcaattcgggccgggcgggccgagaagttgccttggctgatatccaaagagttttcccgagcatcgactttcttacaactaatgagagacctggttaaatggtttgttagaagtggtctagtgatctaggtttgagcgtttgtatgtctgtatatctgtactgaatgcgtttctgacgagtcgatgagtgtgtccaagcagatgagagacggagagaataggagaaatccgggacaaaaaccttctgatgccatcggacgtcaacatacatcaacgctgactgaacccagaatatactgattgaccgcaaagtcgactctcatccgcggagacttgcacagatgcatatacaagacactcagaaacgtatagaagtccgagagattgcacgttgctgacatatagatacatctgtgggatttagacatgtgttgtgcttgctcaccgtccatacttctgtttcacggtgtcggtctatctcgctttacctttgttgctttagatctatttctccgtgtctcctttctcgcctcgctccgaaaccttcggtcgagcggcctttctcgctaaacagaacctcccttctcgggaaaatactgaaaactcaaagctaatcctggtataagaacgtatggccatctttcggtccatcgacttctttctgtgtgtttgtactctcgtgtctcttttcgcacaacaagtcaggttatcgaatagaacccactttcactttttacaccaggtcgcttgattgctcatcatcaccaacgccgtcgtcgccgatctccccacaacgcttaaacctacatcggatcgcttgatatgtctcccacagccgcagccggtgcgacctccggagggaccttccctccagaagttgaggtgcgatctctctcgcacgctcttaaacatgttcgcgtcaactgaccaatgtcttcctttgcttgctctcgaccgatgatatttcttgcgccaatagccctacatctaccgaaaaagttggtggtcgcatcctggtatgtgtgatcatgtctgtgtttcatgttgatgcttagtctggaaacgacgctgatacattcgatctcttcttctccttctatttgtctcatcaggaattcgatcgatcaatttgcttcttctggttgctctcattacctcttcaacaaagtaagtcccaatagtttaccttcagagcttcgtctcggtcattatagttagacctaatcgttcggttctatcggttctttccctgcacccttctcttgtcccattccgtagcggttacgatggttcgatgatgaacggattgcaagtgttggataactggaagaacaaatttaataagtgagttcttccgcaagcagctatgtcgctgatcctgaaatagtacgaatgataattatacatttttttcttggttggaacctgtagcccacaaggaggaactttaggtttattgaacgctgtacagaacataggatccatcgttggtctccccatcgctccatatgtggtaggtcatattttgcctctcgcctgtctgtttgatatctaatagaatactgtctgaccctctaccctcgtttctcgcttcgttttctcttccctttttttcctatgtccgtagactgatctcttgggaaggcgagctggtatctttgtcggatgtaagttggcctcatctgatcaaccgcttcatctacatcacttctaagctgataactttatgttctcctttcttctcttatctgcagctatcattatgctggtcggagtgtacgtttaatagtcacaagaataagttctcgaccctcgtgcatccagcggttctaacttgcattttctgcccgtccttacagtgctatgcaggcttctagtgtaagtctttttaggtagctcatttaatgaggaatagagaatcagtctgatataaatgccatcttcatttattgtcaaatcatcatacagaacgtactcgctgtattcatcgcctctagagggttgatcggcttcggattgactttcgcgaccaacgctgctcctattctcatcacgggttcgtcttgtctctttctctacgttttcccattcttcttcattgccgtcggcacatgtattcctaacccgaagttgatctttgttctttatctagagcttgcctatccgacacagagggcggctatgacatctctttacaactcgctttggtactctggtagtatcgtggcagcctggttcgttccctgactctcatcacacaccatgcgcacgtcgcagtcgctcacactgtctggctctgtttctgtctcttcgctccccttccctttctcctctcttccctttctcctttcttcccttcctccttctcgtcccctcaacccgatacaggacgacgttcggaacgttccggatcaacaactcgatgtcctggcggatcccctccatccttcaagccacgccttccgtcatccaggtctgcctgatctactttgttcccgagagtccccgatggctcgtctcgaaaggtcgacacgccgacgctcagcgggtcttggctcggtaccataccgacaacaacaacgagcaggacccgctggtcgagttcgagatggccgagatcacgcagtctctggagctcgagaagcagaacagcacgagctgggcaagcttgaccgccaccaagggcaaccgaaagcggctccggatcgttgtgcgtcacgtttttttatcgaatgtcttcttctctttatctctgtttggcactcatccttgcttgagcacatacacacacacagattgccatcgcattcttctcccagtggagtggaaacggtttggtcagttactatttgaccaaggtcctcgatggggtcggtatcacttctgagaacattcaggccctctacaacggaatccttcaactctttaactttgctgtcgccgtcggcgctgccttctacgtcgacaaactcggtcgaaggacgttgttcttgacgtctaccgccggaatgtttgtcacctggatttgctggacggcatgcgaaggtgttgtcggaagcaacatcaacaatcggtctgccgcctatgccatcctcgcgttcatctacatctactactttttctacgatatcgcctactctcccctcttggtggcttacactgtggagatcactcctttcaagatgcgcgcaaagatgctgaccatcatgcagctctcggtttcatcctcccttgtcttcaatcaatatgtgaacccgatcgctctggaaaagattggatggaagtattacatcgtctatctcgtttggctcgctttcgagttggtgtttgtctactttttccttgtggaaactaagaaccgaacgctcgaggagaccagcatgttgttcgatggagaaggtgcgtcttctcttttcttctcttttctcctttcttgcgaaagataacaaaagactgatcatcattttcgcgcgttttgtatatggtacatacctcgttcagacgctgtcgaagacatcaccaaagctgccaacacaatggtcaacgatcgtaccaacttcaaccattcgagctcgatcgaaaagaaggatgagtctgagatcgagcattacgaacgggtgtagacagcattcttttccgacgtcttcagctttttgtcttgtttcttttctttcctcctttgtccttctcttcttctctccttccctttatgtatatcctctcttcggtcctttcggctttctttagtctcccggttgtaacgatttcgccaatacctctcagagctcgatccgctgccacttgtattttctccatccctctgactactacccctggttctatgttcttgtactgtgacgtttcttttattgttgtattcatcttgttgcctctggcgctctttaaacgtgataacatgagcgtttcttctatcgttggttcttcgtccttttattattattttcttccttcctcttgagtaaaggaagcgaatcaggtaggattcactcgaatcgatagatgcatcttttgagcctcatctaagctgaacgtcctatatgagaacggacggaatgggtatgttctatgacatcgcttgtacgctgactcggtcacggccttttcctctttctgcccgaggtcagaccagttttgttatccaaatgatctccaaacggatgtgtatggtcatagcggcagggttctatttcctgatgtggaaactgcttttcgtgaatttctgtatgatgtctttctcttcttttcgggggggattcttctttcctgttccttccagactgaatcagttgagattccttctccctcttggatctttccgactgtatcctctgatatatgttgtgccaacttgtcaagagataaaccccgatatagaaaaaggaaagaggatgaactgaaaacccaacgaattggaaatgggaaaaaaaccatcaatcttgtagcaccgaccgaccacctatctaagcctcaatggcctggatggtagcaggggtctccttcctggcggtagcgacggtcgactttccggccttggcgacctcgacgtccggggtggcaaggacgacctcgatgtggcaggggtgtcccttgtaggggttgattcgaccgtgagctcggaaagttcgtcggtgagtcttgggggcctgctggacaacgatgttcttgatgacaagctcctcggcagagatctccttggcctcggcgttggactcggcgttcttgagcaatcggaggatgaatcggacggacttctcgggccatcgacctgacaattgatgaaagggggggaggaaaagaaggaagacatgataaacaccttttcaaagagagaaagaaaaaagaggatcgaaagacctatcacgtacccttggtggttccgaactgcttagcctgggaagctcggccgatacctccggcgtatcgtcggaaggggatgacctgcttgtgctcctgaacatcggcaaggtaggtgtaagccttggtgagcttcatacctaaattcgtttaaagagcatgacgataggtgttagttcaactttcgcgaccatcacataattttcttttctctaagaagatttcgagagaaggaaagaaaaaaaaactaaccgctgagaacagcggcgacctctcgcatgttcttgaagtgagttcggaggtactctccccgagacttggaggtcttctcggggttggcggcaacaagggcggaggcgtatcggaccatctgaagagttcgtattgacgcacatacaagggagagaataaaaaaggcaaaagcagtcagcattgttgattttcggacggatcaggttgatcaatcaattaggtaaaaaaatgtgcgtgtttctgaaattgctggaaagagatgaatatacgatgtttggaagggtctttgagtactgagttctctgtgagtttttcgtaggaagaagagggaagaacgttgatggttgccggaaatggtttggatgagtgcaaaagttgaatggttgagaatgagagattctgtttgaaggtgaaggatttttttttgggtcgaaagctagggaagagtctatcgcttggccggccggtattcttcctctacaagacacatgctctccctgttttcttcctctatgctggtggttgctccagtaaaccctccagagacaaactgttctggcatgcctgcaagccagatctctcgacagtcaccgagctgctctccatccgagctttcgaacactctctcgctgggcggaaattgaaccctcctcataccgaccgaccaactgattgacccgggaagtctgtacaatcagcagttcttctgtctttggaagaggaaggaaaccgtccagcgagtagaggtccatgtcgattttctgcttttctttttcctcgtgacacacactcgtccgtccatccacccatccccggccggcggaacgcgagttgatttgtcggagaaattttcgagaaaaaacccaagagagaaagtcgaaaagaaagatatcggtgtgtgcgtgtgtcgatgctgaatctgctgtatatgaccccgctgtacgttctatcgttcttctcgataccacaaaggagagaccaaaaagattcaccttgatgacttgattgctggattacgagtctcagtagcttcttcgtcctttctcgatcaagacacccaaagcgtttagaatctgcaggcagggcggggaccgtgcgcgtaaccacgcggatgaattctgacttttccaaaggtcatatgttacgatatgtggccgtaaccacatgacacgcgtcgcgtcgcgtgtccgtctcgcgcgtcgcgtctctgttggccggtgcgggcttgtgtgcgcatgggttcgtcgttcgagagagagagagagagagagtggtcctgctcggcgtacatcgatatcatgatggctcacatatatatatatatatcacactcggaaagaagattacaaggttttggttctgtctctcttgattctttcctcctcctccttcttcttctccttcttcttctcttttgtcctcttctttcctccactttagaaccacaaactcttgatgcctcctcggatggcgttccacccggtggtacctacaaatgcggcgttgtcgatctttgtctgcaattcataatagttctcgagtcgacgtttgagaaagtcgcgcgttgacggcatcgacggttcgttcaacggaagcgagagctggtgaagctcagtggagaggtacaagagtgagagtggtaatgactcgtgcaagttctgaacagcgttatggagagatcgcgagatcgcgagattgacagagatacaacgttaatagagtcctgaagctgacgcatacatattttccagagaaagacattggatcgggaacgtacagcacgcgaagaagacgaaagggagagcgccgagtctgcaatgtgaagtgctaagatgaaaacaaagttggacaaaaggactagttgattagacgctcgagtcttcagagcgatacctccaagatcctactagtacgtacagtgattcaggacagggaatggagtcttgatcccgacattggccaccggaatatgcgtagccgtgatcgagaagagcgcgaacgcctggacgcggtgacagaagagaccgagccgagcgataggagagacatgatcaacatgaaattccataagctctcacacccacagcctcaacacaaggaaagtacaaaagaaacatggacaagacttacatcagctagccaaggtctaacgtcttcgttcatctctaaccgtcgttccaacacctgttccaacgaaggtcttccctccttttctttaccaacgtctttcatctcaacctccaatttccgtctcctctcagccaaccattctctgacgagcgctctctccggctccctacctttcccaaacaaggcgacgatcccggccgcaggcaaaggagccgaataatggtaaggtgcaggaagagagagcgaggctaaggagagggcgtgtgaggaaaacccatgggatggtatgtgaggaagagcgtaagagagaagaagaggtcggattgatgcgtgagctgccattgaacaagagttgaaggacgatctggatatctatgtctttaagcgagagtgttccaacacgaacagaacagaacgaaacggaacgaaagagaaagatcgaggtgatctgaaatgtcaccttgaaagttccggctgagatcggttagggttaagtgtcatgataaagctgaccgcgtatttcgtggtaaattattaacgcgcgatctgctttaataacggaaaaaacaaatcaagacgcgttcgaatctgcagcatcattgaccagcaacatcattcaaactgtcgttccgacgattcaagcacaggtacacacacacacatacacacacaaacacgcgaacggaagaacagagcagaatagaatagaatagaacagaacagcttagggattatatatcgctcctacactcggacttcaattcaacacagacagcatggacgtcgaatactcggcctctgaatcaaacggactttcctcgttcgcaacccaactccaacagtcccttcctctaacgatcgacgacggtgatgagaacacttacccagcagggccttcccaatcgataaaactggtcaaccattcaagacagttctcctcagctggtatgaccaatggaaacaccaatgggatggtcgaggtggacgaggacgaggatgaaggcgaaaacgaagaggtcgaaaggtcggtggtgtgggacaacgagttatcgagtgaaggttctgattacgattcggatgacgacgacgacgatgatgataatggggatggagaggccgtgttgagcacactgcatagtcagtttctctctttccttctttcctcttttctttcttgttccccctttcagtcttaattccgtcaatcaagattcatactcatacatttgtcaaaaaacaaaacaaaacaaaacaaaaacgcaaccacctagtcgaggttcgattgaatccatactcaacgttacgtcatgaccatctccgacatatcgtcgagacgtacatccgagagaacttttcgaaaatcgctgtggacggagtagaagttgacggatggcgacaggttcggatactcgaggaacactgcgagagcatcaaagcgactgaatgtggtatgcgtttctctcttttctctctctggacgcgctcacactctcgcgatcgtgatgcttcctaacgggttgctatgagaactgactcctgccgaatggcgcccacatatatacacaggtctcgacattccgttccctccactatcatcccttcagctccaaacacacctgtaccaaccgtccggatcgaactcacttcaagagttctcagccaatctagattcagacgacgaagatggagatgacaaggccgggatcatggctgctagtgtgagggagttgcctagtggcgaacttgacggtatttgggatacgttcgtcctgtctcgcgctgttctgtctagatttccttgtgtgtatgtgtgtgtgtgtgtgcgcgcgcacacacacgcgacaggcgcatacactgacaggaattttcactctttctttcctctaatactgccgtcaaatattctcccaccatacacacataacctagcctgatctatggagaagacatcaagaacaaactactgaactacatatatacaacgcttcttttctcggatgcgaacgtcgactttaacgtcgtcacctggaaccggtgcgttttcttccttgaggaacgagggaggagagatacataaagccgaggatccacgtagttcaggtcgctgatcacggtgttttcactcatcttagtgtggtccttcttcacggacctccaggaacaggaaagacatcgttatgtcgggcactcgctcagaagttggcgatccgattatccagccggtatgtcctctacgaccgtctagatcctttttcgtttctggctcggaaatagacgcatatatggatgtttgttggaaagaaaggtctaaccgagtcggaataattctgcttcgcttctagatattctcatggcaagcttgtcgagataaattcacattccctattttccaaatggttctctgaatctggaaaactcattcaaaaactgttctcgacagtgacagagatggtggaggatgagagtggatttgttgttgtcttgatcggtaggtcccgtgttcgcccctgcatatcttttctctctctctctctctctttcttcgtgtcttctcttccttgagcgggcaggaacataactaattggtgttgatacactttggaaattgatacacatcacagacgaggttgagtcactgacgaacgctcggtctagctcgagcggatccgaaccgtctgatgcgatgcgtgtatgcgcccctctatcctcctccccctctgttctcttcatcctctttcaaaagtatctgatgttgacatctggttcatgattgtgtgcgtgtgtgtgtctatgcgcttgtgaaaaaaaaaccaaacaaaacgaaacaaaaaccacccgaacaataatagggggtcaatgcgttactcactcagctggataagttgaagcatcggaagaacgtattggtgttgacgacatcgaatatcagtcatgccatcggtacgtatccattctgattttcttttacctgtagggcgatataaatagaacgaagcaggaaaggaatagatactgacgagtcatcagatctctttgaaaacttcaaaaatctatagactcggcatttgtggacagagcagatatcaagcagtatattggccttccacctcaacaggcggtctattggatactgtgtggttgtttgaatgagttgatgaagagtcgaatcattcaggaggtggtacgtcttgtgatctatccatctatctgtctttccgtccgtcctgcgcgttggctcagtttactgaaaatcgcgaaggaaccctgtggctacacatatacatacacaggacttgctagattggaagacggcagagttactttcaaacgccggtgtactgggcaatcagaaggaccgggctagaagattaagtctgaggttgttcaagcttgcgggaagatgcgaagggatgtctgggcggacgctccggcggttgcctgtgttagcgcatgcgaggcatcttgcttcaagcgtcttgccgagcgaggaaggcgccggcggtaacggagggagggctaccaagctttccgtctggatcaaggcgatggagaaagtggtgagggaggaaaacctggcgatcaagactgtcaagcttggcggaacgacgttattgtaaagttggttgcgtgcgcctgtccgtgccaaggaagggcgggtacttctagatagaaagagaaagagaaagagaaagagaaagagaaagcgaaagagaaagagaaagagagatctagaattggatcggatctgatcctctttccttctcgataagattgatgcgatctgtggcttatctgatgcgagcgatttttttcgagtcaacacggcgcttacagatatgaagacgagtgatattgtgtggtttcgtcgtccgatgtcgacgatcaagatggacgatgagccatcatgcgttctgtcgccggaccctactcgagcgctcgatgaacgacagacatcacattcctctgactcctcaggcttctagagagaaggaagcgaggagaccggaggaagagaacgatcgggaggatttctcaatttttattttattctctattcctttgtttatcctctccatcctcttctagctttaccgccaggtaaacgaaagcagttgatcccataggaatccacagacgggaactgaatccatcaaacgtgctgcctctcacttcctggaacgggccagttaatataacactctccaatattgcgacttgctctcgcgagcagagagtgaacgtggcaggtgcacagggtatgtcgtttgatatgatcacttatctgcggctctcaaacggtagaaacactgtttgtaccgactgcggacggagaaagtgtccgtcataagaaaccgaaattgcgacattcttcgtcagcccaaaaaaatccgagcacgtcttttttgtgtatctcaccgtccccaccattctggcctgttcttcatccttctttgggctctttctgccgtctccacagatgatgagatcgatagatgatcgactgacgcctttctttcccttttttttggctcttggactgatgctgatgtaaatgtttgagctgaccgagatcctataaggcatcgtcatctaaccatagttcctctcttctctctctctctctttcctttcgttcactacaccacttacctctctgtctctatcagtggctcctttctttagtcatacccagacgtccttcattgtagtcgtcgtcgccgccgccgttgccgctgctgccttctcctgttctcctgtcctcccgtcctcccactcaccacttcactcgttctcacactccgatcgtcatgtcgggcactaacgacaacaaggttgtctactacgcaaagcgaatcatcggctatgaagaagacgcaccaggaacggcgtcaagcaaagattacctcgggcaactaggaagcaatcctaagggcaaggtacgttcttttcttcttccgctcgagaaatcctttgctcggtgctcaccagacatgtgtcaaccctcaccgctctacaggcccttgaatacttcaagtctctcttcccgttcctccaatggctacccaactacaatttgcaatggcttgtcggtgatctgatcgccggtatcaccgtcggtctcgtcctcgttccccagtccatgtcctacgccaagcttgccaaccttagtcccgaatacggtctctactcttccttcgtcggtgtcttcgtctacgcgttctttgccacctcgaaagatgtctcgatcggtccggtcgctgtcatgtctctcgagaccggaagaatcgtcgccgaggtcttggcctctcatcctggtaagtgggccgcagaggatatcgctacctgtctcgcctttgtctggttagtctttcacttgtggcgcgcacctctctttgtctctggacgttgttcctgaacccttgtttccgttctatttcttcacagtggttttatcgttcttggcattggacttcttcgtctcggatggatcgtcgagttcatccctgttcctgctgttgccggattcatgactggaagtgctatcgttcgtcccttttccttgtttccagccgttctctatgctcgctatgcccactcttgctgatttacttgatctttaaactctcttgcctatagaacatcgtctctggccaggttcccggtctgttcggaatctcgtctttgttcaacacgaaagctgcgacctacctcgtaatcatcaacaccttcaaattcttgcacaaagccacgcttgacgccgcattgggagtacccgccttggtcggactgtatgcgatgaagtggacctgcaactatgctgagaagaggtacccccgataccgacgagtggcattcttcgtgtccgtcacccgaaacgctctcatcgttgtcatcttcaccattaccgcatggcaggtcgtcaagcacaagcacaaaggagctgccaacccggtttctgtgctgaagactgttccctctggcttcaagcatgtcggtgcgcctctcatctctagcgagctgatctctgctttcgctggaaagctcccggtcgcgactgtcattcttctcctcgagcacatcgcgatctcaaagtctttcggtcgaatcaacaactacaagattaaccccaaccaggagctcatcgccatcggagtgaccaacaccgtcggtacactcttcaacgcttatcctgccaccggttccttctcccgatctgccctcaagtccaagtccggagtccgaacacccgctgccggttgggccaccggtgtcatcgtcatcatcgccctgtatgccttgaccgatgcgttctactacatccctaacgccgccttgtctgccatcattatccacgccgtcgccgatctggttgtgtctcccaagggagcctacgctttctggaaggtctcgcccttcgagttcttcatctggctcgcttccgtgttggtctctgtctttgcaacgattgagattggaatttatacctcgctcgcctcctcgctcgtcctcctcctcttccgaatcgctcgaccgggaggacacttccttggccgagtccgagttggagttgattccaaatctgatggaggtgagaccggatcgatccacagagaatacagggatgtattcgtgccattcagtgggcagaagaaaggagtgaccaaccctcagatcaaggtcgagcagcccccgccaggagtcgtcatttaccgattcgaggagtccttcatctacccgaacgcttccttccacaacagtgcactagtcgactatatcaagactcacacccgacgaggacgaagcgaagtcgcaatcaagctcggtgatcgaccctggaacgactccgggccaaaccgatggtccaagaaggcaaaggcaaaggccgctgtttctatcgaggatgacgagcgtgatggcaagtacttgattcgagctatcgtgttggacttccaggctgtcgcaaacttggataccactggtgttcagaacttggtggacaccaagaaggagattgagcgatacgcgaacgcaccggtctctttccacttcagtggaatcgtctctccttgggtccagcgagcgctcgtcgcaggaggtttcggaatcggaacccaaactggtcccgcccctgcccatgtcgctaccgtcgttccccagttctcggacaacctccgatccgtccaggatgatcccgagggtcagatcacgctcgccaggaacaccaccgtgaccgggcatcagcgacgacgagaagaatacgcggaagagaagctcaaggctgagtcgctggacggacagtccgaggtgtttgagcccctgatcagctcgaagactccttacttccactttgatctagaggaggccgtccgagctgctacggctgatgctcgaagggaacgaccggtgtccgaggattttgacgtctcgttctctgctcactaaatcgaacgagtctttgtttctttcttcacgatctctctctctctatcttgagacttgcactttattgcttcatgtccctcctccaaaaaatcagtattcactcttgtccctgcttgctgcttcccagtttcccgtttctgtacatcactggcattgttttaatctcttctccaaaaaaaaaaacacactctatctttctctcttctccggtctcataatgacgtctattttcttgcctagacgtatggtgtgaaaacatttggtccttgctcctcttagttgtaaattcttccttttcttattcgcttctatcttctctccctcgagggaaaaaaccccacaaataatcttattgcattatgacgattataaccaagaacgttttctcttacatcacaaccgtacacacagaagcagaaggaaaagaaatagacgagaaacagtagcgacaattaaaaaggagaaaacaaaacaaaacaaaacaaaacaaaacggaacaggagtttcttttctatctcaataaaagatggaatcggcaacgaaccgctccatctgtctccagtccgctcggtcctttcctccagcccaaaggtaaccatctaatccggtatccgatagactggctctcatccattcgtattcttttccttcgtccctctccagaccattttctcggacgaggtccacacacgcctggagagcgtggacggaggatgagcggaggatcgtagcttgctctgtcgaaagttccggtccacctttcggactaggaccagaaccacgacctttctcgtccgacgatgaagccggcgcagggacgaaaggtctcaagagtgggttcgtcgacgccggttccagttttgggaattgcccaaggatcgatgaagacactgggagttcgactaggttcaggtagaccgacaaggaaggaatgacgttatcggcaaacgtaggtaggaacgttgtcgtgtttttggggagctcgggaaacgggttcgtcgggtcggttgtaaaccggagggagatggtgtggaggaggaagagagccttcttgaacaagtacacggctgcagtgggagaaacaacaggcaattaacatgggaacaagcactcatcggtctctgcaaataaaaggtggaacggagatgaagaaggaaaagactactcacgctgatcgtcgatcatgtacatatctctaaacgctgggaacgtttccaccaaccctccgatcaatcgatccgatacttcctcgtccttatccaattcttcggccttggcatctttcagcaagctcactatgaattcacctagactgccaaacccctgatcgagcaagatcgatcctgtctgagtcatcacgccatgaaccatgaggacaaactctcggagccttccaccgggttcaccaacgacgattcctggtagcgtcggatgaggcttctcgaccatcatcggtagtccacccatcaagcttgccacctcgttctcggtcagccgtttcattccctgtgcggacagatggtccgattcggtaagaaaacaggagagaacaaagaatcggatggtgtcgaagacccctcgtttgtagaacgcatggagtggggcacggaaggaagatccaaagtttaggagcgcgaggacggcgaggaggttgagctcttcaagaggtgaggagaacgagagtgggagtgaatgtccatggtcctgggagagtcggtcatagtctgcctgagaaattgatttgaggaaaggttcgattgttgaacgatcgatctatgtgtatgtgtgtgttgattcaaggaaagaaagaagatgattctgcaagtgagtagatggacgagcaagacagatctaaggatcgatgacccagccacacttaccttgatattctgggcggctaccagccttccagcagaccccctcactgacgagatgaacgttccctttgccggcaacggaggcgcgatggtgtgtgtgctcatggtgatgactcgatggacgttgagaagagaaagagatgcgaaggcgaaggaaactaaaaagccgaaggtcacgtgacttcggcgttgtccgattccttctctccatccttcggctctcttacatcctttcctttccattcctttgctttcctttctatccattctcttctctcctatctccatccacctgaacataaaccatcatgggcaccccgacggatgtccttcctgctaataatcatacgccgaatctcagaaaacctcttttgagagacaagttgtctatgcaatggcacaaggtctgcatccaaatcatcctcatcgttctgggtctaatcgctaaacatacctactttctcatcttcttgtttctggttctacctcgtctctagctcgacgctgttaggttcgggctactacggaaagccattgttgttctcacttttggattcttggcgggatcactgtctagatgggtcaatcagtcaatcccgccatcagcaactcattggacaccaatcctggaaataatcttgatcaattatgccatcgtccttatttgcgtctctcaacatgtcccttccattgagcacaacacgatagatcacaaggaagaggtcccagaagatacgctcccaagatcatggcataaggtccgtattcatatgactccctagatgtaaaggatcgaaaggctaaacgcgcccattcgccctacgatctcttcatctgatcgtaatctactcacagcctagtgctgcccagagtagattgttgtggtcagcattgctctggataacgttctattactggaagctcagagctccgccagtttcttcatcgttctccatcgatgctgctccccctctgatcagctcggccacgttccatcaacgacagctcactctggctcgaacgctgtacgcccaaaacatctcggcctatatatcggaaccatccccaaactcggcctattattacaacatctctgccgctgactggcatctatccgaacgatcgttcatctttgttctcactccagaggtcacgaccgagggttcaacgcgagctcgagtccgggtggttgtgccttcgttcgaagagacccgggcaaagacacagttaaatattgcggttcggtcggacggcatagagtatcttccttgggaagaaagtgaaagcccgtacgagtctctgaaagatctggctccgtctaaagctgaacaccgatcgacggtcctggtggatgagaatgccagagtgctagtagcaagtgagatccaagctgctttgggagacggggtagacgtccgagctagtacacgtgagatccgggagctgagggaacggaagacagaggaagagctggcgttgctgaagtatgtgaacgaggtaagatacttgtgtttgcccttttcgtttatctctaagttctaccgcttatctctctctctctttgcttatggacttgacagatgacactacacgctatccggcttctccgtcccaaactccatctgggaatcacagagacggaggcacaggcactcctcgtcaaggtgtacgactcgataggcttcaaagtcaaaagtagtctgctcctgtttggtcgtgcgtctgtttccttgtgttgcgttccggttatagtctaaatcaatcattcgtttgctttccaaagccaacgctgcgctgccccatgggtcctctgccgacagagtgctgcagaaggaagatcttgtgttggttgacactggcgcgagttatgggggatacgtagcagacatcactcggacgtttgcgctctcgaacagcgagatccccaaggaacatctgtatgtctttttacttggctatctatggtcgtggcctgtgagcaggctttgtgttcgtgtctcggatgttgacacccgtttgggatctataaagcgagatttgggatctcgtccgtcgagctcaacaagcagcctacgatcgggtgactctaggtgtgagagcatcagacatcgaccttgctgcccggcaggtgatcgccgaggacggtttggccgacaagtttacccatcgactaggacacggtttgtgtctttttcttccttctcttcttgtccacgcgctgtgactggatagctcatgcatgtgctttctcccggcacctggcgtgtcacgaatatatatatatatatctatacgtacacatagggatcggactcgaaggccacgaggcgccctatcttcacgccggtaacaccaacactactattcttcctgtgcgtcattgtgtggtccttgtccttctgtctctcggattcatcaggttctgaacactgaaaactgacgcgcgatgcaccgccatgtatgatcttggatgcgcatatctcattcttagggcaacacattctcgaatgagccaggggtctacatcgaagggcaggtcggagtcagattggaagattgctggttcatggatacggatggccacgcagtcagcttcaccgggcctgcaaagagtccttgggagatctgatgtgcgtgtgtgtgtttgtgtatgtgtaggcatcatgtgtatgatagattcgacatctcatctggagtgtgcagaggagccgcgtgaaagaaagtgactacaaagttcattagagaatctggcgagtttaatatagaccgagtgggaaaaagtgtaatgatgtgttttgtattccaatctcgaactttccctaatacacctactacaaaaaatcacaatccatttccctacaaaagtcagacaccatccggccgcctgacttttctcatcctttctctcaagcctgcggtaagctctttttgggtcttgcacgcgcttttgggaaagaaaggagtccccttgtcctttgaacaaagccctttgctcgacttgacaaaatgtgagcagctcctcttctcttttgttctgtatggtgtttcttttcgagtggatggtggcgtcgtcggagataagatgcttgaagaacgagtcatgttcttcctgggggagaactcgcttttggccatttttttccttctctttttcccgggaaggtgcatgttcttgggatatcaaaatcttggagttttatcaagaagccagaggacaggacaaacgtgtttcagagcacctagacagaataagagacaatcgattcggatggctgaccttggtactcgtttgatttctcttttcgtagggccaaagtgagtttctctgtttcccttggtagcccaacgaacgactcgacttcggcaaagataccaaaacacgttcctcaagaagcagcagcagtagtagtagcagcagcagcagagtgatcgtgaagaacccgtaacgagatgagaaggagatcgccaaacaaatgcagacaggcaagactgttaaatagatagggagcgaacgatgggaatcattaacaggccagacgaggggtcgacggagaagggaatagggaatagggagagaactcaggactgccaaccgacaagcaagcacatccatcaccagctcatacgagatcctttccaacggattccatcccagatacctttcttgatctgagctttctctcttgtctcgttaacgccatttgcaacgagccaatccttctcgaaacgaacccccatgtccttccaggatttccttttctcttctgaggaaaccatgccaaaattcccacaaaccgccgaaccatacttttcttcacaaatctttccgttcatgtcctccgaaacatatccttacgacctttcctctcgtcgttcctcgacttcttttttccttgtattttcttaaactctagtccaagaaccacaccgcccacaaccagaccaagaaggctcacaagaacgggatcaagaagcccaagcttaaccgacacccttctatgaacggtgttgaccctaaggttcgtattatgttctgattaacagagaacgcagtcagatctgtcttggagaaaaaaatctggcctcaaggtccatttcactgattcatgcttcttgactctcgatctacagttccgacgaaacttgaagttcgcccagctcggtacgcagaagctcctccgagctcagcgaaaggaggccaacggtgaggagcctgaggtcaagaagggttcgtctccagattcctttattctctcttactttttcttcaagaactcgagtatctaactggaatttcaaccccaatcctctggctatctctttctcccccctcttcttccttttcccctctaccaccatgtttcgaccggcctcacaggaaagggtggtttgaagatcgttgaataaaggactcttcgcgaccgatcgaagtgttttctttttttcttctctcctttccaatatttggaaaaggcttggatgactatggattccagacctctatgattctactgggaaagagaagacagaagaagaagaaagaacaccctcgagcgatgcttggcaactccttttattctatggatctcgttccatctcgtctcctctgtttctttgctctcctttccaagaggacgatcttaatcggaatatctggaaagacaggatgctgatcgagccaactagaggaggaaacggaacttgagagacatgggaaaagttgacttactaacagcttgggcctggattatatatatatatttactgactgactgatagatatcgtttgagctcaccttgctttagcatctgtaaattgaatgcctgccttgctcctgatacttttcttctctcaggcatacgtctcggctcgggtctcttcccatagtctggtccaatcataaccatgcctcgcacatctcttggagtcagaaccggtttgcgtttcgatctgactaaactttcaattaaactttctatatagaagatgtctctttggctcgaagagttggtctcactagacatatgcacttgtgcgagtgatagagaactggatatatcacccacctattccctcgtgtctctttccttttctcccagaacagacaagaggaagaacgaaagaaagaaagagagagaggaagaaatcggataggaatggaagaaaacgttgaacgatcggacgtatgacagtcgtacagggcgagcatgttcttcgatggatctagtgatatacatacacctgtacaggagaataagatgaacgacgatggtcatcccttgggacaaccacacatcgtgttgtcgctgccgtcatcggcttcggttttctcatctgtcaagaaggggcgcaaccagcggtttcttttctcacagagagagagtatgtgtgtgcgtgtatttctccccatcaatccgtgtgcgcatgtacgtcctactgcaaatatcgcgagccccgatccaaactcggtttcaagctcgcttatgggttcaagatcttgcgttcggttcccgaccgagacgggggctgggacaaaaacgccggacgtgacccgaaccggacttgactgacgatctcgagtgggacatcccatgcttcgggcacagcatcgtccgctacgaggtcgtacatcgtcaagttggccgactcgtccatcacatggtcatgatccgggtaggccgagtaagcggtcgtgtgggatggaatcttcatccccttttgatctgtgcgtacacacacacacacacacagggccaaggagaacagggttatcccccgtcggaatcataaaacgctcctgacaaagaaaaaaaaaacgattgagaggggagggacaaagcgggctgaaacgaaccagaaacgtaagaggacgatgagattggaggcgtgttgaataacatgagagacgcatatccgatgtatgtcgcccagatgagaaccatcgagtaggcgggaacaaggattgcccattctctgtgttccatttgacccgttaaggaaacgacgaggaggaggaggacaaacaaccgaacaaaaactatgaaaacgattagttttggcgttccgagagaatcgtaaacaacatcatcctcatacaccaccgtgatcagaccggagagggaaggagtgagcgaacgaaccgattaggataccatgagattccgtatcgttcgagtactgaactaggcaagaacgcccagagcaagtagacgactgcagctacctactcggatgaaaagtcaagtcatcatcgtcgcccaccggtttccaataagtccagatgttctatacgcaaactcaaaaagactagaaaggaagagaggcagatatatgtgcgagagaaagagaagagagagaaagacacacagtcgtccctatggcagctacgaatccaacgacctctgtttcattcggatggcttgcctgtcgtccgtcctcgcctgtagattgacgaggacgaggaggccaaggtgagatgggtagattggtgaatgccgttggcgagcttggggtctgaaccgtcatccggcaggcatccaggcaagatatgacgatgactgttcaagaggagaaacagaagaagaacgtatgtgcgtctgattgtgttacgtctctctagaggaggagaaagatatacgtctcaagcaagagagacagatgattgctcaacaggagaaggagaagatcaattcaggatctcatgaatgaatcacacatgttcggttggttttcatcgagtacagcagagatggcgagttgaatgtttttctcagcaggtctctgttctctagtctggatcgccagaggtctcaacgtctgggcagcagtggtgatgacgagaacggcgccgatgacgatgtagatgtaagtgacgatgagaccaagaactgtttccagtacatcaaacaactgtctctcaagcgggctcacacaacacacgtagaccttcaagaacacacccgctcgacagagtgccccatatggaactcccaggcgtgcattggagatgaagaagaaaagtgtgtactcgtcgatggcaaagagaataaaaactgaggccatgcacataacgatcccaaacccctcctctgtttgtccgtccttccttccttccttcctgctgttctttcatatcgacaacactccagttactcaaacaacttaaacggactctgtttaggggcaagacacaaacacagcgggatcgagattaaagtatcaaccaacaagccaagccaaaccaaaacacgacggtcagccaatcagacgtcatctcggaggaacaacgacactttcatgtttgcaaagacatgggaaccaaacaacgtaccggcaaggagggcgttaagcttgttgaccttggtggaagcagaaagatcgagggtcttgtctccaaagtcgacgatcaatccaccgagaatggaagggttgaccctgttgacgatcttcaaagtctttcccttagcactctcgcttcccttcaacgcagtctccaatcgagtctggacggccttctcaagaggctcagccgaggtaacgatcacctcgagctctccgttgtgtgccttgaagagggtctcaaagtccttgaggacctcggaggtcgaggtgagtcggccgttggcggaaaggacggagaggaggttggacgagatctgtgcatgagaaaagaccagtacgagggcagaggaaaagatggaggatggaacggtgacggcacaagaagaaagagaatgaaagtatttggtttgacaaggaaggtgatgatgatggatgtcgggcaaggaaatcaagacaaatcgaaattagatgtcgttgagaactctgggaaacaatctggcagaacgaacctcggaggccttggggatcttggagaagatggccttgaggttggcctctcgctcctgggaggagatggtggggttctctgtcgatggtttggtgaaaaaaaggagataaagaagaaggatagaatcagtctctcgctttcagtcaagggaggaaaaaacccctcgctagatcgttcgtccaaccagacggttcttccttgtgatcccatctcgtctgacggtttatccttctttgaacacgtttcctccacgagaaaacccatcgatccttcccaagatcaacaccgattgaaaaaagaactcaccaaggaaggcaacgctcttgtccttcttctggatgagctcggccaaggcagcgagatccttctggacttgagcgagggtctgggaggactgggagagggctccggtgaaggcagcggtagcgtacttgccggaaagggattggagctgaagaggaggctgtaaaaaacagagcacaagcacaaagagaaccggacacagccgagacagaggtcagccatcatcgtcaatcttggaggaaagaaggatgagagggaaaaaccaagaacgaaaaaaaaagtagacacgaaatagaagagatttctttgatgcagataaaaaccccatcggaggaggagaaagtcagggaaaaaacgggaaacaaaaacgtacggtgaccttggcggtagtagcgtaagaccgcttgatggaagaggcgacggcagatcgaacggcgaacataatagagactgaaagcaaacgagacgagcgtggtgagggagcaagacagaggaggaagaacgggaaacttgaaggtgacaaagtgtaggcggggtgtgcgtaaccatgggttgtgatcgtgacgcgtaaccaagacgcgtaaccaggacgcgtagccatcgagcgtaaccatgggtcaatcatccactacgcctctctctgctatactagagtacaggcagctggcccttctgctcgttctccttctgttcttgctgtacgtggatcttcttgcgttggtcgttcgtgtggtactgatatagtatgcgcgtgtctctgttcatcggttgtttcgtgttgacagagctgtgtgggcaaaggtttcctcggttgatcctcgcagacgcttgatctaccatcagccatcccttcggacacagccgatcaactcgcttctacacctcaccaaggatcagccctcgaaggatcatagctttcttcaagagatagacaccacatgtttgagccgtatacgatctccgaacattctgtggaccttcttgagggtgatccaatcattcctggtatcccttggaaagcttcgacgacatgtccggtcgtggtaggcaatctagagattcttctcagagacgctctcatgctgagatcgactgccggcttgcaagagagagcagaggaggaggatgataccgacggtcacagaagaaaacgaacaaggattcaatcagacgagccagacgatgcacaagtcgtttgtggtcgctctgaacgaggtacgaccgtttgaattaccggagatatcccagtgcttaaaccagacaagaggccaacgttgtctttaatttcggttttttttttcctttctttctttctttcttccttccttttatcttcgttctgatcaagtggaaaccctcaaacgacccaggaccaaatgtactcagcatcacctgttcgaccataccttcctcttgcactgcttcaatccttctctacaggatgaatcaatggaagtcgatcagtccgacgatcggttgggcgagctgatgagtgtcttgcaatctgaagaggctcaagcgctctttcgtagcacatcagaaagtaaagtcgatctaggaagagtccatcttagcgtagcacgtgacggaataggtctagtgtcccgtcggttgctagagatcctccaggaaaccctggaacaggccgagaacgaacaagacgacgagagcgaagtccgagagaagaaagcagggcgcagaaaaaagtggagaggtcccaaggctgatcgggacaaagagatttctgctctagttctcgtaatagacagattaataacgtattcagaatgggcgatcgcgagtggatatgactctgatttggattcaagaaaggtgagatacctctccttttccttcttagagacagcagaattgggtggtgactgatacacaaattcatatcactcggccgactagtccactctcacatggctgtcctctcttgtcaccctggccgcactccctgatccgccggtggttatatcgagcacactgaaactgagcatgcctcattgccgagatggcactgctattctgcctgaaactagattcactctcgagctcgacatgagtgtcaacttgctctggtctacgtctctaaatacgacttcaaacgctcttcaagctcagcatctactcttttcatcaatttttcctccaccggaggctccctcaaactacaaaaatcatcaccattcgaccaccttgccgttcttctacgatagtctccggccatctcctccgttcacagccgaggaaaaggtcgaggaagagtcaatgcagccatccgaactactgccgaatcttcttccttttcaaaagcggaccgtcaggtggatgttagccagggaaggttacacgttttctcctggcaataaagagttggccggagaacccaacatcagtgaatggaacaccaccgttccgcccggggacggaaccatcggttggcaacacatcagcctgcccctcaagtcggctccgccgatcggacgatccgtcaagcaagaaatggatacggtcacgcgcagtatagaagacgaccatccaggactgtggttcgatcgggtgactggctggattgtaaggacaaaagaagaggtccagtcatttgcgatgaaccgatcgctagaacgtgttaacggaggcatgctttgcgaagaaatgggtaggcaaacacatttagctccttgtcttgtgttttctctctctcgcaatgtggaaagaatgagtagcaccaattctgatagggttggcctgtcgtgcggcataatcattgaaaacagggttgggaaagaccttagagatcatctctctcatccttcttcatccgagatctgctttggccaacaacatcacgttcgaccaggaggctcagctttatacccgacagttcaaggtacagcagctctgcctcgtttttcttgttgtcactactgctatcacgaaacgaatgcaaacatgaagcagctaatgaattctcgtgtatcaggccacattgatcgtcgctcctcagacattggtaaaacagtggaagaacgagatcaagagcctagcgccccagctaaaagtgtttgtctacacgggctacaagaaccttccattcgaggtgacgacaaatgcgtgagtgactatgtccacggcacgatctgaagcgcaaccactagagagatttctatcatcagatagcccctttctgataatgcgttcttcctgttcccggtttcttttaaaaagatatatcaaagaattacaaagtcgagtgagccatgatctattatgccttaatgaagcagcgtccttcatactcactcgcatgcatctaatgtctgtgtcgcctgcggtatacgctcggtcgatgataatcaagaaatcaaagacaatagcctcctctcaaaatgaggaaggaaatgatgtcgcgcaaggagaaaaccgatggtggctatttctagaggaaggagattacgatgtggtcatcactacatatgcgtaagccataggtctgtcgtgcaacactgtatcggccctataactgaactcttctccttgggttgatgaatgttgggaggcaattccagtgtgctcaaagccgatttggaggttgccgttcatcatgccgcacggcccagaaggagttagtgtctactcccaagtttttgtcgtccagttgatggtaatggccatgttgacagttttatccatctgctgtagatcaagcgacatattcggatacgccgaaatctagatctcctctggtgatggtcgaggtcagtatcagaaaaccgttgctcttttccctcttcgtcgtttgtttggtcgcctgctagtgctgatcattggaaagttttaacctgctctatcagtggtggagagtagtgatggatgaggtaagggcccaatgaatcatacctgtctttctcgcaatgtgatttacctgctttgctggctatcgtgttcttttcaaggttcaaatgcagggggacggtaaagcagcagagatggtctcgcttcttcctaggcaaaactcgttcgctgtttctggaacgccggcgaaggatcacgtcaaggatttgcagcacgctttgaagtttgtcttgccaggtccttcattcccattctctgttcttgcagttctcaatgctaacgatagatgttacctcctcagattcttgcgggttccgctttttggatccaacatcaagttatggaatcgccttcttacacctgcgctagcctctgctttcgaacaggtatttgctaccatcgctaccagtaagtggttcctccataatccgtatagagcgtagttggtggaaactacatcacagatttggattattggatgatcaacaggaactactaaggcgctagttagacatgaactcaaggtatggaaacatcaggttgctcacgaaagtaatctgatttttagtcgttcaagatgctgtcttttccttttagataccccctcaaacccgatacttgtttcctgttgagtccaactctcgttgatctatagcacgaacaggccataaacgcttaccttgatatatcacttgaaacctgccagatcaatttgacggcaatcgagcaacactactactcagatacctttcaccgggcccttcaagatctgggtttcgattgggacggaaacggatttgagctagatctggccaaggcgagaggctgggttagcacgctccggcgtgagtcctttctatccactatgcctcgttttcttctcgaacgtctcgttcgaatcgctcatcttccttcggcgtatcttgatcagaaatcgctacgcactatcaggtgggcgacctgacgtcgaaccgaatgaccgatagaccgatcgctaggtttcgactcggcgggaatttgttgagtgtcgatgaggttcttcagaaaatgatggattccggagatggagagatcttgacacttcgacataaattggtcagatccgatttcttctctcgctacgatgcgagcaactcctaaccacgcgccttcttgttttccggtatgaacacaccgaattctatagctcaatctaaggataaatggtatcatcgtctcctatgtatgacaggtatttctggaggttgactaacttatatcatatccatgttttcgatctgtgtttcaacagatggatttttgctatgtcattcgccgcaagaccctcgagtcgagcaagaggaagctccacctgtcgatcaaccgaccgaggcggacagtgaggttcttccgacgtatgaccaggtctcatgtctgagggctgcagctgtacgtccatatcgctcttgggtttattccccgcaaggggtccgctctagccatgattgttgtgttctcacttccttctcggttcctccgcatagatatacgaaggcgttcttgaacaggtttcaaccatcgtttccgatcttacatcacgtctcgaacgggaccaaatcgccggtttgggatctctagtcgacgagtccagtctcgagattgacgacgatcgcatgtggacttatgaatccttaacgaggagaatatccgagttcaaattgacgaagcatcgcgttctctttttcctcgctaattaccaccatgtgatgaacaacgttgagttggagaatgacttttacgagaaagcggagagtctcagacaggatctattattgcgtgagttactcagctcttccccttctcgtatatcaacagacctgtcgtcgaagagaggtaactcaccgttcaagatttcataatctgacccaccacttgttaataatgacttatgagcacaggatacgtcgaggatgttgataaagcgaccaaagaactaaagaatagaaatcagaatgttcaaaaaactgactttgcgatcgaactttgtggattgtcagtgaccttctcctccatcttttctctgtcatccagactatcaagtttcgaaagatttagactgatcatattttgtgaatgttataattgaactaggagcggcattcgttcaagggatatatgcttgagagcgaacgtcgtgatcagactgttactgtcaaactctgtcttactgtaagaccttcttgatcttctctactgactaggaagtgttatctcttctgattggcttcgtactactcggccttctttatctcatccctcaccagttggtattggcgatccaagctcgaagaacttcttgccacacctatcgtcatagaagcttctgaacaagaagagagtattgatgcctatgcgcaaagtgaagtctctttttcccttgttttgtcgctgatgatcctacaagactgaatgtatcgatactgtgaaaatttaggtcttgacatacaaagcgatgtggaagcttatctccaagcctatacgtctgcgatcgcagagtgagtcccgacctttcaccgcaaaaatgcatcctagaggctgacatgatatctgtctctattcctgcgatcttgatgacagccgacaggagattatgctaggtgagatagtatcatgctgattcgcataccttgctatgttcgtcctattcactaatgtctccgtcaacagagacacgtacggaactggacgttgttgatagtcgggtcataaaagaacgacgctcaaagaactctcgacaaggcaccggagcagaatccgccttggaccagccgttgagcaagaaactcatggccgaacgagcggctctcaggttgaatcctgcccctccaaaacgtggagaagaaggacggaaatgtttgaaagcacatgtcttcagactcaacgaaattaccgaatacggaggttggtgtatattttgtcgcatgatagatatccatttaattatgacaaagtatgactaatccttccctcacataatcgcaatctatacgtctggatacctcttcctgcgcacttcaggtagccatatggagagagctattgccgaacaagaagcaaccagactacatgccgttatctccaaacagaccaagattttggaagctctccgatccgagctagtcggctttcgaaacgcatttaacgctcgtgtcaagtatttcaagtgagggggagtttcttcttctcgatcgacagagatgtcaaccatttctcatttcttttccgatctcgcttggttttcgactgtacaggcaacttcagcagatatccgactcagttacagatgttgcttacgagctaggtgacgggaagatgagtataagaaagcaactgagaagcaacgaaggttagtatcacctttacagaaccgaaagagtcagagtctgatatcgctagggttgtactgttacagagagagagcagaatttgtcttcggacatacacaatctggttgcgtgagtagtattctgatgtatctcgtttcgtggcttcagcactgatactctacgagggctttcgtcatcctcggttttctataagtttacaacgctatcgatcaaatatgcgtctaggtctggccgaagcaaacagaaactgtgtcatctgtctggaagagttcttcgatcgaggcatgttgttaggtaagttctttttgaaatagattttgagcaacgacctaccaattgacgcgtatctcttttcagaatgctcgcatatgttttgtcaaggtttgtttttcccttattgtggcttccagtgaacgcactaacctcactccgtatgctgcgtacatgcttacttccaccatttgaagcttgctaccggagtttgatccagaggagcaaggcctgtccggtctgtagaacacaaatcaatccgagaactgtgagcgatacctttcgtcccgtaagcgcaagactttagccaggagctgacttgttatatttgtccacgttgaataggctcatcgaatcattttccaaaaccgaccctcgcttgaagcaacaaaggaaatcccaattaagagcgacactgctgcttctaaaccggtcgcattcaagacagacactctctcgaatctgaatatggtgtctgctgacgaaatatcgcagatttcgagcatgtctctgtttggagactggtaagcacgctccgttgcaatagccaatcaatatttcaaggcctgactgcatggtaatgttcgtttgtattcgccgatcatacaggggtagcaagattaataccatggttcagcatttactctatctccgaaaaactgatctaggttcgaaagccgtcctcttcactgcgtgagtttgaatcatcttgtctgctgtcttcggttgggtggacttgaactacgaagatgacacaaacaactttcctctcttagttatcctgatgcattagtgagtcgtgaataccaaaacaatccgtctgagattgtcagaatgttgatgtcgtcgtggtctttttgatacttggaactcgatcagaacatcctggaacaggctttaaaatctaacggtatccgatattgtggaagcttcaaaggtccaaaagctgccagcgagtttaaaaggttggtcttctctcttcctttctcactctagtctgtatgatttagctattgatccaaggttattttttgactcagtgacccaaatatccaatgctacttgcttagtggggtaaggcccatgtatctggcttcttatccatttgtctaataactgactcggatacaatattgttcgtgcgcatatcaaaactaggagaaggaaagcgctggcctgactctgacggaggcacgatatgtatttctgatggagcctactgtctgtgagtcggcagtgattttttgttgcctgagaaatcccccttgatataatccggtctatttactagatctactaatatcatgtttccatcgcgatgtctcacaacagccccaagttttgagctacaggctattggacggattgaacggatcggacagaagcaaactaccaaagtgttctgtgagtgatgttgtttgcgaatatgatggcacgtcagttcgatctgtacatctgaccttctcttatgcacgtacgtgaaaggctactactctacggatactctcgatgaggccattgtacggttgacaggtgagccggattcatgtagatgctttggattgttagaatttcaacacgggctgaaatctccctcattgtatgctccgtcagctttcaagggtcattcaatctatgagcgcgaggccatcggttccgggctgcctatcgatgctacccgaccggacgaaggtgttgatggctacaaacccaagaaaatcggagattacatcgccctctcggatgattgtgagcctctatatgtcttatacatctctccgatcctgtattcgatcgacggcccacccttcgaatccatactgatgtatactttctgacttatctggtagtggctgcactcttgtttccagaccggcatcttccctccaacggagatgaacatacagctatagatctcaaagaatccaagactctggattctaaagtttctaatctgactcgggatccaagatttactgatcaggacggacaacccatcccaggctcttctcgctggatataattagtgtttgacccatagatattgatgtcgttctgagtgtgtcgcgggatcaagcttacttaatctttggatcggaggtgtccgcctgccagccgattgatgatgtattttccacggaaccgcacaactttgaaatctctccattcccgctctccatcattggagacattggtagcaaagcaggatgaatcaatccacagaagctgcacagtatacgatgctgacaatccctccaccacctccatacgacctcatcattgatgatttgacgatcgggtttcctccgtcgcgtaggtctcttatccctcaagcaatcttctccaagctccttgaaaagaaagccaatggctcggatggcgaaaagatgaacgaggacgggccgcctgaagagagctcgtccaagaaggggatcataagaaacgtctcagggagatgtgaggctggagaagtgctggccatcatcggtggagtgagtgccgatctaatctagacctggttagcttccactttggagagtacacgttcagatagagacttagacttatgtattgataccattagtctggaagtggcaagacaacccttctcaacctgattgccaatcgactcggaagtaccctcccgactctctcgggcagtatcgtcttccgctcagctcaagatcggctcgactctacttcttccactgaagtacagcagaagagcggccaggaagagaaagaggagctcaaaggtgaacacagtgatcaaaaacttctgaaagaggttggaaagagaattggctacgtcaaacagtcggactttcttcttccacatttgacaggtgtgtcatgtgtctctatttgtgcttcgagagatgtagaagtcaggccgttgactgaggcatatgtatgtctaatactatttgggtcgggtttggcttggcttggtcgatcgacagtaagagaaacgttgaggtttgcggccgctcttcggttacctacgagtgtgagcaaatcggagagagaattaatcgtcgaacagactatccaggagcttggtctgaaagacgcagccgagaccgttgtcggaggcgcctcccgtaaaggaatctcgggaggagaaaagaggttggtctgagtttctttggttcttgttagaagggtggtcctctgcacactttctatctctaatgcccgtcttgagatgtttttagacgtctctcgatcggatgtgtgttagtgaccttaccgtcaattttggtgctagatgaggttcgtacttcgcctcttctttcttctttttctctgtttcttaatctggctcgtatgattctcaccaacttatactgttcgtaaaactgactggccttcaaaagccaacgagcggactggatgctttcacgtcccatctcctcctcgaaacgctttcccagttggccaaaagaaaccgaacagttgttctctcgttacacgcccctcggtcagacgcatttgggctattcgataagttactattgctaagtaaaggaaacgttgtttacagcgggccaacgcacaagagcttgccttggttcgaaagatgtggatggacgttggaagcaggaaccaatccgttaggttcgttggtttcttctaccttctggatgaaaccaagcgctgagagcctatcctttcttttattttcgctatctcttgtctaacatattcatcttgtgtcgaatgcaaaactagatttcatgattgatatctcgtcagtcgacaatagagactctgatcgtgaagatgaggtgtgtagtttttcaagtgattcttatgattggcctaccaacgactgaactatggtgccgatgtgggataacagtctctaaggcgtgtcaagaagctagttgatgcatggaaggcatcatctatagaatacctcaatatcaaacctgtcgctccatcgcatgatcgttcccctgaatgcatcctaaaagaagatagatctgttgaaccggtgccgtcactcacaaggtctcctgttggcaacgagctctccgcgccgtcgcctagctcagaccaggaaggtagtaaccggcctggttggtggttgcagacgggagtcctgaccaaaagagctcatctgaacgtgtatcggaactgggtttgtctctgcttgtctaaatcatgttccagtctgtagacgacactgactgtatctttgaactggtcggcaattgatttcgtggccatcttcatgggggtttagagtcaacttatcgggtttgccgtccaagctatcgtcatcggagctctcatggtaagatcctatttgttgtgattgcagacgtctatcttcatgacgtactcacaaggtgtcctcaaaaatcggtttcttccctttgttagggtttcacattcttccggctcggagagactgtagcagatgttcagagtatgaagaatataagttttcagcttgttccggcttacttctagtatgcatacgtctctcttttccttacctgcttgacggactatgttcaagctcaaacttgcatctgtttcgtcttctatagcttgacgcaagtgtattggattttcaactcttgcaacgctctcattatttttgatcgagaaagggaagatggtttatatgtccgtatactattatcactcagaatgccttctcatgaccaaaaatactcaacgtgtgctcaactctaagggggttatcccttacgttgtctctgagttcttatctaacctcctcccttcaatcttggcgccttcaatatagtaaggctaaattggctcaatctcatcatctttttgctgtctgatcagttgcttgattatctcctagcgtcatcctggtgtatacgatggcagggctacgcgacgacgactatgctgccaacttgttcactatagttgcaagctcggtcattgtacaatgggccactcaaggcctggctttattcagcgcatctgttcttgtacgctatcatcacattcttcatatgtaacatacttcagtgttatatacagtgctcatgtttgaacacttgttgctctatcaaactcgttgaattgcttccttgtagaggccgttcgctcaagcttcgtaagtaatattagattctcagagatggcgaggcattcctaagaacgaccacttatattctggggttttgcttctacggatatagagttatatgtgttagtgctttcttcttatttgacatcaagtaacacatttagtaatccatgattttgtccttggatcgaatctcttagaatgctgtgagttattgaatattgacgttgtaacgacacggaagtgtagtaaacggttaacggtttccaccctttgttttgagtagctttcgctattccaaacgatgtctgcagggtttcttctggtgaacgttcccccttgggtttcctggatccgttggacgtaggtctaagccctctatcgtgttcacgtatactgctactaatcacaaccctgaatacttgtatatattctcgtccagcgctccacaattttattcatacaggattgttgcgcccacactactaagaaaccgcacattcagctgtccaggagttgtaggagttgaactgaatcaggtaacatcgtttctctttcttatgattcttgcgggtgtttatgttagctgagaatatcaactgatcctgttaattactgggctatcagtgtgacggtaacaaagtgctcgttgggctcaagattaataatgtcaatatcggagtctactttgcaggattgattggtgtggcattggtgtatgtacttcggctgaagacttcttctcagcttgttgtgctgatctactttctttctgttcgatctagcgaatactctctggcatgcctcatcttgcaggtacttccatttgcgtcaaatacaagagcacgacactggctatattattaatgttgcattcgcttctctcctcataggtgtaccatccaggaggagtaaagtttgcttcgcaagtcagtcctgaaggtcgagggaaagagtctgctgtgactggtgatatggacatctcgcgagctaggatcaatgtcgaggtacatgacttttccaaacatctgtgttgactagaaataatgttttaagtatgattcgtaccctcttcgaactctcttcaggtccgccatatatcactcagctggtaccgtcgctcattctggccgttcttcgaatcatcaaataagacaattttgaaggacatctctgcagtcttccctgcaggtacgttatttttttatgtctaaatcatttaacaataaggtcttatgaagaatgggttttcttgtaccaggtcaagtttctgccatcataggaccttctggagcaggaaagtctactgtgttacagttgctatcccatcgacatctgaatgctggatctctaggtggcttcaaattcgaaggttcgctgttatataacggcggacctgcgactaaagagataaaggctgccatagcgtttgttgaacaggatgatgactatcatctatcgtaagtgtcttcggtcgtcatgactatgcttctggttctaacagtgcagaatttcgatttttcttacagtgggttgaccgttcgggaaacgttgcgatatgcggctatccttcggttacccaacacgatgagccgtaaaaataagctgtacatcctcgcagactttgtcttagtattttatctttagttctgaccatacatctaatatgttgtttaatctcataatcagagcgcgggcagaggagtaagtgaacattttgtgtcgactctcaaacaggggcttacatagagattcaaattatttcgtagggtcctccttatgcttggtttgaaggactgcgctaacgtgctcgtcggaggcgccttggttaaaggtaagactttagatccagtcttaaatgtctgatgagctgaacactaaccactacgtttcataggtatctctggtggagaaaaacgacgactgtcgttggccgttcagatgataaacgatccgtcaatcctcatcgtagatgaacccacgagcggcttagatgcgttcattgcgtgagggtttctctctagagtgtaattgagttatgatatccgattggcatctaactcgatctgattcaattatctatcgacagtaacaacgtgatgcagtgtttagtgagtctatctatgatattaaattacgccgcacgtcgaaaaggatttctgagcagcgttctgtatggatagacggatattgcacacagtggtcgaacagtcattggtgagttcaaagatactttcttctctgaatcgccatgctcatcgctgcctctttcaacatgttagctactattcatcaaccccgatcagatatcgtcaaaggtcggtctgtatttcttcaagatatttctacagtcaattgacgtcctctttggtgtgcagcattcgacaacctatgcgttctagcaaagggtggtgccgttgtgttttcgggtccaaacgtagaggcaattccatggttcgaggctcatggattccctcttcagtttggtaatcctgcggatcacatcttggacgttatttctatagacaggtcagtccgtcaacaatgatactcgctatcgctgaaactcctgatttcttaaacgtccgtacatcacttgaaacagccgcccgggaaaagaagatgagtcgagagagcgcgtgaatgggctcattgattcttggaaagatcgaacaaccaagtccgatatcatcgccgatcgagcctctatccattcggatgacctggcgtctgaggcagctgaggttagaatgacaccattctatgtggccttgcctacagtactccaccggatggtgttgaacctttatagacaaagagatgtaggttgagcttttctttgtgctgttttggttcgatattcaatcggctgatcactctgagtaacatggtgatgtataggcattttggaaccggctaagtcaggcccctttactaggagtcttgttcctaattttttatactagactcaagagagaagaatctggcgctcaggatcggattggaatcactgccgagaatgtgaacgctatgccattcgtcggtctgctcagtatgtaaagctccatatggattttctcttcttcagttagacatactgttcgctgagccgatgagttccacagatggaattgccatctttccccaagacagaaatctgttctttcacgaatatcggagttccgccacgtattcggcattcactttgtgagtaccgatgatggtggtgctcgtctctatgactacaagatacttacccaccgacgactctaatccgaacagcatcgtcgcctacacgttcttcgagctatctatgacagtgtttgcgtctttcttctacggcctcctgatgaacgttgccgttggtctccagacgagttatcggatttgtgagtctagtcgtggtttactggtggtacaaaacacatactgatcgattcttgttctgtctggttcttagatatcgaattctgcgtttcaatatgggcgatcttgagcttcggagaggtaagatatgtcgatcgattgcacttatttctcggtattggctaacccctcgggtgaactcgttctagtcaatttcgatctgtctcgcctcgttcgcttcagagacagggttggctgtgagctatatatcgaccgtactggctgtgttctgtcagatttcggtatgttaacttcctctgcacgatgccatacaagcgaggtatttttgagagggtgtcttgacttggggttttgttttgtttttttactttctcttatcttagggtatcatctcactttctgtaccgaactggtaagtacgatagttgctgatgatgaggaggagcatcggtaggatactgttgactgacgcagagtcttctatgtacacttaggctcgcgggtattgcctgggttactccattaaaggtgagagagaaaagacaagatttctcattctccgagatcctctgtacagccagaaagaagaactgaccaccaactcgatgtgatcgatctaggcagcaacaaagattcaattcattaacgaggctcgaaacttgactgttcgttcttgattcttgtccaccttgtcggcgtggtgcgaatcttaccaagatttctcattctgtttttcttttctttctgttgggtagttttcgtgttctcctgaatcaatcgaatctggtgcggccagtcctttttttttctcttcatttccttctgtcctttgttgttgttttattttcttcttctctttttcaactcaaaaaagaagactttgctttctggatgaacgatggactaacaacgtatctatcgaccggacgggccatgaaatccaggcgcctgtgtggccacatctggtaatgaccttctcatctctctaggattttacgatctgaataccgaaaagtttgtaggtatcctggtcgctaccgtgcgtcccttctgcctcttccttttcttttctcttctaatcaattggctaagtcaacaaacactgatctaaaaacggagcatggtgtgggctggattgggacggaaatgcaatttgggatacaggcaatcggctggagaggtctttcatggctcgctctgcggttgaaactcgcgctgtcgacttgagttccgggatggaatgagggaaggatgttt

SEQ ID NO: 2289 - DNA, 55294 bp, Xanthophyllomyces dendrorhous
gtctagatgtggaccaatgtatcttgaaatcatatgtctgtgtctgtgtctctcaaatagagatgatccgatttaatgtactcaatgaaaaggaaaagtcacaaatgacacaattcaaatgaacgcgatgagtggaaatcaataaaattaatatatctttttttttccgtctactctatattttcctgcaaatagacaaacaagatgaagaagaaagatgggaaaggatggataggaacgatatatcagagagaatagaaaggtcaagtagggaagagggaagaaaggtgtgaaggagatcgtcagatgtaggcccattttgggtcaaaatagagtcagataagaaaaagaagagatctcgttacaacggatttaaaaaaagctaagggaagaagaaaagaacgaattagaccaaggaattgacaagaaaatgaaccgaagagaaccgaaaggatgaaatgaaccaaaagaacaagaaaagaaaagaaaagaagaaacggcgtcagattatagaggccggaagacatatggaaaaaaaaagagacagaaagaaagaacagagtgccattctacatgaagagagaaaagatgacaagataaataacagatggacggaagaaaaagaaaaggacaaaacaaaacataaacaaagcaaaggggaggaagaactctagagagatgttttgtgggacggcacttcgggctcggctgctcctgctaatccagccgggggaaagtagctcttccggttgagacttcgtttacggccaagggtgtccacttttgccaatgagtgtactcgcgggtcgaacgccttgtctgcccgtggatacgctagcgggaactcggccagagggccgtccatccagggctctctcggtatactcggtgagtgcatcggtgatctgaacggagacgggcctgttgaagcgatggccgaggtgacggcggcagtggccggtgggagagatgagagggaaagcgagagatcggtgtgctttctcgaggtcgaggctgaccggttgagggtgtgtgagcctggaggggaggacgctctgctggaagtggcggaggcgccggtgggaaccctgtcgtggtcgtacaggtcgtcatcatcgtcgctgctgtcatcgtcagaatcgctccggtcgttcggatttctgagcgtgcgtgaaaaactgtggaaggaggaccgacggctgacgggtcgacgttcgggaacaggggatgagagcgaagtcttgcagtcgacacaaactctggagggtagtatgtgagttgagggagtgagggtaggagtcgacagggagtttacagatggggtggaaacagagacagagatgttggaagccaagagtgaggggggtgattgagacaacggagtcgagaccgtgctgggagccaagagtgctgaagaggggaagagcaacggatgggtgacggccgaacaagcctgacagaacacgaggccacatctttggaggagagtaacaaacggaattatttaaaactacagtcaaaccgtgtattcccgaaaagttctttttcccaaacaaagtggacctactttcgacaatggtgcttgcgttctttccaaaagccaaacctggtgccgcaacccggtcggtcacagacctcggcatctgcatctgctttccagagatctttaggaagagcggcctgccgttcttcgattagcaactttattggcgcactcggtgaggacggagtggattccgtctgactgtcttggacggagggagtgaagccggtaacggcaggatttgagagtgatggggcgacagagtaggctggagacggtgtccggacggaagatgagctcgaccgggaggtcgttgtctcgagtgaggacgagttctggaccaatggcggtgtagacgatgtgatacttggcgatggggagcctggatgagagcgagcgggagagtagtgaatgagatgggggggtgagaaaagaggaaggaggaaatgaaaatgagaatgaaaacagggcgccggatttagcgagatcttcattggacaggaagaggaggaaggagggaagaaaaaacctgggaagggaacgcgagggaaaagccaagaaggcaggagaaaaaaagggaagaaaggcgtgaagaacgaacctgaacgacttgctctcgaaagatccacctgagacaacctggccctccgaagatgctctttcgagcctggctccggccggactcctctgggacctgctctggcttcttcgtgtgtggacggaagtcggtttgggtcgctcggttcctgaggcgacagatggtgaggtttcgatgtaagcagggtcattatatgtgggtgtgcggatgctgaaattgctgtgtatgctgttggagtgggtgtgtggacgtgggagtgcttgtacaacagggtgtatgcgttgtggaagagaactaaatgggatgtatgcgttcgaccggatctgggtggatggaggaatcaggttggtgggtgggtgggaggatgggatggatgcacaaaagagatcaaggaaaagagaataaaggtgagaagctgagcgtatgggagaagggaaaaaagaaagaggccccaggggcaaggtgtcgttctctcgctcgctcgccctctctcgggaggtagaggcacctggcgagaggaagatacaggcacgttagagcaggaatatagtcagcccaggtacgtttttggaagatcgtccggtccttttccgctcgctctctccttctctccttctctaatgatgcctccgctggtctgaaggctgagtttggtgcatccgtagctgacggtcgacggccgacggccggatggatttcgtgtgaaaggacctatggccgctgcgcggctgagaatctgcgatcctgcgattcttccctgcattgagaatgcccggatcggcctgcgcgcttctccacttctccgcaagttgagggccgccaggtaaataaaaaaaagggctcaaccgaggatattggcttccccagtcaatgtaccagtagggcccgggcatggtttctttttttcttgatccggccatcggagcttccaattttaaccatcaacttctcagcgagccccgtcggggaatgggcggggacgtgaaattcccaaacaaggtttactctactttgtctaattctctttcttttcccctgatcgtcaatagttcattcgttcttccatccttgcttcctcccgggttgctttcacatgacatgtttaaagcccggttttcaccgagtcaatcccagccttcaccacagggagaggcaaagacaaacgagcgaccggtgattcgtctgtatgtgtgactggcaggttgaactctttattggcttactaacaaacgagacgatccctcttggaagccagtttctgttatcccacatatcttccactcttctccacagtcttctttgcattgcgtttggagtcaaaacgttgccgttgggcgctcccgggtttcatccctagccttttcctctggtttacgttgctttccatccaggttgctccctcttttggcccggacgatttattttgtcttattttggtcgtcaacgacaataataacaacaacaacaacaacaacaacaacaacaacaacaacaacaataacgatgatgagggtaataataacgatactaccagcagcaacgacgacatgaagaattggaagaacgaagaagaatggagcaaagacggatggtgaaaaaaagaaaaatacagagaaaatacagaggaaacaaatagacggaggcaaagaaatggagacaagatgagaaactagatcgtctcgtgttggcctttgacttgcttcatgttggtatgctttggtttgttctacttgtccttgatgtaattccttctcttattctttctcatgcgatctctcctttctcatctaccttttcactctcatcctctctttcctctcttttctctctttcctctctttcctctctttcctctctttcctctgctgatttgactgcgcgcgaacgagcgctgaaagtcgaaagaagtacaagtaggctgagaaagagtgacctcccggatggacgaatgaacgaatcaacggagatcttttaaacattctcagggatgacgatcagtgggtggaattggccgcaaatgttagggttacgattagtcacaccacggctcaggctcactctaggctcggtacctataaccattttttagccaggttactaacccttctattccaccttcagctcaatttcctaacctttaggcttcatacctcctggcttgaaatctcgacgtgagccatcaaacacgaccatacacaaggaatacagcgagcacatacacacacacacacacacatacatatacatggcattcgttacaatctctgggtttccttgctctgggaaatcgactttcgtcagcaagctagtcgaggatatagaacgaaggatggctcagccggattatgccggacctaccctcgatgttgccatcgtcagggatgatcttggacatgatggaaggataatctatgccggttcgttttcagcttcatctccctctagccatccttgtacttctcgccttcctccttctctctctctctgcttactcacgcctgatctcctcacccttgcttgcgtcctcttcgtttccaaagaaagcaagtcggaaaaaccagtccgagcatcatgtctgacaacagtaaacagaatgctctccaaaaagacaatcctgatatgtgacgggatgaattatatcaagggttatcggtatcagatgaattgtgccgcaaaggaggctggcgtcagaccttgtactgtttgtccttttctttctctccctttcttgtgttcacctctttctttctttctttctttctttctttctttctttctttctttctttctttctttcttttggaatcttcttctgttcttgtatatactcaagtttcttttctcactcacaaacattttccacctcttctctcatccagatccatgtggccagtccaccagagaagtgcaaagagtggaatgcttccagagatcaggctgaagcttatactgaatccacgttcgttctctcgtgtcttaagcagaacgtagtagctgactgagtgactaatgattgatctgtctcgaatggacatgcgcgcgctttctctctctctcttttttgtgctctctaaccactccccctccccctcttccaccccacaaaaaaaggcttgaagcactcatcatgagatttgaagaaccttcttctatggcccgttgggattccccattattcaccattggttgggacgatcagtctcttccattcgattccatctgggcagctatcaccagtggaatcaaaccaaaggcaaatccaagtgttgttcctgtgagctgttgtctcgttctcttttggcccttttcctcttcctttttctttcttccttagaagttctccttactcacccactcactcactcacttattctcttctgtaccttttctccctcggtcctttctgttgtcttctactcgctcgcgtatgcttgatagaacggccaaacggctccttctaccgtccaagcgctccactcgacaacatccacgttgataaccaccctactagcccacctgtcagacaacccgctttccacccatctccgacttccatccccaccgtacccatcgacagggttagccctgcccgcacggacgatcacgctgagtgaactacagagactgaaacgacagttcgagaccatccagctgcaaggcttcaagcgaggcggacagggcgtgctcagagcaggctggggagagagagagtggggagaggcctgggtcaagttcctagaaggtcaatggggtaccagagaatgggtcgatcaggtttagctcggggatcgtccttctgtaaagatctcagacggcttccctctctttttctctctgggcagtctttcctctttccttgctctttgggcctccttttcgattttgtctcttccctcctcctttttgtcaagacaggcaggagtatacaaagcagtcagtttagaaattattgtaaaaaaaaaatcaggaaagggatggcgacggccactctgttcaatcgtaccgactctcaacggagagcaaatgtctccggaagcacaagaaagaaagaaagcaagcaggatagagagaaaaccgcttgattgaattttatatcagggtacacattttatctacatccggcctgatccaaatgacaataaaacagaaggaagcaaagaaacaaccacccgatttagtctaccgatccgaaccctgttctgaactgttaaacacccagggcaaagaaaaagcattgggatactcacagtttcacaattcgaaaggcgttccgccagccttcaactttgtaccctgcttccaaccttttccttctccttttcctctcttcatctctgcctccatctcatcccatgagacgttcctgacttcgatcaactctttgatccttagaatcccaccggcagtagtcgcagaaaacggatggaagaccgttcggtcccgcttggtcaacccgagctgttcacatgtcgctctgaccttctcgggaagaccgatcgccgatcttctgagcgtgattctgtagtgagtgaccgggccggcggaaggtggtagctttttcttgtccttgttagatatgtggtgtaccgcaggaaacgggtattgtgatcgaagcgggtggtagtgagggaacgagcaattcggcggctgccgaggagcgatcttcttgttcaagtactggggctgtctcagccccatcgcttggagggatggtgtgagcctcatcttgggatgaggagattgagagccgagttggagggtgacgttaggagaatgaggatggtccgtctggttgtatgtccgagttggtagcgaagggaaaacgaaatgacccttagcgtgaatattcaagtattcaaatactgtcttatctaagtccccgccatctctcatcctcccatcctcccatcatcatcagcagcagcagcaacagcagcaccatcaccatcaccatcaccatcggcaggacctttctctctgtgtgtgcttttgttcgatgcccaaacagcccgcatccgctccatcggctccagcatggaggtcgttctcgttctttgagtcttctgtcgccaacttggaatctaccgctgcagatgttctccaggttggttctgacgttcttcagtagatagacatagaccaagactaaccctgtggttggttactctgttgctctctctctctctctctgtctcattcttggatcatttttctcacagatacctcaatcgatatctgttatcacaccttgctcggtctcaaaacatccaatccttttggcagattcggaaggtaacatttccactctatccgccacgttcagcccggtcttgtcctggctcgctttccccgaaggacggtgcacacatctgctcgaagcccgtggaatcgtcgttggtctaggagaagaacgtctgtctccgtatccgatcctcaagatttgggatctccttcatgttgacaaaaagacccaacgaccgatgttgctgaaaaatatcaagatacaacatggtggtcggccccatccggtctcggctgccgccctgacgacaaatctttctcatctggctgtcggtctgggagacggcacagttttactatacaggcatctgtcccaatcattggcttcgtctatctcttctacatcagccaccatctcgattgtcccttcatccacctcggcgtcttcctcgttgatctcgcttccgaaacctaaagtcttgctagacaacacgaacgagccgatcacaggattactctttagagaggaaccagcccgaccagccagcgcgacctccagatcgctcgtccctggtgatgtttacatctttgttgtcaccactaataaaaccatggttggtcaagccgagggaaaatcgaagaagctcggcggatcaatcactggtatgaccgtcggcgagcttagagtgttggatgatgtgggtggtaacttaggctgtactaccggcgtcgtcgtcgccgattcagacgccgaaggaggaggaggaggaggagaaggaagcggcctgagccaaactgaaaccaatgtaaactcgaaacagaccacaggttctggatcctcgaccgcgctcaatttagcggtcgctagagaagaagccatccatctatactccccctccggtcggctctcctcgttcgcatacgaaggtcccaaaagttccatctcaacattccctactataccgaccggtcgctcggttcccaactcttcacacacatcatcctcccttgtcatcgtctcgcctccgttcgttccgtcgtcgacctcaaccagtcagacggtcagaaatctggtgagggcacagcctgggctagtccaacatggtacagacatcagccggctcgctgtgctcgatcttgaaggaaagttcatcagctatagcggagcgttcaatcagggggtcaaacaggtcttttgcttgaacgacgtgatctgggttctcggaaatgacggcaaggtctgtcttctttgagctattctttctcttcctcttttctatcttctcttaccatgtaggctgacattgtggcctgttcttctctcgcactctttatctcgcagctgacaaaactagctcctctaccgctgaccgagtggttgacacacttcttctccaaacacttgttcgtcctcgccttgacactcgcccgatccaacaatctcggtagaccggtcatagcagatatccatcgtcggtatggcgatcacctgtacgcaaagtcagactttgaaggatccgtcgaccagtatatcaagacgctgggcgagctccaaccgagttatgttatccgaaaggtatgtctctcccttcctctggagtttcatttttgagggtttacgttgaaccgtcttttgattcttcttacgcgaatgggctcacttcgttggcatgtctctgtcgcgctggttctcttgtttcctttctttcttcctcacagtttcttgacgcgcagaggatcacccacctcacaacttacctacaagaacttcacgcggccaacttggccaactcggaccacactactcttctcctcaactgcttcaccaaaaccggtgatctgcctcgactcgaatccttccttcgaacttcatccttccccacatcgacaaattcggacaccaaggaactaccgttcgatctggataccgccatccgggtatgcagacaagccgggttttacgaccatgccatctttcttgccaaacgttggaagaagcatgatcagtattttgatatcatgattgaggatacccaacaatggggggcggctttggcctacttgaaagatttggaaccggaacaggttcgtatgacttcttcctcgtttagcgtgtcaacctcagctgacaagatcatcttgacactgtccgctcggtcgccggtccgatgaatacaggcccaagaaaatctcgttcgatacggcaagacgctcttgaaccaatccccgaaggaaaccaccgatctgttcattcatctatgtacccagccatccgcgccttcgccgagaccgtatcttgtccactttataggtcaccctgacgaactagttcgattcttggaagcggtagcctcctctcgttatgggttttccgccgaatcacccgtcaaaaacacatccaactccaccaagcctgctccgtcccaacctcctgcttacgacgtcgagctctctatggctgcatcctccgaaaaagacccagccgaccaaagggcagtgtggagcacattgttagagctttacctcctcttctggaagaagcagtcgctctcaagtctacagcgagaggtctaccgagccaaagcgttcagcttggtagaaaaagcaggggacgagcatgcttacgacataacggctgcgttgatcttgtgctcgaccagtgatttctccgaagggatggttctcctttgggaaaagttgggaatgtacgaggacgtcctccggttctggatggagaaggagaacgagagagaggtcgacgggtcgaacggacttgtttctccttctccatcctcacaacggcgaccatcagatgaagtgctgacccagctccgtatatatggacctatgaaccatcatctctacccgctcgtccttcggttcctgacctcttcgaacgcgcttctggcccgtcatcaggccgacgtagccgaggtgttggagataatcgacgaagagcggattatgcctacgttggagattgtcaaggtgtttggtagaaacgaggttgctagcgtgggaattgtgaaagattggttgaaagcgaaagtacaaggcatgcgtctggaggtagattccgtacgtggaacaatttatgtttctcctcttagccttcacaaacaagcttgtcatttacccaaccatccttctcgtctaatccaaatctcttttctctcccttcttccttcaggatcgtgttctgatgaactcttaccggacggaaacgagcgccaagctaaaagaggtcgaggcactgacggatgatactcaacctcaagtgttccaagtgacccggtgtgcttcgtgcggactcaacttggacctgccgactatccactatatgtgccgacattcctatcatcagaggtgcgttactgtcatccttggattgcggtttcttcttagatcctccatgttcgaggctttcattttttctttcctatgtgctaaacggtatctttattgttttatcaaacgaacgaacatcatttgagagaatcttagatgtctacccgaggttcacccagattgcccgttatgcgcaagtcagcacggtctcatccgggagatcaccgcgaaccacgctcgaaacagagacaatcacgagttgttcctcagcgaagttcaggagagcacgcatggtttcggcgtcgtcgctcatgggttcggccgaggagttattggtggatcgagcgcgacgagttagtcgggaaaatcgttcggggagacgtcttgcttcctcgttttgcttctttcaggtcacatcctcttgcttttcttgccttccctcattagattgtttgcattatatatataccctccgtcaagcttgtgagctcaccggtccatgtgcccacctgttggcgatgttcatactctgtctctctccggcatttctattcccttctattcttgaacaaaagaagaaaaaaaatgttgcgcatttgcacatgtactcttgttcgaattataacaagccgggctcattgggggtcatcgaatcgattgggtcgactcgaccgaaaggaacataaactcttcgtttatatatgaaaatatcacagctagactcgatacccgtcttattcgatccagaagtgttcaaacctgacatctgtaccatttcctttgggcgaacaacccatcacaccgacccaaacctcttggttgggtccactggaagcagggaagaaagcgttgacttctcggatcatcgaccattcctgatcaccgctattgccgctgttatcgtcgtcggcaatatagatccggacgtgcgatccttctctgttgagtttgaatctcctaggcctcgacgggttcgagggcttatacgggagcagagacctgaatcaagaaagaaccataggacaaagatcgctccgcgcgagtttcaaaactaagtcgttgtgcatcacggtttcgtcatatacgagtgatgtacggaccagtcagaataagggttcgtcactactgccgatttccatgctttgttgcccatgaactgagagacggacattacagccagatcaatgtgagatgctcgtttcagtgaaaacctctatgcatcaaggaagacgaagaacggcagatatacttcaattccggttttgatccattctttgtcagattgatatactatcagagcggcttgatcgctattctccgttcccatttcaaaagcgaaagcacatagatcccgagaatgtttttgacggaaaagagatatgtaatacaaggaagagtcagtagacgccgagatgtatcctgaggaataggagatgataaaaccgatggacatactactagatagacatccgttccgaacccaatcccaagccgacaaaatgttggtcctatgttcttcatcatcttaaagcggaagacgggggtactttccccctcttcggatacagagacgtacctcatcaacccaggttccagctatggaaactcctacagaccaactatttcctttctcagcaggaacgagcatccccaagaccggtccgctatgtctccattcggtcggtgtcctccaccaatcactcttcccattcgtctataccccagagatttgttcgggagcacagatccagggtacataataacggcaggatgaaggcttctcttcaaaaacagacacgcaatcgcggacagcacggttcatgtgagatacacatacctggatggtgatctttgacccatcggaactgatctctggcgtctggatgagggtctgatgcgcgccgttcgaactaggaagaggtcgaagctcggtgaaggggatgtttaccatgacaacagctgtatatgagggtttgttgtgttgcaaacgagacaaacaagaatgggagggaaagtgctgatcaagatgaagtaagatgagatttaattgggttttaagagatgtgacgaatgatgtctcgatcatcgcttaccaagagttgactcactccggcgttcttggcatctcctaagcattcgggatttctccgcacgtactactcgatctatgggataacatgcgtttcatggatgaatggaccgccggccaaaatccgggactagctgagaccgagaagaagaagcacgatagaggacgagaatgtatatgagcgatctaggagtcatacattggcacagtataagattaattgtggaaatgagattggtacatgttccggtacaatgtgagatatattaaaagatatcacaaataaaacaaaaacagaccatgccttcttcccgaaggctgctttagaagaagaagacgaaagtagatatatgcccaaaagaagaaaatgaaagaaaatgaaaatgagaaatacaacgaggaaaggaaaagaaaggaaaatcaaatagagaacctccgaaccgatcgagatctagctagtttgatctgatcgacgtccccgtcgcccaccgacaatgcaacgggttctgaaccaaccgagccaagctgctcttctcgaatgcaccgacctcctgtgattgtggagatccctccgtttgatccaaccatgatctcaacgagtcgctgcataggaaatccttcctatcagccgatttcgcgtgttttgccgttgcgaaaaagatgattgagtcctcttgagcctcttctgcgtcatcgtcatagtcgctgtcatgcttgacttgacggctactgacagactggaagtgagtctcaagaatcacgagtggagcgtgatctaagggagaaggtgagatcggggtatgaaccaatgagtaggaaggagaggacgagagtgttggcaagaacgggtgggtgtatgtgcgtgcgtttagtgaatgaccatctgctgtcgtaggagaatgggaaaaatacgacgaagaggacgaggcggataaggatgaaatctatgacgatgaaacatagagaattccatgggaacacagatctttcgttagccacagaacgttcgaccgtatctataaaagtagatatcgaacctcatcgagagctgattcacaaagactcgagtttggtatcggcaaagctttcatcagccgagacacatatgatcgttgttcgctacagtaaacggactattcgtgaaaaaaagaaacaaaaaaaggaaagcaagcatacacgaatgcgcatcagtcagatgaagagacgaaacaaaaccaaattcagctaaaattcagcgttccaagcacctttctctagccggagaaactggtcgacctcggacgaacactgacctcgaggtttgtgcacgctgatgatctttggagaggcatgttctttcaagtatcaggttttccacgtaatgccgatgtgggcgagtaagtaagaacgtgttgttaggtgaaaacgtgaatatgtgagtagataagaaagaagagatagagatggaaaggtttaaaagggagaagaaaatgggaaggaaagagaaaggcgaccggtcagtttcttgaaaacccattatgaatgaacatggtcagctcgggttctgttgaagcggagaacgactcaatcaagtaggtaagcgaagcgagtgatcggctgatatcctctccatccccaggcgggatcatcccaacggatggaggtttcagctgtagatggtggtggtgttatcgactggagccgtaaaatgccgggtgggcggacataaattccttgttcgggatcggtccggcgtcttgttcgtccgatcagaacgggccgttaaccggttgagtttgacagtctggacgaccggcagcacgtataaatacaccatacacagaatatataacaaaagatatgcgaccatacacattactacgctatccgtacaaaacataaatgctaatgatggggatgtaaaagagccccagaaccggaaatgaaagaacacgaatggagaaggaagaagagagaaagagactcggaaagtatcggataaatgtgcagtcaaggaaatgaatgacctctatctacctcccctctcgacatgatcgatctgttcttcttttttttctctattctcgttcgagagattagagtcttgtcggacatggctgatatgatgctcttcggtcaacatatgaccgcttgtatcgacttcttcgacgatgcctgattgaaaggaacaatacattcagcagaaaataggaataaaaacgctgccgctcgcagttcgatcctcgttcgtgttcgccacgagctagtctctctttagacgtaccgttggattcgaatagaagacctgtctcttcgagtgtccgatttttagtctcgacaacgaaaaagtagacaaacactacttcgatcgcgagccagacaaggtaaacctttcggacggttgagatcaaaccggttcgttcagattagtcgtgactgtgtgtatatgtgaggacaaagagaaagaggagacggcaagggacatacaatatagtacttccatccaatcttttccaatgcgatcggattaacgtattggttgaacacgagcgagccagaaatacccagttgctagagcagagaatggaatggagcaggtaagtctttgcgttttgtctctacaagacattgaaagagaaggaaaaaaaaatcccgaactgaccatgacggtcagcatctttgcacgcatcttgaaaggagtgatctccacggtgtaggccaccaagagaggggtgtaggcgatatcgtagaaaaagtagtagatgtagatgaacgcgaggatggcataggcggcagaccgattgttgatgtcgcttccgacaacaccttcgcatgtcgtccaaaactacgcatagaccgaaggatagagcatggaagaaaaagagcgaaacaaagcacaaggaaaaaaaagaaaagaaaagaagtgagacttgacagaaaaaaaaggcaatagagaatcacaagaaggtcagaccgacgtacgatccatgtgatgaacattccgatgttcgacgtcaggaacaacgtccttcgaccaatcttatctacatagaccgcagcaccaacagcgacggccagattgaacagttggctgtatgtatttcaaggcgaacgcaagaacgaatagcagacaacccgggttagcccatctagtaaccatggtttgtgttgtgtaacgctaaaatggagacggcgtacaggattccgttatatagcgctagcagggtttgaaacatacatggtagacgaatcagcatacatacgtgatagataagcggacgaaaccaattgagacttacactgaatgttctgcgaagtgataccaacaccttctagcacgtccgtcagataatagctgacctgtgaaggaaccgacaacatgagagaaacatgagttacaacgatgcgaggaatagacagaagaaaggggtacacaacaggctgaagaacacggaaaactgactaagccgtttccactacgaacgtatggtttttgggaaatcgaatagaaaggaaaagacagatggttgagcacatagactttgccatcatatagtcatcgaggcgagtacagcttacctccactgggagaagaatgcgatggcgatctgtgtgtgtgtgtgtgtgtgtgctcaagcaaggatgagtgccaagcagagataaagagaagaagacactcgataaaaaaacgtgacgcacaacgatccggagccgctttcggttgcccttggtggcggtcaagcttgcccagctcgtgctgttgtgcttctcgagctccagagactgcgtgatctcggccatctcgaactcgaccagcgggtcctgctcgttgttgttgccggtatggtaccgagccaagacccgctgagcgtcggcgtgtcgacctttcgagacgagccatcggggactctcgggaacaaagtagatcaggcagacctggatgacggaaggcgtggcttgaaggatggaggggatccgccaggacatcgagttgttgatccggaacgttccgaacgtcgtcctgtatcgggttgaggggacgagaaggaggaagggaagaaaggagaaagggaagagaggagaaagggaaggggagcgaagagacagaaacagagccagacagtgtgagcgactgcgacgtgcgcatggtgtgtgatgagagtcagggaacgaaccaggctgccacgatactaccagagtaccaaagcgagttgtaaagagatgtcatagccgccctttgcgtcggataggcaagctctgaatcgagaacagttgcagacatctatgagcataagaaccttgtgccactatggacctgataagaatgaagggatatatatttaccggcgatcaatataggcgcagcattcgtggcgaacgtcaggccaagcccgatgattgctctagaaatgataaatacactaatggtttgctgaatttccatgttccagggggtataatgtaaattgtttgttcgatcctgccgaacaagaagacaaaggaggcaaggcaacaggaacttacagatgtagcttgagtcgtactatgtatatttttgaaacgcgtcttaggtgtcaattcttgcaaacgagttttggacctgaaggaaggctgatcaagacacctacactccaatcagcataatgatcgctatggatcaggcgagatgaaaagggagttcggggatgtcagtggatcggggtccgaactgacagacagatcaagtattgtgtgacttacatccaaccagtattcccgctcgtcttccaaaccgatcggtctgttaggttcaaggacaggaagacagaggttaatatgaaggcgtggagagttagtggaatgtagcactcttagtcaaaatcacgatatagcttaccaccataggagcgaacgggacaccgacgatggtcccgatgttttgtatggcgttcaataagcctaacgtccctccttgaggactgttttaaggagtttgatgaagagagggcttaactcatcatgtctgactgcctcgagaccgctggcaagagagagcgaagaaacgacactgacttgtgaaacttgtccttccaatttgtcagcacttgcaacccgttcatcatcgagccatcgtaaccactaggtgacgaagaggagggtgaagatgagttgaattgagcccaggcgttcttttgatgtctgatgagacatgatgttgggctcactttgtggacgatgtgatgagagcgacaaagagaagcagactgatcgctctgattcctaatcaaacagaatgaataacgaatgagtgcagaaagagaggaaagtgtcggcaacacgtccgggtacacgcatcacactcgtaagtgatatccggggaaggatgttctaacccggaatgcgggtcacacgtaccaggatgtcggtaccaccttcctcggtagacatagggctttcgatcgagagagaacgagtagcgagtcttcagcaaacagagaactaaagggatagctataatttgagaactcacctcgagctctttaggcaagatatcttcaggaggggcagcagcctttgttgtatgtgacatgaatggtgtatcggttgatctgccaagctagatccagatgtcgtgggataaaggaaggcgtgaaaggccagctttcgtctctctcagtaacggctgctgatgagtgtcgtctgatctgacaaagagagaaggagaatgagcgaggaaaagaagtagaaacgacgggagatccaaggtctattaagaatgttcaggtcaacgtacccgacgccgtggtggattttgttctcttgtctggccaacgggagtttaatttcctctcttgtttcttctttctcttgttcttcactcttaatcttacataaagacatctacacgaactcgacaatcaggacgacgaaaggcaacagaaagaggaggatgcagagtacagacctgctctgaacagaaggatatgagcaagcgggcgtcgtgctgaagcagacaagagggtagatagcatacatagcatagatagtcgatacccttagatagattgctctaaagaagatggtaaatatatgaattgtgcctgccagggcgactcttagacaggttgagcttaggtagcaagcgggcttagacagcaatgaaggccgtacctatataaaatcaaatatagatttgattaggtaagcaccacggacctccatcgaatcccaccaaccaacaggccgacaaatgcagtagtttctttcttcctcgctctttccttcagacgaccatccactccagtgacttgaacgattccaaacacatattctcttgttcctcgtcatgtttgccagatctatccaaaaggcccttgtgagttttctgcgttttgttctgtcttttctcctcctccttgctttcttttgggattagggattcagaggagacatctcgctccgcttcttttactcactggtgtctcttcgtcttgtatggttctctttttcgcttttgatttctttctctttcacgtacaggctcccaggtcgttccctttgcttcgtacaccgagctctgctttcgccttcctcgctcatcaacgatctctctctcagcaggctcgatcggctatcgatgatgtgcgtccaggtttatccttccttctttgtcagcttatgctccaagagaaagatgtgtaacgtctttcatgtttcatgtgctaatcgactactctttcctcataggccgtcgcgtcgaatcctctggtagtattcatgaagggtacccctgctcagccgatgtgcggcttctccagagccgtcatccaaatcctcgacgtacatggcgtcgagcctgacaagctcaagacgtacaactgcctggatgatgccgagctcagagaaggcatcaaggagtactcgtgagtctttcatcatcgtcttctttgtcttcccttgtgcctatatacgttcctccacaacatgtgctcggatcgagtgtcttgtgatcggttagtagagaggcgaagaaggaaactgggtagaacgatgccctacgtcggtcattggtcaatcatgcttgcctgtcagccatcgtccaatcgtatcgatcatccttcttgcattttccctctcttcctattgcattcaaatctatcacacctctctgagatcgcacgtcatgaaaggcctagacattgatcccttctctcttctttcttcatcaaaccatacatatagtgagtggccgacgatccctcaagtttacctcaaaggagagttcctcggtggatgtgatatcctcctcggaatgcactcttcgggagagctggaggagcttctcatcaaggaagatatcatccctgccgtccttcccactccaaaggagggtgagagctcatcgtagtttaaagcaaaatcctctttcttcgtgcctcttcgagagtttatcttcctctctgtctccccccccccctcattctcactcaattcataaatcaatttataatattgaaatgtatttgttcatgactattaagccttgtttcctgtcttgattgtctatctgctctacatcatcacaatgctagaacaaaggagtggtttggaacctcatgtatattcgaaatgcgtgcttgatgaacaacgaaggaagagaaaaaagaagaggaaaaatacggatgggaatgtatagacgagagtcaatcgaggggttgtacaacaggatagactgggtggataaaggaaggttctttcgtttcctagagataaagcctgatgagtagggcaaaaatagaaagggaattggaaggtaatcagtatcaaaagcgggaacgaagagatgagcgcgagaatataatgagaaaaaaatacgcacgaagggttgaacactacggagttcggtcgttccaaaagctccaaactcttcataaacttgtcctccaactcggtgtttccgattgcctttgctgcctgagccatctgcctcagcaactcttgcaacctcctgaaagctctaatcaacgagccttcaaatacatccgtcatcttgcaaatctccgagaactttgaaccccgacaccacatcagcacgcagtccattagttcgaccttgaactgttgaacgtattcctcttctaccagaggcagcttgcactctcgacacactttcgcgatccgtcgggcgttctcctgcatcactcggagaggagccgccaactcttcctttagctttgtttgttgtgttgactgtgatattcgaaacaatgagcaaaaggagttaatacaaagccgaagaacaagagaaccttccaacacaaccgaaagagaagagagacccaccttttcttggaaaacaaagcaggaaagcaaagcggcacaatgctctggctccaacgtgttgaaaacaccaccaaacatcatttccgttaacaacaactcgtctcctgtggagatttcacaggccacccttcccttcatctcgatcacatcgtcggcggtggtgaagcccaaccgacggaggactcgttttcggcatttgagttcatccaactgaagcacgttgtgaaccgccgagatctttttcttcagcgctcggatcgaagccgtccgggcgagtttgtcggtgtattgagcgtataactctggaagcttggctgagttgtgaagatccgaagaggtcatcagcttctcaagcgttcggatcttttttacaagcgatttgaacgcttcatccttgattcccatgttttccacgggatccaatagagcaattccctcggggaatctcttcttgacttcgcccaaagctttcatcacgttctgtctaccttcgatcggcctcagatcttttggcataaacactcgaatgtgactcaagctcgagatcgtagacagcaacaccggcaccaccaacggttcccccttttctccaggcggacaaggcaatatccgggttccaccagagcttcggtctttagagacaaccgaaccagtcacacagttcaacaagacgtccacaatgtagtgcgattgaggcgtatctgctgcatcgggtgcaggttctttgcccttcggagtctgtctctttgaaaagttaacaacaataccccatccgaaatcgacgttgtcgtgtcggacggtcacgagtcttccggcctgaaggaaaggtaacgagtatgtcgggtgagtgattacatccttaaagtcttttccaagatcctcgagttgtttctttcggtcgtggtactcggctatcgattcttcatctggaataaccatcgcgtctcgttcttcttctgccactcgaagctcttgaaacaagcacgacgagagaaaaagagaaagaaaaatagaagagggaaaccgttcgatcagtttggaagagacaaaaagatgagaatgattcaagaagagaaggtctcaccttcctccaaccgaggaacactctgagtgttctggaactggaagaaacatctctctagcatgaactcgggactgatcccctcaactcgaagcaagttcaagatcatattgtagcccaggtggaaggccgaatctaatcgatcactcaaccctttcaccatcgtctttgcatcttccggctcgagcttttcatcaaccatcatcactacgattccccgttcgtccaatcctcgtcgaccagctcgaccactcatctgaatgtattctcccgaggaaagtgttcggaactctttcccgtcgaactttcgaacagagttgaatactaccgtcttggccggcatgtttaacccgatggagaaagtctcggtggcaaagagaactttgatgagaccctcttggaagagaatttcaatgacctccttaagaatgggaagaagacctccgtggtgaattccaattcctcgcttaagcagaggcaataacgactggatctgaggcaactccctgtcatcctctgaaagtgcgtttatggcgttctcgaacacggactgcacaagggatcgttcatcctccgtgttaaactcgagcttcgacatctgtagcgctagaccttcacattctcgttttgagaaagcgaacacaatgaccgggttcaagttcttgaccatgatcattttgacaatcttgtagatgtcggaaacacctgagtgtcaaagaagttgctcagggatatcagtattgttttgtttttgcgcgaaacaatagaaagctaagggttgcacatacctcccttctgtggccccttcttcgttttgcctttcctgccctttccaccgttcgggttggccgggtcctcaccctcagtgatagcaagtccacccatagcctttccgaaattatcttctctgaattgactcttctcgtccaccacaaggtagattccatctccgccggacggaaatagatagtgctggagcggcgttggtcggaaatcggtatagacgacgtggcagggctggtgatgtgtcttggcgatccattctgcgaactcaagcgagttaggaattgtcgccgagagaaacacaaagtgaactgtaggtggcaagaggatgatggtctcctcccagacgactcctcgttctgaacgaatcagacggtacgttgacaggaacgacggttagcttgctggatgaagctagtaagatccataggagaaaccgaacggacctttgtcacgcatatagtggatctcgtcataaatgacccaagaaacttctcgcatgatctcagaacctcggtaaagcatcgatcgaagaatctgttccggaaggtgtgtgagcgagggcagttgatgaacaagaaagaaagagagggcgccttggaaagaggctcacctcggtcgtcataaccaaacatgaggctgtcgggttgatagtcacatctccagtcatcagtccaacgtctccgaagtcggcaagaatatctctgtacttttgattggagagcgccttgatcggactagtgtagatgactcgctcctttctaccaaggcactgggcaatcgcgtactcagcaaccactgtctttccggcggatgtatgtgcagaaacaaggacagactctcctcgctcgatcgaggccactgaaaccttctggaaaggatcaagctcgaacggataggaccttgccggtgggttggccggtacgtgttgcgagatcggtacgtacggataggacggagggatagctactctgtgtctaacctggtgagtgagcttgattccaccatccggcccggctgcggcatcaccagaagagggtgccgaaccgtccaatccaccagtggttggcttgagctctcgctcggcctcttgctcaaactcgtccgcgactacgggtacgatcacttggtcatcttgagtggtagatgaggctaattgcaaagccttggctagagcctccttctccttgagctcctccttgtccaacaccgtgatctcatctttgtcgacatctatagaagtgactcgagtcttcttggctggagattcttcgacatcggacacgtcgtccaacttgattacaggggagggagcggctgaggtggattccagaggcttcctctcctttttgcgtttctttctctcagccttatcgaccttggctccccctgctgagggaagaaaagagaacagctgatcgttatccatatggctcactgtcgtatgttctccctaacgaaaagagaaggacagtcggaaaggaaagagaggaggaggagtataagtatgaatgaggaatattcgatgaaatttagctatgcttcaaattgtagttagatgcttacctaatgttcatatcaggcacgcctcgtagatggccgggggaggagagggccaaacaggcacgagcgcagttttcaggaacatcgacgttgccctgagttccttcatctcgtgttcctataatcctgaggttctgttcctgaatcctccctcgtcccctatctgtccttcctccttgaagggatctctcctctctccgcttgggttcatcatgccgttaacgacggccaggagaatctcatacgtgattccacctccccattcgttgccgccttacctcagcttgccgtcacccactcatcctcggaatggatctccccatcccatccttcttcctctgtccgagccaggcatttcagcatccttgtcatcctcatctttctttccatcgtcgacatccgagactgtgtctcatccccaacatcatctcgggatatcagcattagcattagacacgtcaactcagctgagcgggaaagacactccagagggtatcttatacacaggaggaagggatggcctggtcgctagttgggaactcggcgccaatatgggaagaaaacggtcggatggagggaacgaggaaaatatcagatggaatgaggttgtcgatgatgatgattgggaggatgatgaagaagacgaggtgaaatactcatcaaccgctgaaaatcttgaggaagccgacgaggatactagatggaagcggatgccttgggaggatcgatgggaagctcaggtctacgaggatggctctactgttagtacaagtttatctgtgataccttgcgacatcgtctgcaatccttttggacgcgtatgttgacagtatttgcttcttgaaactacacttagaaacctccggaggctacatttcgacaatgcatgcaatatcatgtaagtaactgctgcagccttgtcctttggaaacacgatctgacctgttttcaccaatctcccatagacggactgggtcaatgatatccttctctgcaacctaaatcaaacttgtaagcacagtagccttcaccagcgtgtagcgtatggtatctcactctttgttatccatttctcttttctttctatctctatagtaatctccgcctcatccgatcggacgatccgagcttggtcgccgcatacatcgactccagatcatcagcaagctcctacaattattggcactcatactgactacgtccactctctcacacattcgaaacacaatgcctgggttgcctccggcgggtttgatcggcaaattaagctatgggatatttctcaaggatcgtctcacgcatcaacctcgctcacgcccggcgccgctaaagggcctgaacctatcatagtgctcgggagtggagacgctggagaagaacagatcagaagtgtgtatagcttggagaccaacccaagtggtagactgatcgttagtggaggaccggacggcgtcgttcgaatgtgggatcccagaactggtggaaagcagatcggccagttgatgggtcacaccgaaaatgtccgagctcttcgtctaagtgaagatgggagatttgtaagattattcttttacttcctggaattcagaaatgcataagatataagtggtaacagatgtccatctatcttgctttctcaagcttctctctggatcgtcggataccacggtcaaactatggtccatctcatcgcaacggacaattcatacattcactcaccattctgctagtatcaccgcactcttcacttcgcatcccaatctcgaacggttttacaccggagatctttctgggcacgtgtcaatcgttgatctccaacgatgctccgatatctcagatggagagtgtatctcgctcctccaagaaggcgtttcttcagaaacgtcttctcctacagcttccaaagacgaagaaccaagaaatcctttggctaacaggggtagtgttgcgatcaacaagattgtcgcgctggatgatcagtatgtgtggacggccaccgcaagctcgacagtgaatatgtggaaggacgttggccgtcgaatcagacggaatccagcgtttcgctctgccaatgatttagacgatcagtctagctcagcacattcatcagccgacggggtcttggttggtcatcacgaacaagatgaagaggaggagagttgggaggtttcgaaagaacaaagagaacagttattggccgatgagttcaagatgcctgctaggacattcacaccccctggcagcgagaaaaactcgccacgaaactcgtggcataccggatcaatcgggttgagtctgccaccgcctgcgtctccttcgcagcttttgacggcagattccagctcgcccttctcgaataagacttccattctcaagcctacccaagttcgaaccctctccggtatcacaataaaacgaggctcatcggattcgccgtccatcgaaccgtcttcttcaggattctctactattttcggtcatcgaattcttcagactcagctagaagagcccgaatcgaataagttattttgtgatagagttccttatgaaagcttgatcaatctctccccactgaacgatccctacgagtttctatctcctcaccatcatcaagcgaatcccgaccaggtcacgcacttttctacggcttccattctatccttaccgactcgagccaagcctcaacctattccttctgctgtcgctactgaaatcctgggcgtatctccctccaacaccacgagaggtgatccgccttctatgcgtcctactccgactatgcaaacgcctaatcttcccagttctgacatggatgtcactcctgaacgtggaacaggagcgagatttaacttgcccttaagtagggacgcggagagagaggctaggtcgaagttccttcagagagagcttctggttgatgctgtacctttcaatcgggatggtccttcaggagctatctatggaaagcacggtctggtaaggagtctgatgttcaacgatagacagcatgtagtcacctgcgatacggccggaggttagtatccatcttctttctaattcatttatcattgcatgggcttggcctcgctgacgtcgtgaaagtacgcactatcgaaattcaacttccagtcattgctctttggaatattgtgtttggccaatgcattggcttgattgactcctctgctgtcgtcgaggctcataactcgatgtcgacttcttcaaagttaatcactcctcgtgacgccttagagttggtcaaggagcgtatggagggagaggcggtggttccaacgtggtgctcggtagataccaaaattggcgggcttacggtttcattggagagaggcagatgcttcgacgcggaggtacacctggatgagctgattttgcgagggttacagggtgattataaggacgatcagagaggtatgcgaccgcatcttccattcagtagcaaataactgccatcagatttgaagtcaacgtattgactttggtgtttgatattctcttagtctctctgggtaaacttcttttagccaacttgtttgatggtaagagcttcgtttgtgttacacacaaccataatcttcttgagatgttctagctcacgcaaacatttctgcaggtttcgtcaaagctgaattgttgcggcatcagcactcaccagacgagaatctgtctagaccaaccaagagaagcactcaaacccctcctacctatatccccctcggttctaaggtgatgggcttccagtctactagccagccgccgacaccaggcggaatgggagccatgtctgctctagcgactccggcaatgacggccgctttagcgccgactgacgactttttcagttcaaccatcaagaaagattacttcccaaaaatgacctcccctgttgttagtcaccagccacttgagattccgacgacgaccgcttctatggatacaccgatgagtcctggcgcggtccagactcctggaggaagttttatggggaaattcaaaggattcggaaagaacaagaaactgacggcaggaacgacgccagccctgcctgtagcggagatatcggaggaggaggctcagagacttcaagatgaagccaaggtctgttttgcttttctattttgagacaaaagtgaagccatgggctatgagctcatatgatgcgggtttgccttggtattgtagtatgggaagttagctccgatagatttggagcagaagcggcttcttgacactttgttctctaatccgttgaatccgcctaaaccagcggagattccactgattccatctctctcggatgtggcaattgtcattgacgaagaatcgagggacgctggagcgtgggcggtgacatatcgaggatcggttgctcatgcttcccatgaagtcgacacactagaaatgacgcttccaagttgggtgttagaatatctgttggcaggacgagttcctgtcaaggagacggtcaatatgagcttcgtgctggaaccctgcaaattcggtttaggtgcaatggctgagatgcccaacgggtgagtttgaaccaagtttgatgcgttgctactttattcgtgatagctgataccatcatttgctatcgatctgtgatgggtgtagaaattcccgcctgaccgctaatcgtgcgcttcggattcgaaagatctgtgcatatgtatgttctcgagtatcgtgcttttgtgttcttcttatgccgctgctgactccccctttggttaaacaaaataaaacaaaacagatttttgatcgtctgggaatgggccctccgatctcccgtcggccttctttttccacgccacatggttctcctaaatcacatgcggcctctctgccagccgttcctcattattcttctatcggcttgccagtgtctgacgagcttcctcgaagtccaccacccgttcgaccagaggacgtggtagagcttgtgtgcaatggcttggtgttaccaagcaatatgacacttgcagcggtgaagcacttcgtatggcgtcaaggaggagacgtggtgttgtcttatcggctcaagactcagtttgaaggtgctcagtttgaggaaatcaacacaaagaattaacgaatgaacgctatgggcaatcattcgcttccacagatggttgttgatgcttcggtggttaacgacgtttgtttaggggactatagatcgattgagggcaatcttgcaaatttattacatagtgtgatttgataaagtatgatatttcgaacagttgagaatgaaaaagaggccacaatgtattatatgcaacaatcagaaggagcatgataagataagaaagagcgacgtagttcgaccgactaacaggatgaacaaaatcgatatagctgataccttgattgaaaaagaaaggtgcccgaaaatccaataatcatagtgggaagggggaggggggaaaggagaggagatcacgaaaagagagaaatgaaagggttaaagtcgtcgacaagtctgataaaggtaagtacaaactctggagcaattactattctctgccccagatctttccccactccatcaacccggcaacaaccatttttgtttgattatcctcctgcagatattctttcgcgaacgctgctgcgttctcggccattaatcggccttctccgtcataccgacggaaaaagagtagaatcgaggcaagatccgaaaagtcgggttgcactggaacgtagtgtttccacggaagcgcgtgatcctgccacggttgaagttctgctgaggcgtagaagaccacagtcccaattctcatggcttcccaaggtgattctccgtctaggataagagcatacttgtgctttgatagactttcgcccttgggttttgttgggaatagcttgacgaaatcctcgcagcccgtctgacccgtacagtgaactttgtcattgaacgctccatccacaagaccgatcgtgtcccatagttgatttgtcgatccaattttgcctaaagattgacctccaaagtagtatccgtactggtcgtcatccgggtctgaaggtgggtagaacgtgcgttgaaacgtctgaggaagagggttttgagtttgagcaagaagacgataggcttgaggaaggatggtcgattcatcggtaaggtcagccgatagaagaggaggcggcgttcctcgctataaattaatttggagcaacacaggtcaccaaggaagaggagagattcaaagctcagtcagcatcagattgctccaaagccctcttggaggaaaacatatagattgatgatgagcacaaacccagaacacggcatctctctcaagcttattatcccaatgcacaaaggacgccagagcgtttgttcgttcaaacggcagtaacacttctgctccgatagccaatttgcttgtcgccatcctaggcacaggctgaaagtccgatggtggcggatccgatatgaatgttggatggagccacatcagcttgggggaagcgcacggatcgagagcgagcgcatggtgatgaataaggtacgcgtctggtggaaaaagaaaagagtacttcaaatacggttagtatatctagaaagaaaaatcgatgtaccagaaagcttcatcaaggcaaagccaggcatgaaagagctcggatagaagctgagaatgcagtgagtcagaaggacaaaccaagttgcctatctgctcttgtcaatgatttaggagatataaattttctctttgattgtcgatgaagatcggcttctggcgcgcatacttgagcccaatcacgatactgggctttgtaagtcttgtcagagactgtggctatggggaggattgccgaagagacaaagacggccaataccagatcagcttagcaacccgtctgtaattttagaaaggatgaaaaacggaaggagaagaagtagacgccgtaatgtggacaactaactttcgcttcgatccagaatgccatatgggatgatttgcggggaaacaattgactgacagattgaaaatattaatgtcagtctcaaaagcaaaaggcacccgaagaacaggctgaatacatacactatgggagaaagtcaatcttagatcaggaagtaactttctatgaggttccattctttttttccaacgagtctccgatcgccttcaatgaatctgaagtgctccatgggtagtctactccgacgtggccatctgagacgaagataacgaaggcttcttcatccttcgatgaaaggggttgagcctcaagtgcgttttggcgagcgtgcaatgtggcaggaggaatggagaggtagggcgcgagagagagaggagagggaaaaaatgggagagtgttctctgagggttcgaacaaccgatccagatctggaagaagaagaagccataagagaaaaaaacaataagagatgaaagtggatatagagagagggacggagatgcttacgagcaggaggcgaaaccccaaacttgagctcgtaatatttcaaaaaaatcagccgccttgcgagatggagagcgtatgatcagtatcaatctgttctggttgaaatgttgatggtatattggtaagattgaattctcaccgtcttcggagctgtgctaatcgatgcggcccatcgatcatccgcctgtattcgtatcggggacatgagagtcttcttagcacatgatttcaaaggagagcatgccgaacgaagaagaaggatagacgaacatcctggatgagctcccagattggatgatgaatgaagctgatgagctctacagcgagcttcccgttttgttcccaatgatgctggagtgaccttccatcgcccacctcgtccatgtcaagctcaccatcctgatctgtatccttgacaaaccgaggctcgtcttgatcggttgtcttgaggtattccgagctaaaactgttgttgactatctttgtggataccgtgtggagaaccgtaagatgaaagaggggatgagaaaccgatcagtttttagtcccttttgaccaaggagggttgaaagaacgtctgaagtattattcttgcctaggaaaggatgttgcaatcgatgatacccctcctggatgggagatcttcctgtccagactagcccaaaaacgatacagacgaccacaaactttccccatgggctgagtcgaggtcgatgtcttcctgatgaacggctaaggtgacctggatgagggatagagtctgatcgactacgctttcgataccacgcagatgagaaggctgaggacatttgtggaaggcgattatcgagtggttgagatcaaagcaagtcaaaatcaaagatgatggacagggtcaagatactaggtggtctgctggatgagttcaaaggtatcatttgaactcaacgacacggttgctgtaagcaacatctaaaaataagggccgaagaagaaaacatccgaaacaggcacagatattgaatcgatagataactatattaaacatcctaacttgcctcacaagagcagaggctcggtgaaagatcgacagcggatccttcgccgtccgatgcaggggacctgaacaggcactgggaaggaacggccgctcttattcttcttacattatccgcagtaagcgagtcaaagcccgagattcaatggtaaccctaacggttacaactgtgactaccgagactcttgcgtctttcgctattgtcttatacagctcaacatgggtatgatgctcatctatagccacctcccctcaacagagctccttttctctgatatgcttgccgcctttgttctagagtgcgcaagaatatgtgaatatcaatgcatgacctgagatgatcaacctcttctagataaatgatgtaagaacacataccatccgccaacaaatcagctgctaagttaaccttggctgcgagctcggtgctgccacctacaatgtccgggtgacagaccttcatcctttcacgccatgcctgcttgatatctgagtcagtaggaaaagtcgttaggccatcgagcggtatccgtaaggttctatagtgggaatccgggtcgtgtatctgtaggacaatagttcattagcaaaagaaaaggaaaagaagaaaaagttatcggagggcgaaagatgccatactttatgatgcgatcgaccagcacgttctttcactcggtttttctaaaaccatgaagatgcagataaacaataagggaaccgtcgaatgattagctccaacctcgtttgctgcgatctttgttcaaaatcagacgtacatataattcagccgcggcacgcgccatcatgtcttgtaaatgttgtctagcctcctcagcttgaacacgctatgaagaaagatttttttaagccaaacatcagataatgaaagttagggagtctgaatagttagctcaagagagccgattttccacttgatcaggcgcataagtgtggggaacgaacctgttgtatccgcctagccttattcatctttgcattctgtgaacacatcccgagttggtcagagtagagtttccagcttgaccggcatgctcacaatatggaacgatgacaccaggaagaaaagagtttgagcgaacgagtaatttctgatactgtctggccttcttctcctccgctggggatctttgcggttggcacgtgtcgttggtctggcacaaccgtgtttgtgtcagattcaagcaagtttcacgcacagcaagagaggcttgatagcttacctcctggaattctggttcttcttctgccttggccttagcttcttcttgtatccgtcgttcacgttctctcctcttcaagtcccgttcacgtgcgatctgccaagtcgatttcacccgataatacatctttcccataagaaatgaaaaagtgcacgtgctcattcttttagctccgagacgaattgtggattcagtgcataaaaagaaagaaaagagggaaaggatagagcatacgtcttcgtctaattgcttcttcttggatgcttcctctgcccgaagtcgtttccggtcaagctcactctgaagtttacgttttccttctgaagtgtttgccttgttcttttcctaggaaattaagtttagaagaatcgatggaaggaaagaatcaaagataagccaaacctctcgatgaagccaaccagagctgagataaagagcaaggaaaactgaaataaagagcgtaaataagcaagaggtatcgaaccttttctaataatttagccttacggcgggaagcacgttccgcatggcctgatcccggagagctgacggattcatttgatcgcgaggatgagaaaggtctcgacagaaagaaaggcacaaagtgagactgtagcggcggtataggccggagaggaagcgaatgcgagctagaagtaaggattgtgtggagggccctggatgactatcaacgaaagaaaagggcgttgttagtcctaggtatctctgaaatcaccaaccggacgatggggtagaacaacaccaacccgaacagtctgaaaaggaaacatgatcaaggaagattgagaagaattcgatccgtcggtggccgaatgtctctagagatatgtagaaagagagaaggtgtgggtgataggagatacactgctttgccacaagccacgtgacttttcatgctgctcagatcacgtgtcatacataaccacgtggatatcacgcagacaacatctggatgcccacacacattcacatacgcataccctgagcacaacaccccgttagatcgagagagcaacgatggcgtggagagagcagaagtagggctggttgctctgcatatcagtatgggagaagtctgaaacaggaatgcacgactccagacgaaccaaacgtggtcagattagttcgatccggagcggaccaactgatacgatgctcccaatacgtcactcccatcggatatggtataaagagtaagcgatcacgagttggttctcttctcttccttccttccgttctcttcatcgactatcaatcaccgttgtctttgtaaccttgcttacatcacccatcacaatgtccatccctattcgaactctgctccgatcgtcctttgcccgaccctgtgtttcggcagttgcttcccctgccagactcgttcaggcaaggtacatgagcaagctagacgatgctgctaacgctgttcgtcaaacgcctttctatcaagtacgcttgatcttgtgtccctccaccttggccgctgacattttgtctctgttttatacgcaggccaaagagtttgcatctgacgtgaaagatcaggtacgcctccttgctggtttgattgagatcatccttgctttgtctcgctctagaaaacacatcttgacgattacttcctcggttcgttttcatcagactcaaaagaccaaggatactctgctcgagaccaagacagacgacctccccgacgaggccaagaccccaaatctgaccaacgtattctcatctcagggaactgcatgggaacaaaccggaaggaagaacacgtcggcagatgacaagatagagaacaggctagctgggcaagatgttctggcagaaggagcaaaggacaaacctaagaaccagtaactcctgcgcgggtggagagatattgagtgtgacggtagtcagaccaaaaacctcaaatataatctaaccttcttcaggacagccgaatgtatctatataatgcatctttcaaaagctttgaaatgtacaatcgtgtgaacaaatattttagagatgaaccgagacatcataggaagaaggagaatccagagagaaggaggagcggcagtaaggataaaacgccgatgatcgtttggaggtttcttaacagatccccaccgtcatcctttctgtagaccaaccatcaccgcgccatcacgatcgtcgtctccttctcttctcttgcatttactcttgcatatatacttcgtatataatcagttcctcagaagtttcttggaagatgtctacagtctcccagctctcgtctttgacattcatcggtgtgtacaactctgggttctccaagatggtggcaagacttttcttgtcgatattctcacgctctcttttcctttcgaatatgtgaaaatgtctgcacacacatatagatgaggagactgtgaagactcaactgattccctacctggagagcttcaagtcgaaagcagaccttcaggatcatctcgaggtgtgtgttcttatccaatctctcgtattcctcacttgtcctgatcaccagccgctaaagtgattctccgcttgctatgatcaatgcagaacttacttgggaaatcaactcctgaatcacaagcatttatctcttcctaccttttcctccggtttcctccgtctctacctactcctgctcctatctctgctcctgctcctgttgttgcttcaaaaccaaagccgagcacaaaaccaaagaagctcaacccaaacggtcccaagcctggtcgtgactggacgaatgactttggcgctacaggtacagtctatattaaacaagcggaagagagctggagtacgtctaacagatcaggatcctccgatgctggcgatgttggaagtagaggatcgagtgggaggtcgactcccgtccctttaggtggaacaccaagcatcaagatcgtcccctctaagaaatcttcagcagctaagactggatcaatggtatcggatatgctgaaagggaccgggctcaaagtggttgagacaagcaatcaatcgaaaaaaccagttgaaaagaagagtgccgaggtcgagcggatggagaatctgatccgagatgtggagaattacggggtaggaggggatgggttagggaagcgtgcgttgaagaaaggtcgggctggaggttgcttctgtcgaggcatgtccatctgcgcttattctttcagagtttccgtctttcttaaaagttcagatttattgatagttttgctcccttttccagcccgagtacatccattatcgtcacactgccctatgtgcccttcgtgctcactaccactttgtaaactccagccaccgttccttccctgcccatcctgcgtctcaccgcttttgacatcctcctcccaacttcgtctccttgctcaacttcaatcagaactcgccgcccaactagcttcggaacaagctgaacgagaccgtgtcatacgcgaagccagagaacaggcctggcgggaatcatcaggaggagcgttccctactcttacaccatcgacagctgctgacaagcttaaggaggactccgatgggcgaagggtcatgagtctaaacgccaagacaggaaaagtccaaatgacatcttactcaaagaagatttctccagttccatcctcttcgatagatgaaactggctctcaacccaagggagaacctgacgaggaagaggagatcaagcgaacggaaggacgagtacggaagccacgaacggaacctctcagcttagaggaacgtaaagaaggctgggaggccgttagtcgagaaagagatcagcttgctagattctttttaaacgtcagtgaaggatccatccaagcaatatacaaggagatgacttgcgaagcgaacgcagaggacaatcttggggaggttgaagataagaagtcgaaaagaaggagaggaagagggaaaggaaaggatcataaagaagagtcaggcaagcccgattcgatctcaacggtctcagatctagaaacaaccacggggttgacaaggaaagagagaggcaaacaaattgaagcgcaccaagtcagttgactctatttttttctcgtctgatactttcaaagagaagaaaaaccgaacgcaccggctcatctgttcaatctcttgcttgctttaaatctcaaaaagacgaacaaccagccgcgtcacatttcttcagacactgcagcacctccgaccaccgcgtccgctcccatcgcctctacaacgagcactacatctcggtactctccttcgcatcctccgccagttaggttgctccttccaggaactaaagtacttcttatcaagaaggaggatcagccgacgggcaagacaactgcgggggaagtcggagaagtccttacgcgaggggatcatccaaggtttgttcttccgtttctctctcttcgcaaatcttttctttttgatctgatgagggacgtacaagacgcaagtaaaacgtttcatcgaatgaacgttccgacactgatccgctgttctcgctatttcgatccaaagaggagtaaaagtccgatctaaaaacggaattgttggacgagtcgtaggattgatatgattcatttcactcttaaatacgctcgatcggatgtaaatgtaaatgtctgaatgccgcctgagatccaaatgtttccttgggtctgtggacatggttgataatgtcttcagagttgcaatcgtagtgtgaaacacgatgatgtatatccttttgtgggtacaagaagaagatctcattatgattaatcttgtcgaaaatagagagaaggcagagagctaagtgtaaaagcagatttaagaacgaggagattgcaacagaagaggaaactgccacgctgtgacaacgatatgacgagaaaaatgaaaaaaaagaaagaactaaagggatcaaccgccgtaaggaggcgcagcatctctatccgcctcaggctcgacaccgtctacttctgcgggggccttccttctgatgttcagtggtttgacattgcctgctggctctacgtcttcagataaacctccatcgctgacatcaccttcgggtgggacgaacccactgctcgatcttccaccacctcctcgcttgaagaatgccccagcgttgatctttccgtttccggccgctcggctgacaggactgacagaatctgctcgggcagcgacggcagcagctgacgctccagatggggggtgtgcgactgaggtgaaggcaaggttatccatctcgcgctcaacttctcgttgagcggcggcagcggccagagaatgttcatccgtcggttgatctatctgttgggagtacggtcggggagaagccttcacagaaatgggcgagtcgacataagaagaggccgtgccgtaccgagttggctgaggaggatgcacgtaggttggagacgaggcggaaggctcaatgatggtaggaggtttgggaagaggctgttggtatggttgaggaggagaaataggagcggcaggctgctggaaagctggcgtcgcgagatgatcaaaaagacataagcaaaagaatacaatgctgtggcgagaaaattagagatacttaccacgcgatgcataattcacatctccgacgtcacctcgaagatccggcgtaccttctctggcatccgaaaacacctcaggctcactcatgggtgtcggcgctctagctccgcctacaaatgccggccggggaggctccaagttgatttcttgatccgagccgagctcgtgagattgtcctaaagccggagaagccttgtcatacgcgagaagagattcttggccttccgctgtcgatgaatgtgttggaactggtcgccgataactcacagaagatgtatcctgcataggaggcaaattatgagtgggttcatcatgaacgataccatgctcagctgtaggagacggcgcaaattgatgagcgtctgctgtagaatccccttgatggttgggaaagttggcggtcgtatttagcaggtttccatttcctacagattgtcccaaaccaaggctcaatctgtgatcgcctggcgatggtcgtggaggttgaccagtaagatctggagtcgctagggcgccccccaaagcaagccctgccaagacgtcgttcggatcttcacccagagggatctcgttcccgtaaccatcgtctcgcgtgttttgcacttgcttggctgagccgatggaggcgtcgacgatgggatctgcacttgactgagtcggagatgccgtggagaacgtggattgaggttggtgagaagactcctggaagctatcccggtaagcggcagcagggctgataggcgtattactgactccagtcctttgagacgactgttgttgatgcgcgattccatagctggttggctcagagccgttgggcgatgtcactgtagacggcggctctttggagaaccgggcaggaagctcgaagttgtcctcgtatctcgaatgatcttcataaacatcatcacgggcggagggatattgagaagcctgagtttgagccagatttggagtatagggttgtaaggtgacttcggcgcgggtgaaatggacttcgctaacacacttgtttgcttcgaccgacagtcgagtcgtcttgtcgaaagcttcagatagccaagagagatcaaaacataagttcaatcaccagaatatgagatgattcacactaccgccgagagatacaacctacagttatatggcgctcgcccgtagcctggaggagtgatttccaacggaatttcttcaagaagcaattttccaagctctccgacgatctgagattatgcatagaaagagaatgtttgacttgaacttccggattcataaaacgatacgagaaaattgagctattacacatactgtcatcttttcagcaagttccagaagaccaccaaacttgatggacagagcatctttggtggctttgcgcttgaagtcagaaagggatgcttcggtgttcataatttctgtgtcaagcttgagagagtcaatgtgtgtcaatatggtaagttctatgcagcattaccataagagaatctttacttacttcgcgcatctcgtctctcaaggattgcatgagctcagtctgcattggcagattcttgttctagataggagaaatcgaacagacatatggccgctggactaagtataaagtacgggtagagaagactccctagatcaaagaggagaagaaaaaatgagactgacttccgaactcatcttgacaagcttcttttcctcccgctcactccgtgatcctacagccttcctcttcttctttgtgtcatcaagggtttcctccatcagtctgatttctttccaaagacttctaatgccgacctgcctatcggcaaacttctcaaagccgtttgccactagatcaagcatatcagccgcttttgaacagacgtcttcgaggtcgggaccctcagctcctccccaagcggaaagagcattgctggaccgatgaacatccgaactggtccggatggatgcctggagcacagccttttcctcagtaatgagtgtctgaagaagtcgaagatccttgttcccgaggatgggaaccatggtggtatgggcaatacctagagtttaaattcgaagcatgtacctcgcgtcagatgctggaagacgagcgagcagagaaagaacatatatatgtcaaggtaagaatacaagactggacgtgaacctacccgctttagctttgtcaaagatacccatagctgctcgtatggatgggtgatggattgagtgatatgagcgttaatcgtcaccagagaggtgatgaacgagatggctcttaccgggccgcgtgccaagcgtcaccgccactttatggttacatccatctgaaacagccattccccaagtggaatgtttttccgagacggatcgagattagtcctcgtgtacagaagagagaacatgtagatgaacgacacatacagcggaagagatagatgatgtgaaagaatgtaactatctgtttcttttcctaggttaggtatctttcttcgacatatctcagacaaaaaggcatgatataaattcctagaccgcaacctacaatagatcttctcgtactcttagtcctatcttttctttttgactttccatgccgtgatacccatcaccatcgccgttatcattttagctgccttctcccgctaaattctctgccttactcgtaaccaactcatcttctctccctggagtcttcccgatatctgcctccagctcgtcgaggaggagaaccgtcccttcttcgtcgcggaggagtctcgctgtcctgccttcgccgagtggcaggaggagagacactccttcgtcgaggaggcgtggagtcttgtctccgtcgagaaactggtgaaggagatcggcccttgtatcgggaagcgggaggaggcgagatatcctccctccttcttattcgaggaggtgtgctaccatcccgtcgtctagtccggggttgaggggaaggtgaccggacaggagatcgcgagtcaaatcttcttcgttcagcccggggtgagggcgaaggtgatcgagaattcgagtaccgtcttcgtcggggaggcggggtcgatgattgccggcgtcgtcgaggtggaggggatcgggaccgagatcgatcagaatccgaatccgaatctgagtccgaatccgaatccgaatcagaatccgaatcagaagagagcgacgaggacgaatcggaatcagaggacgaggaagcctcctctagagccttctgacgctgttccaaaatcaacttcggcatgttctgatgcatttaaagcaaattatgaccaaggcttggatcagtactcgagcgaaaatttataggaaaacggaaagtcaacgacataaagaaactcaccgtcaagtgttctctcattttttcggtaacagctcccataccgatagaggtaaagtaattgatcgagaatcgtgtgttcttcgggttgtccagcgggaaaatgttgacatatgcgccctgcatgcttggctcgccgaaccgctccgccatgcgcttgataccaagctcctcgaccatctctgtcatgagaatcttgacaaaaatacgggaggaactcgtcgtttcgtcctcattcatacgaaccacatggaaaactccccaggaaactccatcagaagcgattaggtgtccaaagaaccgaccaatattccgaagtcggtttgtctcgtaccgatgaatagtatcgtagtagttcgcgaaagcctgctcgaatgcatcacaccagattcggttgatcttgcaaaatcgttctccgataagaccgtagaaattggagtaggacctctcctgggaacaacactcaatgatcatattgcaaagttcgatctggaccggcagagaaagacgccatgcaaacagtcagctactcgtatcaaccaagcagcactgttggacgtcacatacctccataccctcctgaatctggaccttcatcagcttgtgaactgcttcttcgtaggtgagctgtacagaagatataggaacaaaaaatcaggtaatggacgaaagtttgctcaatagacatatatcacgacgaaccgaattcatgatcgtcaagtagattgtcctcctcaagttgatcatgttggtctctgtcatgtcctggataccatgtttgttttccaccactattgagatcgatgatggatgaatcagtatccaacacaagcattcaacgatacaacaaaacgtctctcgaaatgagaacgaaccatgaccatcatcctcttcatcgctctcatcatcactatcacttccacttccactagacccgccgtctgaatcggaatcatccccgaggatctcagctttgatcaatttatacttttcttcattctctaggaagtcggggtccggtttgaagatatctttattcgaaaggaaatgtagatgagtgagttagttgaggctcttcacctttcgaaacatacattgccaacccaacactctgcttgactatccgaaagaattataagaaaacaagaagggtactcactcaatccttcctgaacttgcaggtcgtcgtccaatagcactttatgagtgatctgttcctcctcctccaccaagtcaagctcttccacaacaatcggattgtctttatacttgtccttcctcgtttgaaacaagacttcgatcatgtactgcactcgcttctcgatgtttccttcgtgtagaaccgctcggaaccgctcgaagatcaagttattcggcttgggcgagtgttcggccagaaacgcgcccacttctcgggtgagcgcacatgcaatctcgatcgagtctgatgtcggcttctcaagcaaaagtagcaagagctgaaggggaagaagctcatgcgcgacgttttggttgacaagatgcgcaatgaaggtagctgtcgacagacagacgaccttgagacaaaaaaatcgaatgtttttcaattgaaaagaaaaaggacgaaaaaagaagacttgagattgttgcacataacacgctatgggagtgaatggaaagatggagaagaaatgaagaaccacataccttgtcgttccttttaaaggcccttctaaattgactgaccaaacggatcaacagaagttctcccacctggggcaattttgtgtttacgatggccactagagccgtaaaaacaggagtgtatggtaatgaagcagcctgagccttcatcactgatcgggagaacaatcctcgaccccgaacaagattttctccgaacaactcgggcacgacatgtttaatattagacgtgttgacctaccgaagcccaaaacacaatcgttcaatggaacgtgagttgaaaactctacgcgaactactatcaccaaaacaaccaaaaagattcaacagaacacaccttgttgatcaaaccgttgatactcttcctcaaagcatcccaactaagcctctgaaactccgtgctcgccttgtctttactcgcctccatctgcatcgctcgcaacctggctggaggaatataagttccgcccgtttttgttccactcatcagtttcgcaaactctgcagcggcatcaaaaccatcatttgctcctccttttccgttggatgttgggaccagagcagtcgatttgtcaggaccagtggtggtggcggaaagttcttcttctgctaatcgcaaggcgagctggcgttcccgctcgcgtcgacgctgaggatcaacatcgttcacgcgaggaagactgataggagggggtgtagaagatcgcgatcgagaccttcgcctctgaaacggaggagacgcaggttgccgagagtatggaggagagggggatctgaaccggatgaagatatttgatgtattcgcaaagcgagatttttccaaaccagagaaaagtagagattgaatggtgagagttctgcctccacacgaaaacttgactcaaagctagagcagacgtcgatcaaacagacatacctttttcttttcaggccatcctcatcgttcacaagcggggaagaaggcacaggagacattctggccaaacagaatagatgatggaaggttgaaagtggcttcgctaactgagcagacatactttcaggcgtaggcttgttcgaacctcaatcacaaatggttacgcgtgacgatctgtaacttcgtttagacggtcgttcaacttcgttaacgttttcaaagttatgcagacttgtatttcttcagctggtgttcacattgttgaaggggacgtctggtcccataaagcatttctaatgaagccaacgtttgatttggtataaggaacatagttgaattttcatgaatcaagttacaccagccacatgtgcagcaagatacgggaataagacggaaatgatcaggggaaacataagtacattagagaaacgcgtgctgcattcactcatggtcttcactctctcaatgtctgcaaaaagcagggagacagagagtgagactggaatgagagttttgaaacgatcgtagcaacatttactcctctccaatcttaggactatcagtttgacaaacatcgaaatcagtatccgttcttagaagtcacaaagacaagtcagacacagagcaagaacatacgccaaaaagtagttgatgtatccagaagtaaactcgaagctgacctaaaacccataaaccaagaaaaaggaagaagattgcagtccgtattcagcgactgatcatctctttgtgagagagatgaacacaaagtaaaaaatcaaattgacatacgagaagggggacatcattactcatgtgcagcgacacagccctggccaacggtgccgatttggcaaagttcagtaggtacttcagcgagaaagtgagcgtcacagcctgcttcaggataaccgacacctgaacattgtcctcgtcgtcagtcgtcttaaccgactggctcggatcagagtagcgttcgcataaagttgttagctaaaggatccgacacgattgaaagaaatccacaattgattgaggacgtaccttgcccttcttggctctagtgggggaagcagcagccttgccggccgctttgcgcttcctgggtcgctcctcttcatcgtcctcctcttgatcaatctcctcttcatcctcatcgttgactattagaaataagaaatcgaaaaacagacagtgagttgagcgtgttttctcttgcttcttgaaatcacagacctagagcatatcttgagagcctacgcactaaatagagcctcctttctacttctttccccatctgcttcgccatccatgtcggtatccttttccttcttgacctgaaccctcttcttgccattggactctccatcctcaccgtcctcatcgagatcaattacatctccttcatcgtcgtccgcttcctctttgacactctccttcttggtcgatttgctgcttgatccacggctgctagtcttgttcacgcttcccgccttgagcaggacagaagcatttccgatctccccctctgatgagaaccgaactccctccttagtgacctcaatcttgacagattctccaagcgttgtcagatctcggcaaatcttttgaaactcggaagatgacatggtgatctcagcatcgtacgcggtatccggaataccaaggtgatcttgatcgatatccatgagtttgatctcgtattcctatataaatgtgagataactcatgagtcaaacaaaagcgcgccccgagataaaggaatagaaaatagaaggagaggacctaccccgactcgatcagagtctggttgggatcaagagagatagaacaattaaggtcaaattcttctgatgaatcaaaatacacatacgatgaaaactcactgctgccctcgaagaccaagcccaaactatccgcaccgtcagctgcccttaaagtaactatatcgtcgtccttagcacacttcaagatttttgtaagggattgaagctgttatgtccacacatctatacgtatcagtattgatggaatgttctccttctgagcacaatgtatcctaaatacactcacgttgataccaaggggcatatttcgatcgcatcggtaggtctcgaacccttcttgtttaagttgaacagcaacgagggctacatgagagttgtccattgcttgcaagtgctattcaagacgcgaaagagtgggaagtgttatttcataggattcagagaatttaataacaagttaaaagcaaacgcgttgttatgagatttaagtcataacgaaggatgaaacaaagaagatggagagaaaaatgaggaagaaaaaaaaaacaagaataaaggaacaatgaggtataggaaaagacctcagagatgcaaacttacaattccatcatcgttgcaatcaaagttggcgtcggtaacaagctccttgatagctgatggacgatatggaagcgaacgaaacaggtacaagagtcatggcaataagcaccgaggttcagtattcgacggtaagttgatgaatatactggaggatacgaagccgctatcgttctgtcagagtcacttaccatcaagaagttttttaagaacagaggcttgttggagtcgagcttcgagcatcttatgaagtttgttgaggttttaaaaagggaagaggattatgtatgggatttaatggagagaaggagagaagacgaaaagaaggattagaatcgatcggtggaaagttgaatgagggagaaaacagggaaaagctttgatgagcacgcgcacgcgttcggatcgcccgacacgtcttttctgaacgcgtcacacctgttacatcgacttggctacgatgacatcatagagcccgatctttagtcgaccgaccacttaggtcaatcagatgaaaagcaacacatgtcgatattcagactacttgttgtcaagttcacttcgtttactgaattgtgtacacagttaatagagattcattgatacattggacagaagaggaagttggatagtgaagagtgcttcaagatcaaaccataggaatttacggcctgataatgcgtgaagagaatatatgctcaaagagcgacacagaagcttacaaagttggactcgcttgccatgacaagcaagcagttcagcaactaaattatgcctttcctttgatctgctcgacgatgtcagactttccatgtccgtgggacttgccctcctcaggagggaccaaaggtcgaagctgtgaaaaggagaaggagttgctaatgagcaagacactcttgaaacatatggacgatgttcatgaacaatctacttacatcgtcgttcttgactgaacgggtagacgataaatagtagaggtgagccaaaaataagataaaaacacagtcgaagcttaacagttagtcaaacgagatcaattctaatagatgaacattgagctaaacgcacagtgccagatagcagtagagacacccaaggtcactacagtcccaaccatgacgatcagcggagcgttctcgtaggaaaggctgaaggaaggtcctgtaattcaatttccaagaaggaatgttgcatcagtttgacggactcttgttccttgaaatgacgagcaaactcgaccacacatacgcttgtcacttcctcgagggttatgagcagcaggagagcttccggccaaaccagcagccgctcccgtccttgtcggcttctcatcctcggacgcaagccggacggcagacatggagattggcctagttgcagttgaagaaagcttggagatggacgctcgcgtgcttcgaacaagagtaggagtgaacatggtgatttgtttgaatgtgtagatgtgagtttgagaaattacaactaaagattgaagtgagttgagaagggatgtgcgaaagaataatggcagaagaaggaaaacggcaccgctagctttatacccgagcaagatcaatgacccatctccttcttgaccctatgatttcactctgaggaaaaggcagaaaaaaaatcggactgcgatcgcttcgtggccttttcctgtgagtaattcccaactatcgctttccctcagacgtcatcggggcgtcttcgatcggaaggtcacatacatgtagccaatggttacacccatcagtgtcagctcaatctaccacgtgctgtcggtggatcgtctatcggtcgatacaatcaccttgggacggaataggaacaagaacgaagacgtagaacatatatgatacgatggtttctcagatgtagctcaagaattagagcaatttcatgagatctcgatgcaagagagataagaaagaaacagaaagagattgaatgtatgaatgaacgaatgtacttatgaacgaggctctccagggcaaactagtcaggtagagaaacactgtttgaaagacaactaccatggaccaatgtcttgatttcatcaactgtcttcatataatctcacgttctccatcggtgtcgttctttccttggtcaatgatagaaagtctatgggcaggcggatgtacttgtattaatctaccgaagtgagcaggcgtctagtgcagctctggtgttgaacatccatctacgtacgctgtgcatacggcgcaaagcctgctcgacgaacacgatcattagagagtcaactcataaaataaagcataagagatagagaagagggcaaaagaagaatccacaaggtatgaagtgttacagatataaaaagaatattctgattcagaacttttcgtcgacaaactgttattctagacagatactgtgtgatgcaacgtctttcgaaagctgaagagagatggacaacatggaagaacggaccagtacaaaacagccaaaagctcactcaaatactcaaactcttcgatgcttgatcgacgaggatacaaccaaagcatttttgtcgttgcatagaagtgtcgagagaatgagtttatcaaaacagataatcagtctgcttttgacagtcatccatcgattttaattagggtcagagatgcacgtattcaaagcgtctaacttttcccttttccccgcccgctcttgtccgtctactctctcctctccacctctacacaaaacgaaccttacacgtcagacatgttcatcatcgtcagtaccaatggttccctcttctctgtccatgttttattcattcatacctacatcagacgagaatgttgactaagtctatttcgctcaacctacgaacaaccgtcggggtgaaactttctttttgtccatagaattggttctacgacatcctcactcagctcggttagcctcttcctctccctctggctttctgttctgtcttctgtccatctcaggaaatcagtttgacaaaccagtgatttcatatctaaccatccagggctgatgaacaagaatgctaagattctgttcttgggtctcgataacgctggaaagactgtgtgtagttcatctccttttctttcgcgctcatcaatgtatcccatatgtgtcgtccatacttatcgatcacacgatactctgatattcccacataaaatcttccttgttggtgtcatgatatctgtatatggacttatcatctttaccatactctctttcacagacactcctccacatgctcaagaacgatcgactagccactctgcagcctactcttcatcccagtgcgtttcttcctcaaggtatccccccttgccatttgatcaggtactcatgtacatcgctcttccaattttatcaacttatgatcatagcttccgaggagttggctattggaaacgtcaagttcaccacctacgatcttggaggtcatcttcaaggtcagcatttctgatcaaacacagtcgcgttctctgccattgaacgacgtgatgctaaattccaaaccctttgattatgatcgttcataaccaaattttcactaacagcccgacgactctggagagattacttccctgaagttgatggaatcgttttcttggttgactctgctgataccgagcgattgtccgagagcaaaactgagctagacgcacttctcggtatcgaggagctttccaaggtcagtcatgaacaacattccggttatctacaggatatcagttatttttctctcccctcttgattcaaaatctcatcgcccccattttcggtatgtcggttcttttgtatgtcctaggttcctttcctcgtccttggcaacaagatcgatgccgctggagcagtctcagaggacgagcttcgatactctcttggtcttcatcagacgactggtaagggcaagggcgtaccaatggccgatgtccgacccatcgaagtcttcatgtgctccgttgtgatgaggcaaggttacgggaccggcttccagtggatctctcagcgttcgtctctttcgttctccacgccttctcacacatatacctattcttgtcaaggagaccaaactgatcacgattgtaatcgcaattgatcagatctcaagtagaaagcgacatcttgaagacaaaacggttcaatagctattgtccttccttttcaattgctgttcgatctcattgatgacccaccttcgttgcttgataactcttcttttccaatatcttgttctattcattgttttattctttctgatgctccttccacgaaattcctttgttcttacttgtcagtcatttgatgaacttcatgatgctaccgaatttgaaacatccaaagagacgagccatatggctagatgatctactacctcagcctatctgagacgcatgtattcacacccatagttctcctctgaccccatccttctcgagggaacgactgaccaccttccaaattctatcttgtacatcctcgatactgccctgagcgtcgatatccacccaccgatccgagccgtgctgagagataaatcgatccctaacatgacggaactgttgagcaaccagcgattgaaacgacgtttgctcatacctgattgataataatgacatgtgatttaaccagaggattaagtttttgttgcagactcatcaatgaaagggcccacattcagaaagataacagaagatattcataccgttcttccccaaagccaccacgaagcttcgactcttcctcagaaagtgtcaagaacaacgtcaggtctggaagtggcaatcctttgtctggagtcaatagatattcttcctctaatccctatggccagaaaacagaaaaagactaccgtctcagcctacaccacactctagacattcatttagccagccactacaagaaacgtggtgaagaaactcactttggccatcgagaatgcgagacctgaaaaagcatatcggtcgcaaacgacagatatgccagaagcaagaagtgattcgatctcttgactgtttgatttcgagcaattgaggaaatctcagattttatgtcatgatttattgtttaaaggtgagatacagagggattgtactcacgagcactcccagcggttagctgagaacagaagatgtatagcctttccctttgaatcgcctaactcgatttcttttcgaaggtatctatcgatcaactgaccaagagctgtcgttctttctgacatcaggaattgagcgatagttagacatacagatgagtagatcagagtctgtctctttctaataatgaattcaacgacaggatttgacaaagactgtaggagtcgacgacacagaataacttttgcaacttacccggaaacttccaacttttggttgcagagcacgaggcatgtacccctctgactttatcatctatagcacgtacgagaaggtcgcattgggtagattttccagtgcgatcaagaccttcgagaacaataaagtggcctctaagtggtgtggatgttccagacatttgcgtgtagatgttcaagtgttgttgtgacgatgttgacggatgacccatctcggaaacgccgcagattgacacacgcgttcataatcattttgccgcgtatcgttctgccaacaccctgacgcattacaccgacatctctcaagggttcttaaagacagattagtttcagaatgtccctcatcattagtactgatatacatactactcaacttatagtagttccagatgttggtgatctgccctctgctgtagagttccttccacaagaggcaattattcagaccgtgtcgcgtcgccagatcccccattttccgaaaccttcatgtaagctctgagaatattcatcgaaagatgaatataggttgcgctaagttctcatgagggtgaacagaagagtacttcaactctcttatttccgttgacgtccttcgatcgtatactacataacttacgttgcctgatgtatgtcaatatttgaaagttgttgagagatggactgtatatgaagaccaaggtgcgaatgaaagtttgtgcgattaaagaagaaggctaaaacgacttagttaagagctgatgaccaagtataggaaaagactatataaggatttacacttgaaacttctgaaagggcggaagggcccggcaaccgttctgttgcgacttgactgatagtagagttgtaagacgaggatgtgcgccgaatctcaggctctcgaggattgaggaagatgccaaagccatatgcatagttgtatgtaggatggaaagggttgcaaacgaagatgacagaatccgaggttgagagaagagaggaaaagaactataaaaataaggaaagcgacgaagtacttttatcgcttcgtcgctcaggcatgggagcaagacggaaaggatgcatacaggtatcgaaagtgtgaaaggtaagacacatatattgttaagatggtatgcaaatgcatgcaagatatactacttggtcagatccctgacagtcaagttaatccgtagccacaacggggatgaatatcactcaaacggctttgtctcctggcttgacaaaatcgtttgagagatgatcacccctgttgtcgctacaaatagttttgactttgtgaacggtctctcgttccactcttgctatccaattattgattatggatgtagtttcacttttgtgcttgatagaccaggcgcaatggtaattagcttactcatcatcccaaccatcatccattatgtttcataagcaggaacaatgagtgggagtgttgagaatatttgaatatggtgcattcatttctgcttatcatctatgtacctaagtcttagctagcgcactctgccagctggcatacttctttccttctccttctttctttttctttttctttttctccttcctcagcatttaccagaactgtttctgtgtcgctgaggttgctgttgaaatatacagtataatttccttattccttgttccttgttcctagttctcttggcggctccacagtttcaggttcccctgtcttggcgtttctatctttagaacctgtactttagccgccatcttttacaac

SEQ ID NO: 2290 - DNA, 5655 bp, Xanthophyllomyces dendrorhous
  misc_feature (1965)..(1974): n is a, c, g, or t
  misc_feature (3777)..(3786): n is a, c, g, or t
caaggctgtgtaattccaacagataagcagaaaccaaagcaccatattcaagtattcttaataacctgagtgttacatccggtaaccttctcctatttctatcattcctcctgctttgttctccctatgctctctcccattacagcgcaggcatttctagcattttctacgacctgttctcttatgcataatcattggagtctgaggatgatatataatacgtggttcctttgccaccaatagtatagtttctcaagcctgaatcctctatcctccttggtccctttgtattcttgtaatctgtgatatcaatcttgttcttccaaatctcttcgcctcgcccctccgtcacaatcaccgagcaagagagcctgaacttctcccctactcttcgtactccttgtctggttacacttttgtaaccttcccattaccctctgaacccggaacctgacagtccgtttctcgccgaatgtcgccgttcacgtgatcgctttcggccggaataactccggccatccttcccggagtgcactcagacctgcaccatcataaccgcacagctgtgctctatcgtcccatatcgttatctcatatcctgtactttttcggctttccttcgcattgaatcggctccaccagccagcttgctgtatatgactccttccttcttcccatctccttcttgcacctcagtcgtcaccagaactacagtctggtatactgagtcattcgttctgtatttactctcgacagaactcttaatcttattagattaagagtctgagtactctacgagctaacatgccagatcccattctttccacagtgggagtggaatcgacaccttctgaggtctcactttatcgagaactcagaagcaacacactcagtaatattatccccctaccagccccacatacttcacaagtcaactacaagatgtgggaacgccgcctggaatcggctctgttcgagatgcgtttgtgggatcttgacgaccaaatcgcacgcaacttcatcatatctgttctcacagactcggagggagagcgcataagtgagtgtctaacagctcacaaacagatcgaagtccttcgatctgttcatatgcaacaaggcaccgtcggtgtttttcaggttctcagctccgtctggaatatacgctccgagacggctccgagtcttcaaagccatgtcgaccatatcggtcgacaacttcatttgactgaacagatcgccggcaaaaccatgacatacaatgaactctatgctctcattcttatccgatctttacccactaccgctcacggacaatccttcgtggccagcttacctgctttggcaggcaatgatgctttgggtcatcccaacccattaacatatgaattcgtttctggagccatcctccgcgacaagcaacttcggaacacaaccagggcacttcacaatagccgtgagtcaacctctgcacttgctgtcactccttccagtccacaatgttcgtactgtggggactttggccactttgccaaagcctgcccagacaatcccatctcacagactggaaggaagagtgacagtaagtacaaagccaagaaattctgcgacttccacaagtcttccggtcacaatacttcagaatgttacgcaagagatcgacttggttcaggcaaagggacacctcgtccccaagcaaactccttgtcggctcgagatcctgacgagaatgaccaaacgtacgctcattctatcattccacagaatttgtatccctcgttcaccttccttcttgactctggttgcacacagacttgtgtcagcgacagatccctcttcagcacttacgagacctactccgacgagctcttcgtcgcgaacggtgcttctctgagtgtcgtcgggaaaggaacggtgaaggtggttagcaagtcctctgtggatggtcagcaggtcgaggtatcnnnnnnnnnntcgacttggttcaggcaaagggacacctcgtccccaagcaaactccttgtcggctcgagatcctgacgagaatgaccaaacgtacgctcattctatcattccacagaatttgtatccctcgttcaccttccttcttgactctggttgcacacagacttgtgtcagcgacagatccctcttcagcacttacgagacctactccgacgagctcttcgtcgcgaacggtgcttctctgagtgtcgtcgggaaaggaacggtgaaggtggttagcaagtcctctgtggatggtcaggatatcgatgttttattgagtaatgtttggcatgttccaaaactatcatctaccattctcgtttcgcttggtcagatatgccacgttgatggtatcaccttcagtggaaacaagaaagagatcttgatcagtgatcgttctggtgtcattctcactgcctctgcgtacagcaagaatctttgggctttggatgtcacagtccgaaccccgaatcttgctgcctcgctggtttcagaacgaactgagaaagaaatcgacttgttacaccggaggatgggacatgcttctcttacttctatgaaatctctcatgacatgctctggtttctacaagacaaaggtgacaccggaagatctgaaacactactttgatagaggcatatgtgcaccctgtgtcgaatccaggcagcacaaaacaccctatccgacatcaaacacagtcatctctcaaccactccaactcattcacaccgatattcaaggtcccatgcctcatgtgtccttcggtggagcacgctacatgctcaccatcatcgacgagttcactgcttaccattgggcctggtcggtccatcaagctcaaaagcgatacggcatccatcatcaaagattggatcgcaaaagtggaaagagagaccgtttacaaggtcaagacaattcgtagtgacaatggaggtgaatatctttcaaacgactttgtctcgtggctcgaaaccaaaggtatcaaacaagaaacatcgatagcaggaactccccaacagaacggaaaagcagagagagcaaacagaacgatcgaagaaaagatcactgctcttcttgtcgagtccggtttgccaggttctttctgggcagaagctcttgtctatgctatctacatacttgcccgcaccgttcgcaaggcgagcgggcggacaagatatgaagagtggtttggaaaaccacctacctttgaccgacttcgtgtttttggctgtactgcatatgcgcacaacccgaaacatagaaaacacgagtcaaagtcagtttcttgtttgttccttgccccatcagaagacacatttggaaagaaggcttaccgcttagttgacaagcagacccttcgaaaaatcatctactcccgagacgtcgtcttcgacgaagcttggacaaaacgatcagaagcggaagctcatcacagttcccagagtcagacaaagatgtcgattgcaagtccaatcgaacgtcgtccaatccacatgagaaacacagtgcctgactcatatctgactcaggatacactcgatgatgagcaatcgcctatgacggatgaaatccaatcagacacggaagtagaaactattgaacaagacgcagaacatcagtttgtgcagtctgaagatgaagaagaagttccagaacaagaatgtcaagaaatgcgagacttacgccgatcacctgtacatgaacgagtttctccgccgccgatcgttccccgccgctcagctcgcctgtcccgaatctcgagaccagtannnnnnnnnngagacatgtccacaagcaaccattcttgtggatattggttctcgactcctcccatctcagccgccaaagacttacagacaagcccttggcgggccgtttcgaaccgagtgggagctggccatgagggccgagctttcccagttcgaaaaactcaaggtatggaccttgagaccggtcgatgatccggagacgcaggttatctccggtcgatgggtctatacctgtgggccaacgtcagacaaaaacacttgtaagttcaaggctcgctgggttgctcgtggattcgaacagcttgacggcacttacggggacacatactcgcccgttgcagacggtacatcccgacgcatctttctgtcgatcatagcaaacgagaatctcacaatcagacagggcgatgtgaaaacagcactcttgtacgcaaaactggacaaaccgattttcatgactccgccaccaggatatgcatcctcgaccaatgatgtctgctatgtcaccaatgcaatatacggactacgtcagtcaccgaaagcgttttgcaacagaatggcaacataccttgcaaccattggactaaaccccatcggctaagacaactgcatatttctaggcgaaagacatgggaaaagggtgatcctgatgctatacgtggatgattttgtgattgccggtgctgatgacgatgtggctggtgtgttcgaagacatcaagcgccagttcgaagtcgacgaccggggcgatctcaaccctggccagctattgggaatggagttcacaagagatcgaataaacaaaacgatcagcatcacccaaaagtcatatatatccgaagttcttgaccgattcaactcactggatgttgtaccaaggcggatcccgatgcaaccggatctgcaactgtgggagtcagactgtccgtcagttccggacgaaagtctgagaaaacagtatcaagaactgattggctgtctcacttacctagtgacctgcaccaggtacgatctggcatactcagtgggagtacttgccagatactgctccaaccctgaccctgttcacatggcagcagcaagaagggtactagcctatcttgcatgcacgaaggactttgtcttcaccatcggtggtggaaaggctcagccagtagtagagcttttcaccgatgcagatcatgctggagacaaagaaagcagaaagtcggtgacaggagtgttagtatacgtgtttggatcactcgtccagtggaaaagtaaaaagatactttctataacaaagtcctcgtgggagtcagagtacatcgctctctcccaaggatcgtcccaggtgatctgggtgaaagcagtactcgaacaactgggctatgatgttccctgtgtggtcgctagatcagacaaccaaggggccatcgcatcagtcaagaacggccaactccatcaagggtcaaagcatattgacttggcttacaagtatgcgagagacctctatcgacaaggtctgctggatctgggctgggtagggacttgtgacatgccagctgacatgctcactaaggccctaccaagagaaacgttcgagagactaagagagaaaggaggactgagaggtcaaaccactggtcgggagttgaaccagcgatctgctcaaggggatgatggtggttggaaggtcaaagcaaaagagacaaaagacaagaaaagcaaggttcttataggaaatccgaaggctcatgcatctcatgctgacgacacactggttacggcgagtgggagtgttggaattacacagccttgtgtaacgacaccgcatccaggtcacgtctcatgtggcgggcctggccacactgcccggctcactgcccaagtcactgcc

SEQ ID NO: 2291 - DNA, 421 bp, Xanthophyllomyces dendrorhous
cggctccaccagccagcttgctgtatatgactccttccttcttcccatctccttcttgcacctcagtcgtcaccagaactacagtctggtatactgagtcattcgttctgtatttactctcgacagaactcttaatcttattagatcaacccgagtccgatcatgacaccgaactccttccttttctcaagaacccctctcgtcaagctccagtccaattgacaaaacaactcaagaaactcactcttgagcctgacggactaattttatatcaaggcttggtctatgttccagatgaccaagacttatagactgacattcttaaacagtgtcatgaccacccctcagcgggtcactacggtcggtacaagacgctcgaactgttgtcccgcaacttttactggccgaacatatccaggtt

SEQ ID NO: 2292 - DNA, 7344 bp, Xanthophyllomyces dendrorhous
ctttcttctcatttgggcacgttgggtactctcacatatatctgcgatcgacactttcgtttcctttctttttctttttctttttcccttcctcagtattcacaaagactgtttgtgtgctgagttaaaataaatttgttctatcttgcagaacaaattgtgaatctctttagaggtcgatggtattgaactcgtacaagtatgtcttcaacttccgtctaggaaagactaacaccaaggtcgatgcttttacgcgccgtcccgattttatggaggggggtgatgctcgagcattcgacgaacagcctcagatcctttcacggccgatgcaggttgcaccccttgagactgaaagacagatatccgacatcgtgactcgcataaaagcaggcaatgaacaagacgaactgatgactgaaatccttcccttcctacgagacccttagaaacagatcccgccgtcgctaacgcgactggtaagacagtactcactcacaccggacggactgatcacgcgtcgaggcctggtctatgtgccggatgacaaagatctcaagacagatatactctcacagactcacgatcatcccgcagccggccactttggacggttcagaagactcgaactgatctcaagagacttccggtggcctgatgtaacagcttttgtgaagaactacattcggacttgtgacttgtgtcaaagatcaaaaccctcctgtcaccggccatacggatcactccagccattgtttgtccccgatcggccctggtcgtcgatctcgctcgaccacatcgttgacttgccgctgtctaatggcttcgatgccatccttgttgttgtgtgaagactgacaaagatggctcactttactccttgcatcacgaccgactcggccattgactttgccaggctgtttgagaccaacatccacagacttcatggcttgccaaaagacattgtctctgatcgaggtacgctctttacttcgatgttctgacgggaggtctgcctgcagttggatatcaaacagaaattgtccaccgcgttctatccgcagacagacggacagacggaaagaactaactctacattggaacagcaccttcggatcttttctgactacttgcagaccaaatggttcaaaatccacccttcgtaccgagctcatgaacatgttacagtgcccatggtactcataggcttatagtttggcagagtgtatttgagacaattcaatacatgctgtcacacaaatagagacaaaaccttgatgttgtaaatcaagcttacaagccgctgcgtaatagaaggaaatgttcaagagacagagaaaaaaaatcaatctcgtaatatccaaagcatagataatcaacagcaggaatttgaaaaacagatcatagaagccagactggcgaagcgatacacatgtagaccgaacaaagatgaatagttggtgtaaaattgtgatgctgatcgacatttgtaagatgatagtcatgataaggcaagagtcgtgtcaaaaaaatgactttgttagagtagcttgagcatgaaataggacaattgtatcatttatagttgaacacatctcaaatcggccataaaacgttcttgtaccatttttttcgtaccagtatttctgctttcgttgatgtagtttactgctcaaagatgcattaaataccgtcttcttcatagtatttggttgtttgcattcatttaggttctggctctcaagacatgattacgagttaagatcatttaattgccactttgacacctggtatctgtacaaattattgcaaacgtcaacagatgcaatctacatcaaaacacgttatatgcatatcgcagtctctcgtcatatctatatagatcctgattgataagtcgaataattcacgatacatacctacttgtgcattgacaacttcctgcaatcaactccatgcacagtagcgtcaattgcttcaacaaaggaaggttcaaactcgattcatgacaattagttaaaaattcgttgtatctctgatgagcttttctttcaattctttgatccttcacctcaatttagtttcatcccaagcggtatacttttcttgtttcaatacaaaattgataagtagtcactgataaagaaaactaatgacgtgcttcaattatactgacaggtttatctcgaagtaaaatttcagcacacatgaagttcttttcattcattgtttacatgatcatatgcagccatctaaaaatgtctcctataactcatcttttctttcccaaaaagcatgtgatatggagtctccacattaaatgttcaacaccgagatgcggaggtattggacaaacatcgttattcacaacttgaaaaaaaatttcaagcagtggattgctccacttgcatttgaggggctacaaaatatcagatttgaactcataaacacaaaaaaacgcatcgaactatacgacgaagtgaaaggaatcatacacgtaattgcatgctgaaaatcatactctatgagacattcatcggttaaacaggttaagagtttgggacgacatttaaaactttcagatctcattgaaattggtatcggttacagtcatgctatgtggattacatttagatgagaatgttgtatgtagctcaagagcatcctctttctatatattctaaaatatatttgacctcatatttaaatctgtgaaataaaatgcatgatatctgtgattgacatcaaaaggcgacatttacatgccaagcaaagaagataatgacgattgatggcgatatcaacctgatttggaagtcaaccggtgcgatacatcggaagtcgataaacaactcatattttatcaatttaaacaaagacatatcaaacaaaccaatataaatctgactttaataaagagtcgaaagttgaaaaaagtgaaaatgaatagtgagaacacatcagacgtcgagacatatcagtactgtatcgattcaatgtcatatatatctttgtctgaaatgaaactatgacgtctgtgatcaagtctctgccgtactttccattagtatcatggccaaaacatttctgtactaccttcaatggttgtgggacacattatagcaatatatgcaaagttgtcaattcagcgtaaaaaaaagaaggaaacgtcacatatcgcaatgttgaacaatcatccagaagaactttaactcatcattgatgacgagcgaagtttaaatatggaataatcatcttgaccttcaagcattctatacgctttgcgagcaataaatttagaatcaatccgtgtttgcaatagtgaaaagcaacgtgtacatcaatttacaccgtattttcgttgacggtcgaaaatcatgagggcttactggaaaatgggctcatcgtacactattcgtaggtatacacttgagagctacagttctaaagcatcttatcgtcaaccttacaaggtgaacacaacttgaagtttcacagtttcggtattataaatatctgtttacatgcactgtgctttgtttaacctagtattcatggatatgctaacgattgtgtgtagcagatcagatgagagacagacctcgtcagctctttcaggctcgaggtcaatttgtgtttatttcgttgaatgtcaaagggctacaaatctccaattaactctgaaaggaaccattgaaagacagcaaaatacaataaactgtctctcaagaaactaagagcagctgaaattagtatgcatcaaataaatgtaatgattgaaacgtggagaaaagacccgtcacctttgatccagtttgcatgcggatatgaggtttctgagtgaattttatattttacaagtatttagtggagatggtctgaacatataattaaacattgtatgtcaacttcctacagaacgttcaattgatactgatcactaattttgtggatctccccattatgatcaaattttaatcacacaaatacgtgaaggatatttaccaaattgacaaaattgttttgatcaatcattgagtgatgataatgattttttttgtcttaaatgtcaatgatattgttatttatacatacgcgcaaacaaaagaaagttgatacacaattcaaatcagatgtgcattgtcattgttctcatatagcttccgagaattaattgtagggacaatattgactgatcagtcaatttggcgttcgatcaaagtgcttgattagacttcactcaggcgtcagagatgcaagaagacaagataataccttgaccttgccagcctccatcgaaggatctagcaacatgatattgaactgaaagacatttatccgaaagatattgcatacttcaaatgaagtttcgaatatctccgtgaaaatcagtaagaatttaagaaaacttcaagttatttctggccaatgtatttaaaacattatgacaatgatgaaatgacggtttctcattttgttggttggaaaccgatatcagcattgcgttatgcagcattttgtcgaggaagagtaacatcttgcccactggcttcatctatgaccatcaggctttgtttcaaatccgtcatcgttatgacacgatgatatttgtaacaaaagttttttcttgtgatgagtgaccaaatcaagtcttgcaatcttatctcatgacgtcacgtttgacaactgcaacttcattgttcagttcacagttggttttaagtgtgattggacaggacaaatgccagaagctgatatacatggtttccttattcaaattgaatacgtacagctctcaacctcagtcacttgatatgttttgtacatttaaacatcaggtaattttcatttttgcgtagtttcacatccttctttcaaaatcatgtttcatggtaaattgagatacagagtcgtaattcatattatggacagtttcggcgtatatatcttgtatcaactttcttccgccagctgttttgatcacataaaaatacaacgtccttggattttcaaaatggccttgtacaacactttgtaaacttgatcctgtatacgacatggaactagttctcagtcaaaacagtcaatgtttatcctcgattgctgcaagacaggtttttatataacatgacaaaacgttaaaatttgtagttgcagtttcaatacgactttgaaggcttgatttcttatacttcctccgacgagtttggatgacatatcttatatacttggtcaagttttgatcaacgttctcgtgtttatatcagtgaatatgcgtctcaaatgatgattgatttacataccaattgacattttccattggcacgggcttcacgtatctcgcactagaatcattgcttcatataaagataaatagttcagtttcattatatatcatacattgcatacagtgacatatgttcagagcttctcagatacactgtgagcatgcacgagaaaataaaaccgaagaaatggtattgatgtacatctcgattttataaattgacaggttgaagcttgtgaagtagatgatggtcagatgatgacaaatctatgttttataacatgttctcagtgtatagaatgatgctaaactaaggcccaagttaaaacagaactatttactcttgggcctagaatcttcattttgttcctctctttctaatgctaggctttttgaagttggaaagtgtttatcgcaaatatagtttcaaattacccgttctcgaaatgtgtgattatcaaatttcatatgaagtgcttcttcacgtttgaacatcaagtaaacagatgctgacaacaatttcattgaataaactgcaagcatcggtatttagagaaacaaagaatgtctacactgaacgttagaaaaacaaaagacaaagaaatacaagttttggaggaactgacccgttgacttctcgaattcgaacaaaaatgaacttggaggacgtttaaaattttgcctacgcctgagatatcaaaacaaatcagacctacagtggaggaaactctcttttcctttgtacgacaaaacaaagtgagctaccaatgaacacgaaatactatgaaaatgaagagaacacagagagaacaggaataaactaacctcagcacacggaaaaccgatgaaaacgcttgagaaaagaacagaagaagaaagaaagaaaaaacgaatcaataatgaagagagatgagaatataggtggactcacggtttgttcagcaggatagaatgatgtcatgatctgacccagtttgatccgcacagggtgaccttgcgcaatgtagaccgatttttgcaacagcctcttggtactgcttaattcgctcttggtacatctcaactctctcttggttatatcttgactcttccttggtatctcttagctcctccttggtatctcttcgctcttgcttggtatctcttcgctcttgattgtgtttccttgtgtttccttgtgttcgcttgtgtttccttggtctaacatctcgaatgatatatataccatgtagtcgttagctatccccccttttctctctcaagcttggaacctcgttaaatcctcatagttcccttcaataacctcttcatatccctctgcaatattgcatgatctcttccctcttgagagctcaaacgcactgagtaccgtccccacttagcctccttgcctgcgccctcaacaaacagatgttttctacttagcacacaaacagtcttttgtgtatgccgaggacaggaaaagcaacaaaaaagtgaaaatatatgaaaaagaagtgtcaagcgcagatatatgtgacaggacacaggtgccgagatgagaagagggataggttgaaagatgggatgaaaaccaagaaataaatgagaaaagagaagcaaaaacaacactgaaagaaacagtcacgatggaaggagaatgcttggcgagatgtggactgagacagcatcagtcgaagatggaacagaaggattgtaggaagtaaatccggaatgttgaattcgaccgaatgatcctaacgagctttttaggactgggttggaaaaaagatttgaaaaatgttttcccttttcgccctgtttcctttcttgcctcagatctaataaaatcagggagctcttggtgttgaatttgtatggtcacttagacaacagttgatcatatccagttcttctgaatgtaggccttcgcaactgattcttccaagctaattctttgatcgtgaatctctgaatatagttctttagttctaagtctgatcccctgattccctaattctgattccctcaaagaagagtgcacacacacagtgagcaagttgattgagagaaccagaaag

SEQ ID NO: 2293 - DNA, 393 bp, Xanthophyllomyces dendrorhous
gtgcccatagtcggatgggtctcggacgaagcctatggaagcaagagaggtatggagcttgttattccattctcgcgctgcctgtttcaggccatatagtcctttgtgaagcttacatacatagtcttcctttcccttttcttcgaagccaggtggctgccgcatatacacctcttctttcaggtccccatagaggaacgcggtctcgacatccatctggtggatgtcccagtcgtgttcggctgctttcgcaaaaagtaaacgaagggtagcaaacttgacgacgggtgcgtaggtctcgtcaaagtcgacgccaggtcgctgactgaacccttgcgcaacaaaacggactttccttctaatgacctttccttcggtgttcttcttttctgc

SEQ ID NO: 2294 - DNA, 407 bp, Xanthophyllomyces dendrorhous
acagcacgacatccgacggtgttcctgtttgccggtcgaggcacgagagtgtagaccgagtgttttccgaacgactccatttcttttcttgctgcctcctcccactccttccgatgccttcccatcagcgctgccttcagcgtcttgggaacgtcggatggaatcgtcaagtatgctcgacataactctgaatctaaagcggcttcactctgcaaggtgcgttcaggatcagtacgctgtggtctaccagaatgagataaaatagaagttgacaaatcgttattttcatcatcatttccaccatcatttccaccatcatttccattattacttccatcatccttcccatgattgtttccatgatcatttccatcagatccgatcgccagttttccgtgttccgggcg

SEQ ID NO: 2295 - DNA, 1173 bp, Xanthophyllomyces dendrorhous
  misc_feature (844)..(853): n is a, c, g, or t
cgggcggaaactcgagtattcctgtaccggaacagatcgtctggtgcttcttcggagtgcgggcgtttctgctgctcgggcgagttgttttcggtatgtaccaggaccgttcgttgggactgggatcagacttggttctgggagccgagatactgctattcttctcaagaatcttctgttgaaacatgtgttaaaagtacagcgttctactactacagcactctactacatagttccctatctttgtacattatatacaatccaatcctagtaacacttatggtcataccaacctctttgattgctcagcgtagttggtttgattctcttttgtgtcttctattctccttccttttatgtcttttcatggtccatctgactcggaccgccttgggccagctcgggccaactcagtccctctctttctagattacttgacttatatgcctcaccttctctcgtctatataaacccctcttttctccatctctcattccttttccctcagtcttcaccagatatgcaatctgtgatactgagtgttgtgttttggtatcatttcatacagattgctgtggagattcttaagatcttcacaccaatctgtatgaaatgataccaaaacacaacactcagtatcacagattgcgtatctggtgaagactgaggaaagaaaagatgagatggaaaaggaggggttcatatagactggaaaatgtggaagacggttgtaaaagatggcggctaaagtacaggttctaaagatagaaacgccaagacaggggaacctgaaactgtggagccgccaagagaactaggaacaaggaacaaggaacaaggaacnnnnnnnnnntgtatatttcaacaattctgacggaaatatcttctgctgtggtttctacagacttttgtgatgcgttttctgcagtcgttcctggcgcattctcggatgcgaccatggaagtatcttttgaaaccgaacccggagtggtctccgaagtaatttttggagaaacacatgaagacgcagctgaaacaacagctcgagaaacaatcgaagaaacacctgaagtaagatccgaaacaccttctaaagcggttcctggaataccttctgcgctgactcctgacaagatacctgcagcagtatctagattgacatctacagtatca

SEQ ID NO: 2296 - DNA, 47193 bp, Xanthophyllomyces dendrorhous
ttccttcggcacggtgagtaataaatagggagcacttgatggggaaatcgaaggctggaatgtatcttgatcttctcgatcgtttctccgagacagttgatttgtttagacaattgaatctgattccctagttccctaattacacctaattctctaattctctcaaacaagagtgcacacacacagtgagcaagtcgattgagagaaccagaaaggggaagaaagaaaagaaaagaaactagctactgtatatacgagatcaccaagatggaaatgagatggaaacaaaatgaaaataaaccaaaagtgaactagaatggaaataaaactgagcggaaacgaaatagaacgagagagaagtgaattaacatgttgaacgagaaactgaagagatagaaaatgaaccaactcgcaacactcggtggttgatgtctagactgctataatcaatgagaatcttcacagcaatctgtatgaagagcaccaaaatatacagtacttagtaccacagattgcgtatctggtgaagactgtacataccataagacagatctgtgtcatgatctgacccggtttgatccgcacagggtgaccttgcgcaatgtagaccgatttttgcaacagcctcttggtactgcttaattcgctcttggtacatctcaactctctcttggttatatcttgactcttccttggtatctcttagctcctccttggtatctcttcgctcttgcttggtatctcttcgctcttgattgtgtttccttgtgtttccttgtgttcgcttgtgtttccttggtctaacatctcgaatgatatatataccatgtagtcgttagctatccccccttttctctctcaagcttggaacctcgttaaatcctcatagttcccttcaataacctcttcatatccctctgcaatattgcatgatctcttccctcttgagagctcaaacgcactgagtaccgtccccactcagcctccttgcccgcacccataacacgagaacaaagtgtgaaccaacctcagcgacaacgaaaaattgttggtaaatactgaggaaggaaaaaaagaaaaagaaaaagaaagaaggagaagaaaagaagtatgccagctggcagagtgcgctagctaaggcttaggtacatagatgacaagcggaaaccaatgcaccatatttaagtattctcagatctataacacgggtgtctgttttcctcctacttttcggggcagacttttcacagttctcaaatacaggccaaagctgaatagcagtggataagtcagcttcaaggttgaaaccattcacgcgtttggcttgatacattcagaaaaaggaatgtccaagggcaaggagatgagaaagtcaagactgagagaatcacattcgatcacatcttatttaagacaacatgttgttcgaaggaagagagcatatatatatgacatatggttcgattttgtaaaccatctaaagctcgatgctatggtatacgtgtgcgtgtcggagatatagcaaggagcaagaaagaatttcttatatcgatttgccggattttattgctgggatcaagacgacgacgatgagatggtttgtgattgtacggatttctcgaaaaattacataagtacaaatgaactgtcctgctgaactcagcactcatcgccgctcccatatcactccaaatgtctatgatggctgatctcttcaaggtcgagacgattcctaacaaaggtcggggcttgacctcaactcaacctctccttccaggaaccctcctccttaccgaacgtcctttcctcaccgtattatcttctgagtttagtacatctttcttacagaaacaactcgaatccctgcccagtgataccatgcgcataacattttctgcgttcaacaatgccagaccagatttaggagatgtcatgggtcggtggaagaccaatagtataccagtgggaagaatgggagcggggatgtttgagtggacttgtctgttgaatcattcttgtgatccaaattgcgtttttagttgggacgaggaaaaaggggtcgaaagtttgtaccatttactactcctttctcaacagaagaggacagtgaatcaaaccaatgtgactcctttcgatgaatactgagaaaagtttgcaaacattccttagacgtctatactttaaaggccatcgaagctaagacggagttgactgtaacctacactccatcatatcttctcccttttcaagatcgtcaaacattcttaaaggaccatttcggttttgtttgtcgttgttcgatatgtgttctgcctttcgaaccaacaagtgcatatgattcccaactcagggactataaccatctgacaagccaattcgccgctctgatcatcaccgatccgtctcaggcacttaatatgatttctaaggcactgtccatggaagtttgccctcctggggagcgaggtgccaggttctacgatggatttcaaatctgtgcgtactggggtgacgaagcaggtgcaagtgcatggatcgagggtgcttggaagtgggctgtcataggtagaggagaagggagcgaactagaaaggaaaatgcggctgctacggggaggaaacgtatgcacgttcgaatggtggggtgttggtgaagaaaagaggtctttgatggttcaaccagtgagcaattattctttcatctttcttggagaaggtcaacaagacttgtagtggtcgtaaaaaggtgtccttgacatactacggaatgaggctcaactaatgaagtcttacaccatcttcccttgttttttgatgctttgtgcggccataatctgattttaatcgcatgtgcgactgcttcagcccgctgactcactgaatacagatccttccacagtgaaggtggcgaaacttagcaagggccagaagaaatctatcaaagcaaagagagcaagacagcttgcaaaggaagctttcgacgaagtaaagtcagatgatcaacttcgaagttgattggcatttgagagaacaaaatatgtatggttggttgtttaaattgtgaactttatatatcgaagaagggcaatggaagtcaagacatatgctttgaacaatgcgcaccctgagaatgacatctttgtatcggttgatgattgaaaacaaaggacatggttgtaaaaatgttcgatcaggccatagtatatggtcaacaaaaatgctctagaaaatttgtattctattgatattgaacaggaaagcacgactttttgaaactgaagataaaacactcccttctctgtaacagtaaagggaaaaaaggaaaagaaaattggaacaaggatgtccaactaaaagaataaggaaaaactatgggaagcctacacatctatatggccatatacatgccgtcttcgtcaattccatcgtcttttctgatagatccttcctcgctttgatgtgactgttggtgatgctgtggatggaagcggcttgaagaagcgtagggatcgaatccctgcattgaccctggtgagagaggatgtgatggatacaccggtgataacggttcagaagttgtcggtgtgtttccatttgcctgacgttgttgatcctctgagtcatgcaccaaggatccagaagagagaatatttccagccttcaacttcagagaggaaaatgtgcccgatcgctcacgaggggtgtcttgtttgtcttcgcttgtggaagccagcgctcgacctagggcttcggctttcaactgttcttgacgagacttgaatcgacgagtgatcgtattgcctcgaccgccaagcagagaagccaaatagagttgagatcgacgacgaccagcgacacctcctccttcttcggaagagaagtcgtatcctgtcccgcttgcagacgtcgtcaaacctgtcgacatgtctgatcgcacgaatcgtgtttgaacatatcgaggcataagtcatttgccactgttgcatacttgacggtttgtgacaagcacagttgagaagctaccacagaatggtagaaggcactcaccaatcagacttccacttgtgacggtccgtcgtagcggggcaagagagaccatagaatcggaatcagggatcaagctttcccttgtcacagctgacaagtccattgatgaatccaggttgtacggattctgataatatgacacgtcatttatatcgtgggtctcctctccttcgtataattcgattgggcggttaatttttctgtattgtaaacaaccgagaaggtgtcagaacagaatgacttgatccgttgatagacatgagattagcacaagcttgaattaagaagaaaagcatgtaccgggcggctcggatgatgtcgatatcggttggattgatgatttccttgaaggcttgtgatatatatcgaggcatcaaggccaccactatgacatcaacaaagtaagagcacagagattcagtcctagagggggagagactcgtcaggggctatgtgtgtaaacgcaccaatgacaaagaaggttccgagccagaatatacccgactggaatagataatgatccatcccactgtgtatgtcaacaaattcaattgcgaaaatcaagcgacagcacaacaattaggatgagagaattcaggattaatctatatcaaacttctgtgaacaatcttactaagagtagctgagcatcaggttaggcggaaggatagcataaattgccacgaagatctggatattgatatgaaagctaatgtttagagaaaaaaacgcagaatttttgggaacgaagtgtacaggcggagataacaggtcaattacgcacccagagcaatactggaccgatggcgataccttcaatgatgtcattgaaatcagcgatttatcaaaaatggaaatgctttcgaaaacaagggttgacttagagctgaaacgtactggcaccacttatccaagtccaggcagtcgtcgttataccatgaaactcatctaaaacaaagagcggtcatgttgagattcaacgcaacatgaaatgcgaaaggtgaggactcactgcaaacgacgacagctccaatcaccattacctgtatatttcgttatcgaaaccccatcaggatgatcaactggaagatttgtttgatgcttgcatacgtacagttgaaaactcgtataagaagacgtcgtagccatctgatcgggcagttgtgacatcatacgtgaaaatgattataaaaaagataattgcggactagaagatggaacagttccttgcgttagcgttagcggatatgttgaagctctgccagtgtttatcgacgaacctgaagagttccctcgaaactacaacagaatgaatcggtcaaaatgttcagaccgtcaaaaatacatcagtacatgcttgaagagaattgaattttctgttcacacataaaactcacacaaagtacaaatatctcttgaaaccaaaatattttccttcccttcctcgattgtacaactcgggcaaattcataagatcatcatcgttcaggtcacgatcgaacagtcctctgtgagaatgaagttcatcagtcagaattgtactgttatagcgctagagacttgagaacaatcatcatagggttatacttacatggcaatgaccggctgcgaaatgagaaaaagtttggccatcgagatcagcagaaggctagctaggatgtaagatgactacttacgaatagcgtccaagccacattccacaataataagtatacataatcgtatgcactgtagaaggataattagccccaagtctctgtaaatatacgttgcgaatgaaaaacacctactatgttgtactgaagaaaacagttatcacgggagtttgtatggccacaaggtatcagttgcatgacctgaatggaggcaaacatatcctgaaacttacctccagccgcagtaaatttgaaagaagaacaagactgctactccgacgatgtttttgtagaagctggacagttaagacaaatccaatgccggtaagcgcccgtatgttgaagttcgtgcggtattcgatcaactcacaagttgagaatcatattggcattccgaatgtaagaccaatggccatggacgaacaaaagtcgactgagatatcggaactaaacagaggttcagagaagagccgaggtggtttaaaagactatgagttataacaccgaacaatatttcgcttcagaaaaacaaaacattagcttgaaggaactcacttgagctatcgcatagtccgaagcttcacgataggaaacatagttgaattaagccaatcaagaagcgcaagaaagatagcagtgaaccctcacagtttacagcctgcagtccttcttcaccagaaatacctacaccaatatcagctgcttggatcatggatacatctgtttttcaaagcaaaaacaggaaggggtttagacgaggatgacatagtgattctaagtaacgtgagaagacaaagacaaagaccaaccgttggctccatctccgatagctaacgtcatagctccgatgttatccttaatcagtcgaacaatctgagctttttgaaggggggatactcgacaacaaatgactgtatcacatcttgttgagagttctaataacagatcctgcgtccactcctccaagaacgtctacagaatgagaaagatggatggagaatatacgttgattaactatcaatcaatcgaattaggttgaaaaagactgtatttgaccacagaccgcgtttactcacgtgagtcaatgcagaaccttcaatgaccaaagaataccctcctacacttgtgctttccttcttgggttgaaacgatgatgttggtggtacagacctaggcaacacacccgggggatgagatcctgctttggagacaatatcttgtccaaagaactgctcgatggctgacttgatctgttcataagccgagtttggagtaccatatgcgcctcctcggatgacaattaagtttgtgtccttctcgagaagcgatgcagaatatccgatcgatatggctgtctcaagcttgtctccggtggccacccagactttaatcccagctcgcttgagatctgcaatagcttctggaaccccatcttgaagtttatcctcaatagcagacgcgccaaggagggtgagagaatgttcaatgcgggcggctacctcagctaccttgccctctctatcatccagagatgttgaagcctcgttgtagtccttggaccattcagcaaactctacttcagagatagcccggtagccgagacacagcgttcgaagtccttcactagcgaaatattcaaggtcctgactcgtcttgtccttaaggcgatcgtttccaggggccaaccgatcgaaaatcacattgtctgctcctttaatcaggaggaagagcttcccactgtcgtccaactttcggagaatgaccgacattcgttttcgagcggacgtgaactcgagcacgttgagaagctcgaattcatcaacttgatccgaatgaggactcgtcatctttataatgttacgatctttacctctgaagacaaacccgacatcagcagcagcttgaacactgattcattgatcgaaaacgggagtagagacatattgaaagatgtgatcaataactggccagaagctgggaacacatttagctattgttgatgatacgttggcgtcacttacagagcagcttcgtccggagattgagccatatactccatggtaccatcttcggcttcggaagccaaagcagtgtggcaaagtgccagatttttgaaaaaggagctgattcgatggaactggtcggactggtcatcttccaagatctggtcaatagcatccgcatgaaatcgggggatcgactccttcttcggcttcgatggctcctcctggtcctctggttgaccagcagtcgagtcgagattggttgttgagtcgtgaaaaggcttggaacccggtccttcggtgacctctgagttgagagctccaaccacttgcttgccatctccagtgtagacctgttgaagtagactcaagaacagtttcagacatcaatagttcccttgtgccctgtaagcgcttgacctgagcgagttgaggaaaagagagataagacatacaacacctccaatggagcactgctggaagaccatcagattctgagtcagtgttcctgtcttgtccgaaaatacatactcaatttgacccaaacttattaggcaaaagcgacggaatcagacaggtcatgtgaatccatggtgtcagcagaggacatcagtttccagaagcttaaaaaacataaaaacgaactcgtcagacaggttccaactccgagctgttgtcctacggccggttttctgatatttgatatcgtcgtcatagtagattaaagccgcttgagccgttcgaacaaactcgatggagatgtacaatgaaatagggatgatattttgaaatgtgatcagcgaattcaaaaacgtgaatactccattgatctatatcggattgtcgtgagggtagggatatgggagcaatatgaagtcaccaatcagcatggcatacatggcggacaaaccgttcagagaagaggagatgaatgtaaaaggatgacgcacgactggattatcatcggattggtcatcgtacagtgtccaatatgcgttaagcgaaaaatacttcttttcatgaaaatggtcaatgactccgcaaatgataccagctattccgagaagacagatcgagaatagactgtaaggtggaaaacgaagggtgaacgagactcagcgtctcgaccaaaatcaaggttggaagaggttgaccaaggaaactgtataagtacgacgtacacctgaggattcatctgacgctctacccgactacgtttactaggtgtctcgcccgagttcagaataatcttactgcaggtacgaaatggaaagagaacaagatgtcggttgctgatggcttatatcatgtcgttgatgcatcaacgaggttaaagagaacaaacctatctgaaccggtatacatcacaacaccaatgacccaagcggtgttcctaagcacacatcctctcaacaatgtcatatccgcatcgatcggatacttttcacctgtcggaagaattactgctgcattgagtttgtagagatcaacgtccggaatatcacactctagttcaaattcggctttcgagcacgcttgagctgagcggacatggtccaatccaccgacagcgtgacgagattttaaattggtttctccgtcgagaccctctagtgtagttattagtcaagaagaaaaacaaaactatcagcctgacgacatagcacgatgacttggtaagtcagggtaagaaacaaagacaggggtcatgaaaaatggcatgagtggacgaaactagtctcgacataggccacgtcttcttcttccgaagtcgcgcatatcacaatgtctagaagttatatatgaaagttcgacgaaagacagcaataggtgagtggacttctcgtccggatgcagaatacaacacgaaataaactcaaacgggaaggacgcaccggccgggaagctttcgtcgttgtatatctacagaatgacaacaggacaaagcgcgcaaacggtcagcacgactattgtcggacatacatctgccctctcagcgaggagcttcaccttgacaaaatctccgacccgaacatcctcccagaatgttcgcttccatcccaccctaggtttatcggcatcatcctcatcattctcgacagtctctatgtcgttttctgcatcaaccacggctctccattggccatccacctcttgtgcgcgtctacttctttctgcttgttcgtcgctcggcaaatcatctaacaccgtcatttcccatgcttctctctcttgagccttacgtgctctgtgtcgcttgcttttcggaagtttgattcccctaacaaacgtctttgtctttttcttcatcgggttcgtgttcaacacgtcgggtccggtaagcacatggacgaccgaatgattgatggccttatcggactggtgtcgcttgacatcttcataaccatctttgacggcggtgatgatggtgaccgctaagctgttaatttggagtgaaagaaagaaggcgtgccagaggacatgatgagagctcgcgttggaagaaaaatatccaaacagaggggtgatggataacaacatacagaggtaggatgactaaacccggactgacggtcgcaaactttggaaagaattgaaggatagcaatccctgaataaaccgagaaagtcaagtcagaaactagacgtgaccatcctcatggagaaagagggcgatgcaagaagtaaatatatccacctaggaagaatctatgttgaccagatcaaacgtagaaacgatgttagttctgcgctgtatgaaagagacatgagggaagagttgttacgtacatattggcaacacgcctgaattgctcgataagattcctcggaagaaagctgacgacggtgtactttgaagttatgctctgactgctcggataacggctccctttgggaaccttgcctttgggacctagctctgatgccggatacggcttattgatataaattctcctttgttttggagccggtggctctcgggcaaaaagagtttgtggattgagtttgtcgaggactttttggaacgtcgacttgtttgccgagctctttcttgaacgaaccatggagttgcgcgatcgtcccgagatccgatattgtgggaaaagggaagggtaagggggcttaagagaaagcacaggttgtgccctctgagacgactatactgtgaatcaactggaaaaaagggaaagacaatatagatgtggaagactcaaggatgacctcgaagagaaaccggctctagttgagaaacaagaacgagaagagcgtgttgatggtggggaaaactggtcgatggattgaactgatctgactggtgttggcctggaaaataatcaaaagaggaaaaggggcggtgtggcccggccgggcgaagagaaagactctggcttacgttatcactccagcccgatagccgtaaaagcagacgcgtcgtgcgcgttgaggcacattaatgtggcggctataacacgtgatgtatgtataaccgggctagccttccggaccattcatcgtcacacttagtcatcccaacaaggtttcgtaatccttcccgctggtcgttcgataaatcgtctcctgtgatgcttacgttcgtgggacgagtgagcagaaaattcagcttggaagatcctttagagtcgagtgaacgggatgatgatgctatgaataatccagaaacgaacaatccttgttctgcatgtctgacttcgtcactctcaatctttcaccaatctcatcttctgtcgaccatccatccgagaggtaactcgcattttgatctcacttcgtctgagttgggctgcatatcttaaatcgttcgagccaagtcccaatagtaaccagcctcttcctatctggatatgcgtcctgaacgccaccattcctctgcgggtcatacatcaagacgagagcaaagagcacgtagaagttctggtcaaccagacccgacaccttttgcattctcagttcgaccattcatcaaatctggcctatcgctcgtctcgcttttgctcgtcgcttcgtcagctcctctactaaggcaactatatcttctcaacgttatggtctcgaccacaaatacaaaaggactgtcttctggaccaagcattcgaggtggtataggtatctggggagcttgtctggagcaagccaatctcacaaggtcgtctcagctcaggttcgcgcataaatccttgtctcacaacctcgccgtctccgtatactaaccttctgtcatcgctgtcgctactttctcgtctgtcttctggctcttctgttacgcgtaatttttgtcagattatgcacctttgcgtctcctctgagcgttccgaagttggtattactaccaggcccactaccgacacttccgtcctaccttcctccgtacttctcacctgtcctgtccttctttctcgtccttgcccttgcttgcgcgctcattcagcacgcattgcgttcgtatatcctatggggtgagatagctgaatacggccgtatctcgactggcggcaagaaggacgacttatcagatggatccccgagctatcaacctgacgcccacgacggacctaacagatttggtgggagtaggtggaagaatatgtgggagaccgtcagtagagaaattgctgtcgtcaccgcacagagctgtatcatagtcgcaagtctctttcaagtttacatgttcttgcttgacttcctgagtttctcgtgtgcgcatacatgtctgattcgactggacctcatctcgatgtgcttcaatagatagggattcttctcttccccttgttaccgtcaatatacatcctcactagcgccataagctcgatcgagggagatatagtcacctcaatgctttttgttccagggtatgccagtctcttccgagatcagcctatctgaactttctacgtcgtcatcgtactgacaattctttcgacatgtatcccttgacccagctggggaacagctctcttggttctgtctgtgatatgcacactgaaccttcgttcctctacatcccgctctcattctcgctcccggtttggtcgatcaacaagtggtcattgccgccgatcaagcatgcttccctttaccgagattaaggcactgcagccccataacggacacgaccaagatgttcaatcaaacagtcagaccaatgcagatcgcgaggttgacaatctgtgagcacttctcaaacgaaaaggggactttgatagagtcgactgattgagagcgtaaacatcgcttaccctgcttttttgttccctctgacgtctcgtgcgtcaaaaagcgatcctcccttgtaccgatccatccaccctttgcctcttccaactccttcttctcgccggaaagattctccttcccagggaacaacgaggcttcattcattgtcttcagaccaaaatcgaactcagatgaatgaacagaaagagcagtctcagcctaaagcgttctgggttcctgtatcggcgtttgcagagatgtcggaaggcgaggccgatgcatccgaaacgatcaacaatgaagggatgcaagttgttcaagtcgaaatctgggcttgacagaggttgattcattcattctcgactccctgccctgtcccgggctgaagcttctaagtcaaagttcagcatctttacatttatccccttgtactacctctatctctacttctacccaatcatgctttatttttcttacatcgtttcctagaagtaaatacatcgtgctctcacaatacattcctatacggtttgttcttctctctttcacgactcactttcaagcgtaattcgtttgaatctttcttgttgccagctttgtcatctaattcaataacaacctcttttcggagctgcaattacatctatccgttctgtccatgatgaatgtatctatattcatgattttccacgttaagatggcggtcccagactcggttgcctcattccatatgatagttagcaagatatcttggtctatcggtcggtttctttcctcgtttttcttccttgtcggtcacagacacccttgcactcgtgcatataaatttagttgacaggggtgataggctgtccagttcggaggaacgattccaaatttcggagaatttcaagatgttgatctgtacagtcgtgatagagtataccaagagacgaaatgtaagaaaaggagacagggtaaatgaaaaagacagccatattccggtcagcttctaagtattgggataaaacaagaacagaccttttataattccaccgtcgacgacggcactgtgcggagagagaatctatcaggccgcaagaaagaggaagaacggctgaattatccaattgactctgatcctgaggattccgattgtgatgaggagtgacgaacagttttaggtgaggatttgagaccgggatggaccgatggctcaaattcaaacacgtccagcgcagcgcgaagaactatgatttcctcgaacgatcaaatacgtttcgtcaggccttctttttcttcattctatccaaaagatatattcaaggaacaaatctagaatttacttgccttttccactatctaatgctcgaaccaacgcatcttcgtgaataaccggtccacgagcagtgttgacgatgataacgtcgttcttcatcttagcaaactctgatcgtcatcaaacgagcagcgtagaaacatcagcagggtcaattttagattgcttagagagcatagatgataaagagacgtaccccgatcactgagcacatgtcgagtttcttcggtgagtggacagcatagagagatcacatctgcctgagcgaggagttcctcgaaagagacaaacgttgctccttgctcctctgcatgttgcgcgcacagaagatttgtaggtcggcatggagtgatgttcattgatagataatgaacaagaatactgacggccaactggatgaagacgaacctgatgtcggcaatcggctccgtttggtatagatcactttcaatccaaaattctgcatatgtcgagcgactatggaaggtggaatcaggagatcagggcactgtctcttgttggaacatgatcaaagataccatatattttacttgccttgttttccgatatttcccatcccaatgattcctaggacggtccccctcgtctccttggatacgatattgaacctatcggaccaccggccggcccggacggccgcatcggactgcatcattcccttgagagccatgaggatcagcatggcggtatggtcggccgtgcgatatccaacagagtctgggttattggcatattgtaatttgtgggctgtgagatatttgatatcaatatggtcatacccagcacctccctgaaacatgatcatagtggaggatatcagatgaaaagtcgatgataaacagtgaagaagactactgcaagagatatgtcattttgaaagaggaaacataccatagtgataaatttacagccggactccgctaatggttgcaggagctcctcgtccattggcaaaggacctggttggtcccactgatagaaccaaacccaagctgaaggtgagtagggtggtttggttaatacatagtcgtcctgataagcagtcgaaaaggattagaccgaccgacgaaggggcccgcgtcttcaacagcagatcgaatgagagagatttgttccttccgagcgacttgaggaattgtctatggattgagcgtatgagatgaaacccttttttcttgatacttatcggtcgtagccgagagagcaagacattaaacgaaccgtaatcgtggccaatgagtgaacgtgtttgacgtatgcatcgtcttcacacctaggctcattcaggaacagtactttcggtagagacttagtgaccatgatgagacagcggtacaaggaggtgttctatgatggttcgaggaatgaaacagtgctttatcagaatggcttcctatcatactgcgatacgcaatcccggagggtgctgatagagatcattcaaaaacaatgtgactccgaagcaaagtcacatatttggcttactaatccaaaaccgccagccaatatgagaaatctggtaaacagctcatccgagctgagaaagcctgcctgatgaaaggggtgacacgcggtcagggccctcttggtcacatcccggcgcggcggatcggcgaatcggcgaggtggcatgctgtgctgacatttaacattctgcacatcgtcttcattcgctgatcggctgatccttgtcggtcttcaatgtctcatcaggcacaagcatgaggaaatcgaggacttgacagtggatcggttcttatcatccgcagcgaatcgcttcaacgtggcagccctgccaccgcgtgccctctccttgatctccctgtgcctccctttatccattttcttccggtctccaatcatgtcgtttctttctccacccgctcttcttcttcctccagttctcttgtgttcacccagcgacccctgtcgacctcttctccttcaaaacaccaccctcacattcatacgtcgacgcatacttacacacacatatatacacatatgtcgtggccaaatcctcagtggacgtctttcacttccgtcccacctccctcaggctcgtccgcggtcggaacaaggaaacgggtcggcgtcgcatgtactctttgccgttctcggtcagtctctttgttctcgttctatctgtctctctggattgcatcaggcggtcgtcatcttcttgttcattgagatgaaatctgacatcgatggttctctcttcgtgttgttcatccatatttgggactcgggcctggcttggaatgtgtacgttgttacactttataaaaagttagaaaggttaaatgttctgggaagacaccctgtacgagatgtgcctcccttgggacaacatgcagtgcgttctttcaattcgtctatccttcattttcgatcgaccttttcatggcaagatctattaggtcctggctgtttcttctatcaaggaaaaacttgcacattgcgactgaccaccgaacgcgaacgaaacatcacctctttagcttttgaagaagtcccggaagatctcaaacaggccgcctttgctcgaaaggagcgtcggaaggctgtgattcaggcagaaaaggcagcggctgctcttgtgcgcactcaaggcacagcccggcagagtgtaaatgggagcgacaatgtacgtacctctaactatatacgttgtttcctgatcgtatgtatcatgtctaacagctatatcctatcgttcatgactcgaaaaagaagacgcttgcacagcctaaaaatcgatcctcatctccggtagctggctcgtctcctcctcaacgtttttataatcttagaactcggcgaaacgctttgatctcgtcagcctgccttggtctctcgccttctccctcatcctctgcacctctatcttcctcctccgctgctttgaacctcagcgatcctcctcgaactgacgtggtttgtccaccagcccgccctctatcgactccactctcatatcttcccgtcatcgcaaatcaaaacgcttcacctagtattgttccgacggagccgctcaaggtctctgatcaaacactacttcgtccgattctatcttcaaatcaaccttatctttcctcgtatcatccacaactcaatcatggctacggttatctgactccacccatcatgcctcttggtcaaccttcgaacgaagcatactttgaacgtgacccttcgtcttcatcgaccgtgccttcattgtcgcccgagcctgatgttcgaaccaatccaaccaagtttgctcttatgaaaaacgaggcatatgctgggacgcctcttacccccttggaccaacggcctgaagaaatcaattcaatgagtggacgaaagagagctctcgagtccaacggatgggccgcagatcagccattattgaagatgagacgtcaggcagtctgtttagggccagcaacagaggtagatcagatcaagaacgatccagaacacttcggcactggctccattgtgttggaacagagcgaagaatggctcagaggggacattccaaaatacagtgtatcaacggaatatgaggaatcatgccagacatctaattcaccctgggtaccaccttacgtctcatctatatctggggcttgatgtctcttttctgctttctttctttctttcttatcgagtctcagtcgtttcctgctttgtttcggattttcgattcttatttcttgtagcattctttctcttgtcatctcatattatctttcttttccgaacagtcacgtcttttcctcgatcatcatcatatctatcgtatctaatctgtttgagctagttgcctcttcgtcttcgccgttgttttggggtcgtatcttgctgctacttattcttctgctgttatgtttctctgtctttgatttcaacgatttctcctgttctgtgtatatggatatacccctgttcttttcttcgctttctggattgggcaaagaatttccggttgggatcaaattgatcggaggcattgtcgcgtgtggcgttcaacaaataacttgtaatgatgaaattaacgtattagtacggtttgtaatgaatatctgtcgcctttgctctctcttacattcaccatctcgacctgtcgtcctcggggaaatccaccagtagacgagtggatgtcctttgaggtactatccttccagcatgtctctgtctagccagttcaacccggtcgctccttctcttccgcggcaagctagcatggctcactcgttcgtatcctctcaatccacatcgacatcccagcttccggtaaacatcccggtagtaccctcaccacattcgacagcccaatcccagtcagaagcgacatataacctgtatccaccatcttggagaccaccgctacaccagacggccgaccttggctacccagatttctttccttctagacccggtcaaggtcaggatgaggactgtctatccgaagcgttcgtcaagcagggttatgtttcacgatggggaatttccaactctgttcgtgtctctatttctgctttcgttgcctggttccgtgatgcgtcgcgcattgaggtattcctgttgacggagaacaaggttttgtattaaaacagtccgagtcgttttcggtgcatggattggtcctcaaaggccttgtctccaccaatgcgattcaaaatatgaatgagaccatgtccaagattgtagctttacgtgaggctgcgtcttctcaagtaccgtatgtccctacccacccaacatccgcgttctctgtgttcttctccaagccatcaagttgaccggttcttactcgtgctgctctctctctcctcttgcttccagaccttcgacgtacaaacccccgactcgtctgatcttacacgaatccaaacgtcaaacatttttcagtgacttgaccaatccagccgtaccactatcccggttagccagaagcgtgccacatgggatcaaaggattggatatgcttgaaatgttcgctacgaatgaggttcctgtagaaagagcggtatggcttctcaagacgctgggtgcttgtgaaatggtacgctcggtgaacttacgcgtctctctacaagttcttgtctgactccattgttccgggtgttatgcatatagaccagtcgaacaaagaacgcgcctctagcatcatcttcattatcgataccaaatcctcctgcaccaaacccaaaccactcggtctcgattgaatacaccacctccttaacgacgttgctgaaacgccaactgtccgaactcaccgtgcccacgacgctccctctacagctccgaggttcttcatccgccaatccttctcaagcaaacggacctaaatctccgagcacgcctacggcttcgacacctggtagttcgagttcggcacctgctccgagcacggtatcgtcttctaataaacaacagttcaagtccttgctcgctcacccaggatcccttaagaaatgggtcaaacgatggacataccttcttgccttactccgactatcctactcacctcctcactcgttgatcgataaacgtgcgtttcttagttggcttgtcaaccagttagcacccggcgcggcaaaccgggtccaaatcggctttgtcctcgccgttgtcgaagaatggaccgaggagatcagagagagtggcgtgctgggaaggatacttgtcgagaactgcttggctgtatggaaagaattagaaagtggtgaaggcgctcttgagggaagacgaaggatagcaaagatcatccagaccatctttcttctttcgccacaccttttcatctttcctaggttgtatcttatccattcaccggtcctcgaagtgatcctttccgctccgtcctctggagagattaccttaccaccagggcagatcatcaaagataacttcaaagtgaaggaggtaatcaaaatgatggatgacgcttgggcggaggtgcggaagcggaatgaggcgttactgtttcgcgattgggacgttacgggaggaagcaactcccagaccacaggcaggcaaactttctcggggaagggaaagagtgtcgctgatggctggagcgaacgaagaaagggcctggctgcaattcatgtttgtctctgttcccttcctgttttcttatctaaatttattatctcctatcgtccttgggacaacgaaattcacgacttgttcattgttcgttgcttcagattcttgattctatctcacaccaaaccgacatggtctcgaccgcacgctcgttttttgagctaaactccgaaacacccgatcttctccctcaaaaacttaatatccttctctcatggtcttccactcatatcataccaccttcatctgcttcagctctccgatcgttcactgtggcaaccctactcaatcagtatattctcttcagcaactcgcccgttcaaagacgcgctcgaatccagtcagtagaacgggaagtgtggaagtggttagaggagagcaaggtggccaagaaggaagagaatactgaaggtgtggctgaggtcattggcgagcttgtccggaagggtgtaataagattcgagagagggctaatggggttgatggtacgcggggagagtgtgatcgcacgagttgtccagccagaaggcgaagcgaacacgggtgaacatgaaagcggtaacgaagctcaacaaagtcatctagttcgacttctccgatctgttccgctctatgcgtcgatcccgtcgcttctaaatcaacgacattccgttctttacggcgctctcctcccagcttatgcatacgtctatgttggccctgaaccctctgtcgatacaacctctgaccccggagcatacgaactttttactcttcagaaggcgtataaagaaattgaagaaggtctcggacatatttggtctcacgaccaacagatagaggcctgcgaggatgtgaaccggttgccgttgcgtcagagaattccgacggtgttgaaagcgtcaaggttcattcagactagggtagttcaagattacctgaatcgttacatgtttgatggacggtgagacttattccttttttaggcgtccacccatatctaagtgtatcttgttgaatttgttcaggagctaaatttgtttaacttatgtttcatcaaattatcagtcatggtcgattctcggccatagaatccccgaaagccttagcggaggttcttgaacttctcgaagtctcgcgaaattttgttataatgctcaaggtaggaggtgtcatcttgtagagtcattttgtatttgtgccgactaacatttgtttaaaattgttgttcgatcacgtgtaggttctactccgccttttggagttcactaaatgtctaaacctcttgtctcccttgacagatggtttcaaacgatttggagacatctggcagtctatgggagctacacacagtattgttgaagctctactagagaagcataccgttttgaaggctggggtcggccaacagcgatgtgtattagagatgctcgttagtttcgctaagaagggattgatggaagacaacatgaaggaaatagtgtgggctgattttgctgtattcgagaaggtacgttggaaagataacgccctctacttgatacctcgatggattggttttgatctattgtcaaaccttcctatttgttttctctaaatggttcagtctcttaatccgatgaacgcgcacgcaacacctccggcacccaacatggtggaggttcaaatgctttgccataaaaccgatcctcaaacaagcgcagctctagccaccactctctggtatcgacatcagtccttcgatgactggccgtattttgtctgggataacgttgtccttgcactggcgcaactggccagtgcggtcttagacccgtatgagagaaatattgtggttgatagatacgtcaagtttttagagaatattcacgaccatctatcgtcaggcctcaacaggcacgtttcacggtggtttgcggataaggttgcgatgggggagtcatcttggttttccgtgggtgagctcacagagccaatcaccttgctcatactaaaacttgtttcactaggctgtctggagtctgtgagtgtcctggtagagttggttctacctgtttggaggcgttcagcactggattccatctctcgaggatctatctcaacaaccaatccgctctcccccctacctgctctaaacgctgccaatatcattgccactcagcttcttctagtagatactcctcctttccctactccttccttcctggcgttgcctccggttacgcttgaggaagtgcatcggtttcagacaagcagggagccttgtttccacgacggaaccttcacaaaacttgtgacccatctgtctttcctcgtcgcattagaggttatcataccaatcgatgatccaatcagtagttcaatctcggtccttcgggaacgaattagtaaacacccaagtctcaagtttgcgtcctttaaacattccaacatcattaaggaagcattcctcaaaccagtctggagacagaacacgaagggaggggagtccgaaagaccgggtctcgatgagagattaatagatgccttgaagatcatagtgaccgacggatcgcgaagtacgtatatcttctcgatttgcgaggaataactgtagatatcttgacactatgtggttatctgactttaatctccacacatatcgatcagttgatccaactcaatcacctgcagcctatgattggcgtaaggttgttactcgcctcaatccctggagatggagtcgttctgttttagaacttcagctttcactgaaacaacttgctattcgcttggcgtcacccaaatcttcttccgatgccagcgctaggttgaatagcctaacccggaccgtttttgagcgtcatttatcgtctgacgagacagatttgttgagcgaagctctgaaaggtctcgacgccggtcctgtggaaaaggtatgtggtatttcctcttctatatataattatctcttgaaggtctcaactctatttctttatgatttagtttgctactgcaggaatcaatcgcttagcggatttactcgtcaactttgatatctcatcccctgtcgtgacttctcgagtggatgtctttaccgaaagcgttggaaacgttattcaagtggtcgcgtgtgctcttgcacaagcttcgactactcctaccgatcgacagcctctcttcgttgatacccccttacaagaccgctattttgacgctattctctcaatgctcaataaattggaagcccatctctctattagatactcagcggtggcgttagaacaacctcccaacgcattgtctatcgcagaacttcgatcattactggttctttcgctccggctcttacatatcgatctaggtctatcacgttacaacatctcccagatttggacaaccaagacgaaaggttcagttgcatccttcattggagtgctttttcgtttgatagtggtatgtattcaattgctttatctcataacgctacactccgctaccctatacttaagactttttatgtttgtctatggctatcctagatgcacgcgggcactgcggttctggatcagagtctgttctgtttactactagataccatgtggtactatactgacggtatgttctacagtcttctcagaactgttatttacgatctactcatcttggtcgtctcatcctttctgccacagaaatccccaaagaagcgcgagtgggtggaatgaatgcacttcggcaacttcaggctgaagaatatgatcctttgggtctcattcctgatgagcttcgccttcaaatacggcaattccttcccttcattgcctctgaacctcttatcgaaaaccttggagtgttatcaataaagcctgacgcatcaccatctctaaatgtcgcccctgctcaagcccgtccttgggaatggttggagtgtgtagagtctacatcatcccaagtgatcgctaaccttcctcctccgatgaaaaactgtaccgcccttccattgttcctctttcagcctgaggcaactatggagccttcactcgtccttccattgacttctcaaccctcaagcgccaatcaagacaagatttcgttgaagtcagaggtatctttcagccaaattttgagcgaaaggtcgtataccgatggttcggaaggattacctcttttcgccagagaatggctctctagctcgtgtcgccaagcaggagatgatatcgagcctcttaccaacgcacagagccaaccggccggccccgaatcacaatctgccgcttcttcacgcgttggtacagcccctagtcctaatcattctttctcagttgaggccagcaaacccgctaaaaacaagattgtggctaagaagaggaaggcgtcgacgtcttcaacaaattcaaaatcaaagccggtcatcctttttgacgacgaggacgactatgctgcaaaatccctgccgcatgcttcgaagaaggcaaaagggaatgcaggagtgacgaagaaggacagcgcgaccaaaatgaaaaagaagtgaacgcatggaagggctttcgatttaaaggggtatgatgtctctgggtatatgcttcagtgacgttagtttttgagtcaaacgttgcagccatttacggtggtgtttaaaaaatctgattgggtgatcatcatcaggtatgggttgtacaaattatgaatgagaatgcagttattgacggtttgagtggacgcaagagcggtattggaggatgagaagacgcgcgtaaacaactgcaagggagcaaacagaaagataatcgacaaaaagagcagaacaacaaacaacaagaaaacgtaaccttctattgtgcttgatggatgaaacagaacgatgcgcggcttttgtggcatgataaggaatgcgtacaagagaaagggtatatcacaagaaagagctgtcgaacacgtttatagatgacatgcgagcctgagctagagctagactggcatgatttatgctgtagcctcaacggatagacggctgaaccgtcctcagtcctgccacgccggtagattccgccttgagatcttcccttgaatgacgttgttcttgctgagaatctcccacattgctcgctgttgtcttgatggtggtgagcaaaactcgaacgtatcgcagctttttgatcacactatccaccgtcttcttgtcgtctccaacaagatccggtcgaagcaatttttcgatagaccaggtctggagtttataatctttgttgatgtacgtcacaacaagacctttgtaggagagcacaagcttggtatgatcgtagaagttgaactaagataaccaagtggatcccaagaaaggtaaagaagacagagtaagacaatgttcgagaaaggtcgagtgacctataggagtaaaacaaaagaacagtacctgcaagacgtcgtgactaagtttaaaaactatgacatgcttcattctcagatatctttgtacaaagtccattcctttgactttggcctcgtcaaggaaacagtacggtttctcgttgtacaatctctcttgcatgaatccctggaaatgcttaagaaggtatatcttggttgtcagttcctccgggaacgtggtaagcgtataatttcttcggacgaggatagacgatcgctgctgttgtttattgtgcgaggagatatagtcgaaatgtctacacgcggcgaaaccaagcaaacgaaagtatgatcaataactgagaaactaagaaagcactgtagtaaacatgatgattggttgagaacatactccttatctggggcaagaaccaaagaagtactatcattaaaatgcactccgacagaaccgtcggtcaaagcataacccattccatatttattgcagtagtccaaccaggagacgataaagacctttggatcagatggcatggctgggatatctacacagttcgttcaaaggattacgcaatcagattatgtgtgtcgcatagacaaactatcagaacagaaattggagggaaggataacgaacgaggcgtgtggaatggtcgacctgcatctctcgcctccagtgcatccgccagattttgagaaaccacatcaaacattccacctgatttctttgtgctcgccgtcgagcttggctcgaggtggccagttgggggcaatgccttttcggaaaagacttccgattgtgctctggttgaagaaccactggatcgccgataatcaggattcgctgcaactgctgctgctgctgttgctgctgtggaaggtcttgaaggagggtatccggtagatgctgacttggttgagatattgacgatctgaggagtaggcgcagatggctggttctctctggtagaagaggacgaaactcggtgggatgtaggggaagttgctttcgagatggagggaagaccagagtgcgcggatgggcgaccagcagcgctagtaagtttcgacaaaaggctaggttctttatgtgaccgaggttcgttagacaccaaaagtggttggcaagcagatctgtagcaaacaatgtagtcgaattagtaacatcatcgtgatttctgaatcaagattttacctaggcgaagaaaaaacgcacgagagaagatgggagagtggactgtctggttgaacagctcgttgaaactccctctcttgttgagcgacgcttggcccaagcgtagccattgtcctagatggcacacccaatggtttgatctgcatcgctcgattttttaccttggtaaagttgtacgctgactgctgaggtgtcaggtgtgtgaagttcggaggcgcgtcgtgcgaagaggcgggaagtgaactagggaacgcgccggaggtgaaaaaagagtgattaaggacttcggataaggttggtcgtttacctagcgcgcaacgatacaggatacgaaacatgtgatgagaaagggttaagttctatatatttttctagaatattgagaccgtttcctttggttagcaaagccaacgtacggggatcaatcgttaaaatgtttcgaatgagatcttgcgcattttccgagattggcttatcaggaggaaagtcgtattgattatctcgaattcgtctaatcgattcaagaaaagcaaggcccagttggctctcaaacagcgtttccaacagtctcgtagagaagaaactcttacttatatatagccttgatctcttttgtttggaaaggaggttttcctattatcaacgtgtatctattgagtcaaaaaggaagatgagcactaaatcatacttcttaatatgagagttggcgagaagatgagcttacaagattaccccgatggaccagatgtcgacttcaaagctgtgaccgttggcagtatcgaacagtacttcgggagcgatatagttgggtgttccgcagattgttctgttcaagaacaggagaatttacagttcaattttatgacggcgaacaatttggaccaggttcctattcatatgtatcaacaaacaaggggtaaattatatcgtgtcaagaaatgagtgcttactttttcctttcaccttctttttcaatcagcgctgccaagccaaaatctcctactttgacatccattctagcgtctagaaagatattgcctagtttaagatcacgatgaataatgttttgactatgcatgtatgaacaagcgccgacaagctggaccaggtagtttcgaacttcaggttccgttagaccttttcgagctcgaaggaggtccatcatgctctaaaagagagaacttacaagctatccatcagtttacttgttcgctgtctggcttaacagagtactagaagaaagaagaggcaagatctacgtacacctctctcgcatagctccagggacatatacacgttatcttggtcgtcaaaacactctttgaaggaaacgatgttgggatgatccaacatcttatgtatcttgatctcggcataaagctgaatggaatagacgtatttgagggaaggcagtcaggatgtccgtcttccttgaaattagtcaagatcgaacaaacgaagacattacctttgtctttgtctttgttgtctgaagagatttcttggagaccaccttgaaggctagatggtttccttccccagtccggacttcatatactctggcaaagccgccctgtcaatgaaaatcgcacaagtagtaacgtcgagataaaaacccgaatacaaccggcagttgcgaacccaagaaggaattaagccccagagagtagagatcacaagatagatatcagctttgaattcggacttcaggtttaaacagggttcgatagtacgttatgaatgatcaaaaagaaaggagcggatagacataacgaacctctcctaggagacctatccgctggaattctatcttgcggacatgatctcggatgataggtggtggtgtgctcggtattcgatccttcttgtccttcttgggaggagcaggagcccgagcgaccggggcagcggtaggaataggttgaggaggatccgaaggcatgctctttatttgagcaagtggattgtctctaagtaagagttgagagtggctgtgggaacaatacaccagagggaactggtatggccaggaagactgtgtgagtgatggctgttgtaggcagtcaaaggacaggggaatcggagaactcggataaatatcaagttgatttctttttcctttctttcgacgcgtcggatgtaggaagacgcgtcgctcttacgcgtgcgtgttcagtcgcgtggcagatgtaacgaacgagtcttgaagaagacgattagaccggagattagaaatgaagaaaaatctgaggatgatacctcttggtcgtacaacttctagctctaatcatagcttgcgttcaactgtacggtgaaagtcatcatatgtcaagaaggcgctgggtgggtagatggtagcctatcatcgtgcagtgtagctgaggaaccacatgtataaagaaaataaccctaacatcaatcaggccgttctcgtccaagtggcttgaaccaaccctgatgaagacacaaatcgcgaggcccaagcgcatacagtcgggtttctctttctgagccaaacgactttgatctttctctcttccccaaatgtcttcttacggtcgaaagggttgcttcaaggtatgttctttcattggaataaacctgaaccgcgttcaagagcttaatcaattgatcaaggattttttttccaattttctttccttcttacttcctacttctttcctacccatctcagtgcggaaacatcggtcacgtcgcggccaactgtgagtcggtcactcggttgtgctacaactgccgatcgccagaggtgggtttgattaaattgctgatcgaatgactgaaataagatcaaaccatatggataagtttgagggatcatttaccggggctaacacttgattgatgttggcatggtggtcgcgccgcgttttcgcggaaaatgtattgtatcagcacgagtccaacgagtgcccttccccgtgagttgccaactgagctcttcggtttgtctactcaatacttgagggatctctactaaaaccactgttgccttttctcttttcgcaacttggcgatcgctcgaatcgatgcagtcgaactaccgaggctaagcaggtaagtcactcgatctcggacttgcatgaacatcttagcttgacaatgtttctgatctgttttcattcattctctctatgctctagtgctacgtcagtaaaatctttctcaccctgtcgaatgtgcccggttgacagtgtaactgaaatatcatctctcacgaccctaacgtagcactgtggtggagttggacacattgtgtctgcctgcccatcccagccggctcgaggacctggaggacccggaggattccggggaggcttccagggaggttcccgaggaggcttcgctggtggtgctcctggtagcttccagggcggctttcgacgacctgtgaacccggctgggtttggtcagaagtgctagtgtgtccgtttgccatatgacttatacagaaattcggaagagctgattcattgtttttatcttattatttttttgaactcagccgatgccagggtaagtctatgagtggtttctcttcagatccgtttgaaaaatacaatgtctctctttcgagtttcttataatcaactggaacgttctcgatcatataggaactggccacttgcaaatcaactgccctacccctgccacctcgtttgcccgaggccctaagacctgctacaagtgtagcactgttggccacgtaagttctatacttgattcgcactggaatatatgctttgagaggagatagagtaagtgttgactaatctgttgttcaaccttctcctatctctgatacagatcgcaaaggactgcccttccgctgaatctgcccctgccgctgctaacacctctgatgccgtccacgtcagccaggacaccatcgtccctgctgccgccgaaattcacgcttaaaaattcccaaatttttggaactctttgaccatctcacactttattctgatctatttccttttcgaaaagaagaagattgattttcatcttattctatctctgttcgtattttgcttcgttgtgttagtcgagttactcctctctttgtcttctatatttcccatggcatgtctttgtcgtctgcgttccctttcccctcgctgagaagagaagagaagagccgtgccagctttacgcttgaattcatgttggttacgatcacatgactagattcggaagcagccgaacggtttagctgcttaggtaattgttctcaacaatacgactatcatctaagaacgtgccttggtatctgcgtatctccaacgttcagtatcactcattactctgtccgatgagcttccaagacattcagtaacgcctatctgtatattctccggaaaacagaccatgtgttctgaaaaatatagaaaacagcctgtatgggcgaatgggattgacgctcactaggtgagggttgtgcgggggtatgtgatcgtctactgccaaagaggggtatcggacgcactataagaaaagcaagaacgttcttaaaaagctaactcgctcgctgcctgcaagaaacgaagcgctagtatttcattgtttacgacttccagcctgatctattgtcttggcatcaccaaagatccctcaccttctcaggatcaatcgtgtgtgaaagaccaactgacgcctgatattcgaatcaacagactactgactaatcgaagaataactggcagagagcttattgaagattcttctcttcctacctaaacgtgtttctttgatgctgaccttccgctcagttccgtttgttggagcggaaacagaagaaacagattttttttctttcgatcgtgaacgtcgtaaagagtatataacgttgattcttgactgtctccggagtttccgttttttgttcttcgtaccgttcctttgctcttacgcctacacagcaagtcctgagtgctaggtcaatcctcaacaaccacctccttctaattgccactctccaaaaaaagaatggtttctatccctggattggtcaccctcgctttggtggccgcctcatctgcctcggctcagactttccgacgaacggctgcctgtcctactttgggatgcatcttccctcctgagtgagcatgtttattctgccttatcgaagcgcgtcgtttccgtctgcttccatagatctgcaaactgaaatatatcttcaactttgtgtcgaacttgaacaattcctcgcttctcaagtcaaactgatttcattgccggacaagttttcgatctccgaaccgaggtccaggctcctgtgaacggttcccaggcttacaaaaacggagttccttcagtaagatgtttgctctttctttgatccgatcctcatctgtttactgatcgccggaccatcatcctcttttatttgttttgtttttgatttttgatatatcacagccagacttcactcttcaaatctccaaagatggaggcgagtggactgaggtcactcaggctatgcagatcgctgatcctgagcgtacgttctactatcttgggtcttccgtgcactgaagttcaatcgacctgcgactgatatttaacgtattcggtcggaacaatctacagcaaaatcttactctttctcatactatgaggatctcttcatgagccaggccaagaacgccactgtcgtaaacgtcatctctaagtcttacgtaagttattacattctctatcgttacctctgtgccttcttcatcggtctaacaagctagtaagctgatcggttatctctcattcttcttctccttctctcttcaatagcgacacatcgctctctacgagcctggacactaccaggtcaagcttacctacaacgatggcgctgtgaccaatgccaactggaatgtccttcctttgtccgagaagggacgaatggccaaggttggtactctttcttcctgatgtcagtgttttgggccgaatagccatctgatcatttgttgcatttctttacgtgaattagaacgtcatcctcttcattggagacggtatgacccagagcatgctcactgtacgttgtcttttggagaaattcagcgcgccaaatactgttcataacatctaacgtgacatccttctttcttgtatcttcttcaggccgcccgacttttgggacacaagtctatcaacggaaagtaccaatccaagctccaggtggacgaggctcctgctttcggtatgcagatgacccactccctcgactcgttcatcaccgactcggccaactctgccaccgctctttacaccggaaagaagtccaccgtgaacgctcttaacgcctacaccgactcgacaggaactgccttcgaggatcccaagttcgaaactgtgttcgagatgttccgacgaatctaccacggacaagtcggaattgtctcaactgcttacattgccgatgccactcctgccgctgtcgttgctcacacttcccagagatctcagtacgatgctattatcgagcagttcttgactggagtctcttccaactactcgtccgagtggaccaagtgggatggagtcgatgttctgttcggtggaggagccgagaacttcttgcctggagctgccaacaagaacatttctcaattcgatcgatgggccgacgctggctaccaggttgtccatgacaagactggaataaccgctcttgacaacgccaagcgggcgctcggtatcgtctgccagtccagcatggctacttggctggacaggaacgtctacaaggacaacttgaagaagttcaagcagttcaacggtacccttggaacgttcgaccttcccggactcgaggacatgaccctcaaggctattgacatccttcacacccgagccacccagaacggaaacaccggttggatgttgatgagtgaggctgccagtatcgacaagcagatgcacgttcttgactacgaccgggctttgggtgatgctttggagcttgacaacaccgtccgaaacactattgcccacctcaagaagattggaatctacgaggagactctcgtcatcgtcactgccgatcacggacacggtttcgacgtctacggttctgccgacaccaagttcctcaaggagcagaagggagaccgagagaagagaatggccgtcggaacttacctcagctctggtctctccggttaccaggtcgagaaggctcagaacccccagaacgagtcgatcgtttacggagctcagggacccaactttcctgtccagtgggatcctcgatacacctacgccggtggaatgggtgccgctcccgatcaccgacaggactttgtcgttcactccaacggatcccgactccccgccgttcttgacaaggacttgggttacgtcgttaaccctgccgatgctcccaacggtttcattgtcaatggaacccttcccaccgatgagccccaaggagttcactcgttgactgatgttcccgtctacgcctggggacctggacacgagttgttccgagggattcagaactccgttgatattgctttcaagatcgccgttgcccttaaccttgggcagacatccaacgtcacctactactaagatggccactataggatctcaatctttctttttcttctttgacgagttgtggatggggatatttattttaaaaattgttgctgtagcctttggtttcttgctgttgctgttgctgtcgtttccgttgccgttgtcgttgtcgttctcttcgcgctcgggttgttgtagttgttgtagttgtggttgttgtggccgtgattgttttggtgttgctgtcgttgtgaagtagtgtaaattttggggttgaaggggtttacttaatagaatgtgctttatatccacttcttcttcttcctaatcctttatattgaatggattatgctcctagtcttttttgttaccacaggttgagatggtacaaacccccttctattctgaaattatgatctccgtcaagtgacaggagtaggaaaaaacaacaaacacagctaatttatcaaccagatctgaacagtgcttgtaggatcatatctattcttcatttaaagctctacgacaaccggtctgtcctcttcatcctcttcgtcctcatctagatcgctcgctcctgccgctgctgctgatgtatccatggtccatccgaacttatctccgcaaagcacgctcaaggctaaccatcgatctttcacctcgatccaatccttttcttctgtcaatgtcgagaaggggttgtcgaacctggttttgaggccacgttggagatcctgagtgatcgactgagcgaaccagttctctgcctcgggtagatcttcctgaaagaatgtatctgggagccaggaaagctgggcgtgaaggagttggatgaagtcgaggtagaacgaagaaagggcacccggctgagggacagtcaggtaaggtgatgatgcagggacaagatgaagatgggagttagtgatgagatagagaactcgacggtaagtcgagcacaagagcgacggcgtttgaagctgaattgacaatggaagaagaagcgcgagctgagtgagcagaagggttaggtcttaaaaaaaaagcatacaacaagggtcgaaggtgagtgagataagacgattcattgcaacctttaagctctgtttaaattcttcagatgaaacaaagttttgctcacctccgttacattgctcttgaacaacatgccagaacaaccaactcttatctctagcgaacgtcgtggtttcttctccgaccgcgccctgtctccaactccttttcagatcaaacatcgcccactttataccgtctccactcggttcgccatcctttgaccgtgtaaggtcagctcccgcctttccttctttttctgagcggtgtctcaacacccgctcacctcctaatgagaccccgatcatatcgccttcctcttcttcgaccctggatgagagctcgaatccatcaagatcccatcctccaaccgagccctcctttccgagcactctctccacttttccaacatcgacaaacttggtagggaatagcgttttccaagtttcccacctatctatcgggtacggagctagctttgtatctagccctttgagaacctccttggagaccacgacgtcaggcccatcggtcggcgtcttgagagagtcgacagatgacgaccaaacgcgagtgacgacttgaagaggatgtgagaagtatagggtacccgtccgcggggacggtaaaacttcatctagagaagttccgccaggaggggataagacgatcaagtgcaacgacgggggaatcaacttgaagccggcaaagtcgagaacttgattcaaactgatgtatgacgtcggttgatttccgcacaatgagaaagaaaggattaaggttaacgtaaaatgagagttttcgttcagggttccattagacgagagaaactagaattcgtgaaaacatggcaaagaagaagagagaatatgtgacattctctcccatgctaacgatgaacagggaacagatatgatccaggcgggtggaagggacttactcacctgccgtcgatgccaacaagggaccctttcggaagatctttaacgagccagaagcctgcacggtcatacagggcctgactctgttctggagtaagcttagacaggaagtttgacatatggccgagcaacgataagtgaagtcgatcacagacgatgctgaatgggtgatcgcttgagatgatggttgtttgtgaggatggcagggtgcactaatatcggcatattccgcctttgcccctcctccttttctccagacatacaattccaaataaaaggggagctactgggcaggtttgaacatagtcataaaattgagataggtagaatctgtatcaggcggaccttcgatacaactagtcaatagagaagtcaagaaagagtaaaagaggctagacaaaaaaaacatgagatgacaagatctacggtggacaaggacacaagaatggttgggaaaaggcgagggagggagaacaggggaaataaatagagaagaagaggaaggcaggagaaagcgcgatggagaaataaaagaaaggaaaggagaaacatgcagcatcgctctttgagatagaagaggaggtccaggggagccatactgcatcaatcgatggggtcagctccatcgtccatgagcaaccttgtgacccattcttttgacgatgaaaccaatcgcgatagggccgattatcgtagcaagtgcaattccccagagaacgacaaggaaagctaacataaaaacgaagaaaggctcaagcgttggtaagtgacttctgagctgaggcttgaagaggagaaagacaaatagacataccatcgttcccgagaattttagatttgttgtatcctacctgagcaatcaacactccaatctctcctcgagggaccatcgagattcctaagaagagggcaggatagatggctagcttttcctcgggctccgtaggcaaatcttcctcggaagtcatttggatctctgccatctctgcttcctctagcgccatggcgtcctttttcacagcagttctctttcttgtcagagctctctcggccaaatcccagattaagacgcatataccgcaagacattttggccaaaaccatcaagattgcatagaccacaccttgccagacgaccgttccttcccagagggaaacaaatggcaccgcggttccaatcgaggcaaagaagatgggcgtgaagatgtacgcagagactggctcaaataagcgctcataagtctcgacaaacgggttgttcaagacctgatcgatcgactccggctcgattgggtggcgaacagggtaattcaagctaggacggcactcgaaggatggaatctcggcgcttatggatggttgcggagagataacttgggttgcctcgtctttggacagctcaggtggaaggacagcaacaatcaatcccgcgacgtaggcccccatgaggggagaactatgaatgagagaagcgatgctaaccccagcactcagaacagcaacaattatgacaaaacacattttgtcatctctagatcgaagtagatgttgatgtagatgttgtctgtaaaccggaataaagatccatcgagtgatcgggaaggctacgacgaggaaggcgatggaagtgacgataggctgagcaatatgccaagggtcaaggcctgaatttgattcaccgagatctgcgatgacaatattcatgacaaacgcaacgactgaaccgagagggaggaaagagaagaagagccatcggtcaagtgcaaacgagctttccatatagaaagagagcaaagaatgatgagaactaatacacactgtcgtcaatcatcgctgccgcgataagcacagtgccgattcttgtttcttggagcctcaaactcttgttggccgccttgagaacagagacagtggttcccagactggtgaccgacaaggctgctcccgccacaaaagcttctagaacggagtacgaatatcggggaaccatcagtgccatagaaatgccgatcggaaagaggaccccaacagcagcaataaagcatgccaaggggagtgatttgaacagatggttcagtggcgtcgttaggccgcctgtgggatttccatgtcaaacgtttaatcaggattcaagaaagtgttgccaagagccaagagagtgcgagagggatacgactttacgcaaaagaagaggagtagaacatacactcaaaaacaatgagaagtaggcctatgtaacctaacgtgagaaacgtttgctcccaggaagagtctaggatgttacctagaggagttccgtagatgacaccgatagcaatctgaccgagtagaccggcatgaatgaatcgctcgacgacgaatctggatgattaccatgattccggtgttgcagaacaatatcaatgcgacctagaaatgagcaccaattatctccaagaggttcatcgctagttcatctgataaacgacgtaaacgtatgataaagaacgatgacatacccaaagacgttggcgaggattaagaaggatcccaaagagagaatcgagacaagggatggctcgacgtatggcacatagccggacacttgtacgtccatttttctactatttaaccctcgacaatgattcaagaacgagaacggaggaatgggcagagagaaaggaagagacaaagatgatgaccgttagtgggaacgacgaaagggtttggtggtggtggctgaagaatcagcagcacgctaccgccttatatcaaattatctcggtcttggctgaatcaaccgccgttagatctatacatgagcatcattcttcaggtatcatcagatctatagaacatctacagtacatctacaaccatgatacttgtttttacatatcgtttctcatatctacacgtctgcgttccgttcagttggctcaatccactctaatcccaacgcctcgaatacagcaggttctcccttttcttgagaaacggcgatctccgaaccgtctgatagtcgagatattccatgagaagcaaatttgagattgagcccgttggcgtgttttcttgaacaattgttgaaagaaaagagatacatgttcagatcagttctacatgtgatacgagcaagcaagcaagcaagcaagcagaggcaagactcaccgaatatcccgttcaaacattgtcgatccagtccacccaaccacacagacccaatatatctcgtatgctgctcgacccaaggcgacacggaacacagtcagtcacataaagttcaagtcaacgcatggtatgggatgactcggatgagctgtctctcatttttgttcatggcgaaataagtaatgaaactgacgtacgcgcaaagatgatgtccacacgaatttgcctggtttgtctgggtaggctcatcatgatgaagcgttgatgaagccctcgtagcgcattcgacccaattgaactccccgacaaaatgtccgtcaatgcgcctaagataggccatatgttagtgattcaatgagaagaacgatgagactaagacgaaacgacaagaggccacgcactaagcgttctcaatcgatcaaccaactgatcgagcacctggcttgataccttggaggacctgttcatcgcaggataggtaaacacgatgtcgacatcatttgaatattctcggcctctacggtagcttccacagatggtgtgtatacaaccaggagaaatcatttcgagttcatccgagagaaactttgcgatcaatggaacctcatatcgagggattctaaaatcaacattcaattatcctagatcagatcttcgatcgagtatgcctcgcatatacgtacaaacagtcatcaatcagcacccatgaaactcacggcgtctgtaagtctgaccagtaggtcacttggaccttcaaggatggtctcgcgtttgccacatcttccagcgtccgacaatcatggatgtcatagaactctcgagagagccgactgcctacaccgtgaagagtttggaagagaaggattgaccgaagtcgaacagatgtccggagtgtttctgattgaagacaaatgcgacggtccatttcggacatgtacatatatgaacatcaagtggtcaattgtgttttgtacgcgtaaatgatcgatgaaaatgttcgagaacacacgtgagagtttgatctgtccggttgaaagatactctccgatctgaaggcagcgtgtcagcctgactctgttttttaatatcattctttgctcagacacatcgacggacgaacctgtaaagctattttgggaccaatgaaaggaatcacctgggcctcgctgactgagcaaatttttgttgggtaagcctttagagcggagcacgctctactgtacgccaatgcatgtttctcgtcatctttctttcctgcttgattaagatcactttctagcgtgtcgtcttccccgttctctttccaaacacggatgacgtcgagttcctcaatcaaaagttgattgatacatattgacggggattttcgacagcatgccagtctcgggagagtggatggttcgatagatttttccgtcgctgggaatgaagcgagaatgagtgcaggagaggttgtcttgaagggattatgatcagatggagaacgtgtgttattatgttgattgggaggtcgagtagaaggagaggctgtttgtttccgaggccacttgtgagtaggctggctatctggggttggaggaagaaagcaaggatcaaaagaaaagggttctatctgatcagagaaagaagacatcaagggaggaatcaaaaattctctaaaataaaataaaataaaaacagatgggagtagggagagagaaaccaaacgaccaaacaacgtgagcgcaacgtcacagatacggaagaggaagcgactgatccaacaagtcactctgtaacttacgaggaatgatcgggggggaccaggtaaggtcgatggtccagcagggcttcgtgggctatgcaatcggcgagccatcgatcaagaacaacgatcttggagtcctgcgcgtcagaagagaatgtggagagacgaaaacgttcaaaggtttagctagtatctgaacaaactacactcgtgagacactgcctgatctggatatcaagaagtattcacaatcaacgtcggatccagtgctaacgccagccgctttctgcccatcagcctagtcagaatgatatctgctcgttcggggtggtctatgagctgaccgccatgaatggtgagttcggccgagagttgccggatatcagatggagaatattttgtagggattatatagatcttcaaataacctagaatattaggcatctcaatcgacagactaatcagtctcgtcagtttttgagtcttttcagtgtgcgtttgtgtgagtttgtgtgctgtgtctggtctttcttaggatgagcgtcggacgtagaaggaacaaacgaacatcatagaaaattcgatcaagattcattacaaagatccaaaaaaagtattagagatttttgtagtttcctgaatttgtttctttccttcttcttcttctttctatccacccactacttgcaattcaattcatccttctatccatctagtcagtcgaaagtcaagtgttaatacaagtacaaggacgctgacaggcactccgggcacctctagcttttgaaaaacagatgtccttaacactgagctgcaaccggccgggatgtggtctttcgttcgacccagagaacaatcagcctgggtcatgtatctatcattctggagcccctgttcgtcatttaccttgagtttatctccttctctcctttcctgttctgttctggtcgtgctttgtacacatccaaacaatggcgagtgatggccttgagaaagactcgttttctgacgatggttgttgagcttgtttgatgcacacatatacaaacagaaatttcacgagggcctcaaatcatgggactgttgttcggacgtcaacaagcctgtgatggaattcgacgagtttgtcaagttaaaggtgattctaagctctgcgccctcttccttgtccgtctatcgaagagtagggatgattactcagccgggtctttacctcgcttttctctaaagggatgcacaaagtcaactcatttggcaaagaaggcggatgaaactttccaatcaaaagctcgtccgagcgaggactcaaccaaggctggtgcccgcccaaccgcgatttcttctgagggggtggagacctacggcgctgctgcccctccaagcggaggttcttccagcacgagctctgcagcaactacgatcgtcaaccctccagctgccgtcgctacggctgtcgctgcaagttccccttccgaacaagtcgaagagcaggatgatcctgcgcttcttccacccaagtcaggatcaagttgtaagcggcgatcgtgcttggatacatactcatctgacgatcaagacggaggagagtgctggtaccaccctggaatcccgatctttagggaaggttcaaagggctttacttgttgcaaacgacgaacgttggagtttgacgagttcttaaaaatcaaaggttgtcgtctagcaaaggcgcatctctgggttggggcaaagcccaaggaagctgacctggtgaggccataggaattgaatacgttctttccggtttccctcacttttctttctccttctgtcattttctctgtcgcatgattgatcttgttgtattcttgccccttcgtttagagcgccgagagagaattggtaaacgctcgagtagatcactatcagacgcccagtcaggtgcatgtatccgtatttgctaaatcggtcgacaaagaactctctaagatcacgattgaatccgaggcagtatgtgttttgtattatcttcttttgcctttcaactcttctttcgaacggtgtctctccttttagtactttgccaagaacgtttttcctgattctcttcttcttgatcttgcatttgacttttctggaacagattcatctggatttgatcttgcctttgcacaaacggaccgtcaagacgatccgactttttggacctatcgacgtggagaaaagtcgatttgacatcttgggcacaaaggtgggtccgatgagtcgttcaacttcgaaggaaaaggcgcctttcggttggacatgagtgctaaacagggcggaactgatatccgttcactcggaaaataaattaaattggctgacgaacgaacaggttgccttgacgtaagcacccattcgctgttagctcctggataatgaagaaaaagaaaggaaaaggaaaactaaccaactggctctgatgagcgagaccacttttcaggctgcaaaaagcgaacggactctcgtggtcgcttctcgaaaccccatcgaatggggcggcgcctccgccgggatatgccctgacctttggggtcggtggccgaacagggtcgaccggtgcaaaggagatgatcctggctgacgaggtccgaaaggtgtctatttaataatgtgtgtgtgtgtgtgtgtgtgtgaggaactagagatgaacagtagacagcagagaccgcagagcgaagcagaagaggtcgcatttcccaaagtcgcgtgtatccctgatgattctcatatgaggcagaactgaaaaacatgatgaatcactgaccaggaagccgccagggaaagatggaaagagacagagagtcagcttgtacagcataacatcacgtggctacatgaacgctgacaagcctccgcagtctgcgacgaacctgtcattctacccgcctcaagatagtctacccggccgactatttgcatgtaatcgccggctcgggaacgcttcgtgccttgctgcggaaaacggcagtgaagaacgctggtgtgaacatacgggatcgaattaggaatgttctgggcgctgctgacgtaagtgattggtaacaattcggcggatatcgtagccatctgtaaccaaaaacccctcaattcaccgagcggcgggcccgaatattgcttaagttaattcggtgaatcctacttcagcctgctcaccttcgttttgctcttgggctcccgtgttcttcgtgttcagtgctcttcgtgttcttgcttccactcccactcactcgctcatttctacggctgtctcgggtcttttcctttctttggtctcctttttaccactcgtcctttcttttaaggctctggaacaaatctcatttcctcttcagttctattcaatcttcccctcctccttttggatcttctcttgatagtcaaccaacccactcgcctacctacgcttcccgctctctcttttggacagaaatgattttaggctacaagaacaggaattggcttgtcatattcacgggcattggtctgttttactacttcattcatcaccatgctcctcatgtgatcaaagtcccggcttcctattcccgtacgttctatctccatgtgttttgtcaatctcatttctctcctagttaaaattctgattggcccgagccatgtgtgtttgcttggctatcgtatgtgtaggcttgatggaagttaacggtcagaatcagaaatcaagcgatcaacattcgctgtcgaacgaggatgaggcccatgctctagacagtctgttccaagtaccttctattccctctgtcggttgggagaacaagatgaagcacccaaacgtacaggtgatgagggatctgatggaatgtatcaagaacgatgactgccggtttgtgccttttttttcttttttttcttcctgcctgacttgtccatatcactctttcaaactcaccatatatgttgcctccatcacgatcgcttcctctcccttcttgtgcctataaatcactcccgacttgtaccagacccaaccaacgcaagtttgtcgttctcgagtcaatgaactacagagaggttctccacaactatatgtctggtgagaatatctgggcccggtctgtccttgaggctttggacgaccttggttacagctatgtgtttgctagagatatggctcatggtaagaatcgctcgttcttctggcttttctttgcgttcagggcactgattctcttcttatccattattatatatctactgttttgtatctctctctctctctctttccatattgggttcatctcctccgttcctaaattgcatctccctttcacctttagccggagattgggtcgctacgctcggtgatgccgttttggccgtcgtcgctgacgagcagtcgattcaggaatgctacgaaaacagcgaggtctgcttgagaactgtagaaaaccccctcggtatccgatttgaacgttagtgactttcaattctgtgccgctttcgctttcggctcaatccggcttctcggtattggttgtaaactctacctcctggcccggaatatgagggtcctgcgaccatgctgaccatgcttcttctctgggtggttcatctcggatcgttctcccgtctctctactaggcttgttcggccctgcgttcttcgaaagacagatccaggtttgttcactcctctcgcttcacattatcgtcatcactctcgccttcttcctcgctaaatctgcttttgttgtctatttctatgttgtgaaccttaatcaagcctctcggccccaaatggacgctcgtgcccgagaagccagattctcgtagacaataccttggttactcaatcgaaaagcactgcatggctcgaaaggttccctcatacaaaattcgatcgaaaaagagacaagtctgggtgttggcaaagtggatacagtccgtgttctcatctcccctcctctttcttcctgcctgagccttattgtttagtgtgttgacgactgacaacacctgttcttcctattcacagcttctttactgatgacagtttcccatattcgaaagacatcttcgtccgagccgctaaggagcttgatgtcgagtttattggtgcttggcgaatcgaagatactgatggtcacgttcccggtgtccgacatcttggcgatggaaacatccttacgtccgagaaattcgatgaggctctcgtcagtgtactcgctgtcgttggtgtcggtgctccttggatctctcctactccctaccaatcggtctgcttcgggatcccgttcgtgaacccgacaatctggggcggagctagcagccagcatccgtttgctcagcagtttgttggagaggagcacggaatctataccgttgttgagaaggacgacgatatgttcatcagtgtaagagcttccttgcatttctagactctaatgcttgtaccgaaacacgtgtcctgactcgaacgctctcttccgttcgacttaccagcaactcgccaaggcgatctccaagcctcatgacagatacgttccaccacacatgacacggaaagccatggttgaccgagttcagagctggctcactagaaactcgaccgagatggcaagagaggtgctcaagtcacatcccgagaggttcaaggtgggtttcttctggtcttcctctcttgactttctggtttctggttcacgactgacatccagattcgttcttattgacaggggcatattctcgtttgaggaagaaataagacacaacacacacatactgttgtatagacatcaac

SEQ ID NO: 2297 - DNA, 5284 bp, Xanthophyllomyces dendrorhous
tctccttgtttcttcctctttcccctgtgcctctctgatctcttaaccctgtcttctcgttctttccctcacatgatctctcaacgatgttatctctgtttttttttcttactctgtcctctacaattttttttctatctttgatccttctcatcttcctgctcctttctcttgtcttctttcctttagagagttttcatatttcaaagtcgtctttctatctgttcctctcgagttatgtcccgtgggaagcttctgtctcccatgttccgttttctcaggactcatctcctttcaagcatcgctcatctttttctcctcatcttctctcttccatatccttttctttcccttctcgtaatgtgcccgttcctttttcttttgatgagtgtctaatgaaccgttgtcgaagaaagaatctcatcgtgggtccacgtgatcagctgttttccccgtcaagccttttgaaatagccaaaacaagaagaaaaggaaagagaaaagtaagaaccgtaagatacatggtaataagactgttttgctcatgagttccagtcatgaattcgatcgagacgcgtatcgttgtaaatgtacacaagaagaaaaaaaaaccccctccctgtcatatcttccctaaggatgaggatgatactcgatctttggtttcttcgcgtgcatgttcgtatttgtttgttgtccagattcttgccctggaccgggtatcgtgtcgagttctccatatgatcgtcggtgggtcgtgttggtgttcgcgttcgtgtttgtgttcagcgtcgtgtttgtgataaaattcgacgacgtgttcgtgcctgtgttagaatacaggttggtttggggctgaggagggacgatcgggtacactggtcgatgagaattaggaccggtcggcgtggttgatgatcctgtgggagtagttgatgagatcctgggtgtcccatcggtcgttctgtttcgccgccgtatccccgttcgtcgagagagagaagacacagagacatacacgtacgcacaggagaatagtcaagagactaggatcaataaatgtatgtaagacagttgcaacagaaaatgactaacatctttgtatctcctaggctagctaaactttgcgctcgcttccatgctcccgaggcatttactcctggtctgggtagcacggtagattggaccgctgagtttccacctggtgcgttctgaagatccctcagcgcaggcagaacaagaggggaaggagtagaaaaggaaggccgtcagtttctctctgttctctgcttcaggatcgttcccataaagagacgctgtcctccatataagagttgaagactgacagtaaaattaaatcctccaacttttgagccaaatcccggtccgagggccttccctcccgaggagattcctgcaattggacgggaaccatgagaaggtgctactgaagtcgtcgttgtcgatataaggggtttggtagaaatgttatttgtggccgtcgtctgtggttgttgctgttgctgtctaggtccgggtacagaggcgattgaagccggctgacgagaatttatgacgaccgacggcttattagtgttctggaggcctacttttctaattactcacaaacaataaggatttttgtcatggtcaacaaattatcaaggtggagagcaaatggagatcgactcagcatactcttgttcgaccccatgtctatcttttttgctgtctccatcctttgtgattggctgaccaccaaccagtccccctgattcatagtcactcatgtccagattgactcctgtgagatcatagtcttcgaagactgtgtctcccaaacttgaaggtgggatctccatctcttccagcattgattcgtcttgcacgactttctgtccttgaatcgatccagtcccagagattgtgtgtgtcgattgacctgacggcccaacagccgaacctgattgaactctctgattcactgtcgtcgatctggccgaatctggtggctcttctctacctgcaattgccgtctgagattcatatcgttgattccgagcagcagcggcagccgtaagatattctttctggtgctgggcttgctcgaccggatggctaggtgggtagactttctgaggaggattgatcggatcggatacgatgtttgctcgagagttatgagtgtccaaatccggtcgtctgtacagagctttgacatcaaaccgagcctgagaagagcagtaggtggattgatgcgaggaggaggaggaggaaacgaaagtcagaaaagaccagaaagggacaagctgacttagatacaaggaaaatataagatgaattcgactaacgggggtagctttgacattcttgacttttaccagatagtctttatcgtatagacagttgcccatcagattgccgaaagagcgcaacgctcgtttcaatgcatctgttgcagcctccttgttgcactagacaacgggtggaacaagataattgagcacagtacgccatagagtttttgtgagctcgcgtaccttttctaaagcgtctcctttagtctgcgcgttattcattccaccccagccagaatcttcatgaaatgtcccgtccctcagagtgaccctgacgagagccgtcacccctgcggagaatcgtccagagctaggatcctgatcgagctgtccacatgtatgagcgagagattatcagctgtagaataagaggaaagggctatttgcgcatgaaataggcacaaaacatgacgcacatattcagttttcatattgacaatcgagtgggaccagccgttaaacccaaagatctcgttggcgatgttgatgactgacgtcgtccaattgagatggaaatccattttctggtcagaactacaagtggggatattcaactgatgcacaaacctttccatccttcgatatatgtgaattttgatcctacgatcaaaccgaaagagcatagacaacaatcagcacgtcgcgtcaaccaaaattgaatcaactcgtagacactttctgattccatcatctgtcaactggagacacagaagatcatgttggtttgagatttacctcctggcccgggtctgctctgtaggtattctggaccgagctgtctgtccaactttgcttgcagtgcggctagctgtcctaagcaatcgaaccctggctcataccttccctctatgtctgccatcctagagactcccattccggccgcgtacgtatcttccgggttctttgcagcccatgattctagcacggacccttcccatccagatccaaaggcagtagaagttcgaggcatgggcaccgacgtggagaatacaggcagggagggaggatgaggagggaggtggctgatcggaggtggccgtctgaacgcactgggaatcgatggagccgattcaggttggcccttgatcgattggatgttggacatcaaaccaagctatgagcgttctattgaccggcttgagagatgatcaatgtttcggttcaagaatgagtttggtataaggccagtggagagtaagtctggggattgaatatagcgtatgtgagtgggagaagcgaaggagaatgagcattattagggttagatggacttgatgtctcctactcctatcctggctgctattgatctcacccaacccatcatccatggtgttccgttttgtaaagctagtctggtgtgttctggtactcgcctcagtatgtctagctacatctacttcgtcatcctcagatcataccaataattgggccgtgttggtgtcagcctctcgatattggtcagtactgtgtttgtccatcgtgatgcttcatcactcgaaagtcgatttacgtttacatctacttggctctacgcttgcgatacatctaggttcaactaccgagtgagtgatatcgtatggaaacatattttgaactgcattggaagcttcaaacttaacgtgtctctacaatgaagcatatggccaatacgctgggaatgtatgtctcgtctgcctttcttgttgtcttgtcttgctgatctgtagcgttctgatgacatatctccatgttccacgcaggtaccgaacggtcaagcgtctagggattccagattcacagattatcttaatgctatcggatgatgtggcatgcaatccgagaaactcatttcctggcacagtgtacgccaacgcagatcgaaagctagatttatacggagagagagtcgaagttgactatagggggtacgaagttagcgtggagagctttatccggttgctcacaggtaacattttatctcgatatatttctggctcctgctcgcactggttcagagtaaaccgggctcaaatcttggatggggtttctctttcgctcttctcctgtttacataggtagacactcaccgtcaacccctctgtcgaagaggctgttgacggacgaccggtcaaacgtgtttgtgtatttgactggacatgggggtgatgaatttcttaaatttcaagataacgaggaaatctctgctttcgacttggccgacgcgtttgagcagatgtgggaaaaaaagaggtgagttcttgttgtcctcaatgcatgtgtctatttgcgcgcaagggttgaggccaacgctcgttcttccttactctacctctcattatttggctaaaaaaatcaaggtataaccggatgctgttcatggtcgacacttgcgaggccaacacaatgtactccaaaatctactcgcccaacatcttagctaccggttcggctgagctgggcgaaccgtctttttctgttcgcatccttctgtctttgctcaagtctgtgcttcctagtcggatatttacgattcatttgtttgttggatcctctttgactcagcatcacaacgacccagagattggagtgtctgtaatagactcgtttacacatcatctactaagctttatggaaggtctcaacaagacttcttccgctacgttcgaggaccttgttcgtctggcttcttttggtcctgttgcctatgttcacatctgactctgtctgttttcgcaatttcttctatcttgttccgtcccgtctggattctcagtttgcaacatacgacaagaatgtcatccgttcctccgccggcttccgaaccgatctatttcctgtcagcttgtcgtcgacaaagctaaccgacttcttcggaggtgtagcccaagtggacgtcataatcccttcgtctgtgccttctgctgggtcgacgggtgcacctctagacgc

SEQ ID NO: 2298 - DNA, 7079 bp, Xanthophyllomyces dendrorhous
gtcaagatgtagccaaggacagctttgttattcaaaagaatccgatagttggtagtgatgctgtaggacagcgagcacagatcgatcggagaagcttgtgttggatcctgctgggagtcggagcgggtggcatggcttggtggttgggtggatgacgtctaagaatatcaaaagattaaagaattccccagtgaaatgaccaagagttcatctaaagaacagtaccgcatcatttaccagaacgggagactgtgtaatcaacaagagatgtataaaggggaaagggtttgaaatgtatcaacaagcctcaggcatgaccactgctttaatttagcagttacggtgttgcaaccgcaatcaccctccaggtttggttggccggccgatggatccgcagtttcaagcctccagaggtccgcagagccgaagggcccagggctcgggcctagagctgatctgatcaagtttttccgagcctccggattttctctatcagtctgaacggcgtgccaaattaagggcaaaagcttctgagctttgtgatattgcaaataatttatccgatgacgtgtgcatcgcccgatctgaacaaaattttctcgatcgagcctggcctaaacaatattgtgtcaggctggcggggcagcagagtataagaacctgtaacaatatttcccgatcaaactctgtttaaactttcccccctttgatgtcctcagcagttatctatagccctgacactctcaacatacccactatctaatctacttaattccatcatggaaagccctgctctctcctcttcacccacccagtcgttcagctcgtcctcttctttcgaaagcctagaagactacaccagttgcatgttcaactttcatcagcaactttgggaagctgcgaagctgggagctcagaaaaaaacagagcttaaggatgagccgcagaagacactaaaggtccgaaacccttgaggtgctcttattcaacctaatttgaaatctgtttgcgaggtatgtataatttgggtctctttgggactcgatagatctttggtgtctcttctctaacgattgcctgattcgtttctcttcatctcattagtccttcgctcattactcaatccattccccgtctcatcaatcacagtctatctatttctcttgaacttttctttcttgggcggcttgcaattgttatttcttagtttttgggcttcgttttactgtttttggctttatatttgtttttggttactttttctggtttctgttttctagtcttggtcttaactgtgctgtatcacctatatcctttgggtttctgtctgtctatcttctccacactacttagattacccctgtaaacctttcagtggttcctcccataaatgagtcttccgttaattgtctgttaagttttagcagaaagaaaaaagccactttctcctgttaaaaatggctcgggtgaagaaactcaactaaaaacgataatcttttcatcacatcatcttatcgtccgatcattcctcaatctttctgctccgagtagatctccttgttcccatcgccaactgactaccagtcgagctcgtcttggttgaccgggtcttggctctcgaaccagccctaggcgtcgactcgaccaccagcagatctccttcgtcatcctccatccttccatcatcccgctcggtccgtctagaggacgaacctggtccggtccgtcgtgttctcgagaccgaagacgaaacggaagaaggtccttctggcgaagccgtcgcgttagatcttagactcattctcgatcgagttcttagcttgggaggaggcgtccttccctccttgtcgtcatcttcgtcctcatcatcatcgtcctgaccttctgcctcatcagaagagccaccacctcgaccggcgcttcgtcttacggcgacgtctttcttggaagaccctagagtcctggttcgggtgccagacgtgctcgagatcgatcgtttcgatagactggtagaagtctttcctccaataggcgatttaagaagctcgcctgctcggtcggctcgttcgtcctgttcgtcttcaaacgtgccaggcaagcaggcaggtccgttcgatgcttttgatcgggtcgatcgacctttcgtcgtatttgtagtctgtgcagaagcagcgcccgatgaggtttgcttagagcccactcgagaggatcctcgagtcggtcgcgtctttgaagaagacgaggatggagtggcctcaacggtaaccaaggaggggtcttccgaaccagggaacgcacccgggaaaccggtagatgaagaagaaaacgaggtagaaccaacaggttggctctcttgccgatccatctcgacgtcctcttcctcccgagtgctctgtcggacatgtttctttccccctcgggacgagctagcaggcgcagcagcggcaagagtcgacagcgtcgatggttcctgccgtccggcttgatctcggacgctttccttccggtgatcaacttctcgttccacttccgctccctgctcatctcggacgttggcgccgttcggtcgaacagacttgaacgagtggatggctcgaacaggtcctgcgttcaaccgatggaacgcagcagaagcttcttttgcagcctgagcgaacggcgatcgaggaaccgggctcatcgtctgagtcaaagtttgcgccggcattggcatcatcagtctcgactttggtgagcctggtacgctaaccgaggagagtcggtctttaacgttgctattgctgttgtcgttcgcgacgacgaaggggtttatcgatccggacgacccgttgggcgcgagcagagatttcgaaaggtcggcgaacggcgaggccggtacagcaaccggaccactcatcgagccagaaggagaagaaggagggaacatcggatgagcagctgacgagcgagtcatccctcttggacttgcaggaagggctttccaagtggtggccggtgaggcgaccacagctcgatgaacagccaaatgaggacttgacgttctgaatgcctgtgtggctgtgagaggtaacgagcttttcgacggtccgtcgatgatcattttggtagacgagtcggatgacgagctggtctttagactatcgtcggttgaaggcccggcctgaacaggcatcgcgcccagtccatcggtatccatctctagttcaagaatccttcgctggacctctggaagcaaacgaactgatcgttgaagagtctgtcgtcgaagctcggctggtccgtcagtcgcaccgatcgatcggtcgagcttgattgcctcgagaagacgaccttgggaaacaagtcggacatgcgccaagtcgtacaatacagccagagacggctgtgagagcacagatggcggatgaagacaatattcgtgaagcactttctcttcgaacggagcgaacgggaacgcgagcagctgtcggagatgagctggcctgggattggctgtttgatgatgatgacgagaaaaggaaaaagacgcgaagagagaagaaggaaagaaagaacagcggtcagttcgttatgtcttccctgccacttggcttgagcgtagcaaaagatggaaatcagaaagttttctcaagatcgacttacgagacaaactaaaagtcaacgtctgaaccaccatcgattttttaatctcactgtcgtcgaatgatcgcatgtacatccaagcttctctcacgcttgtcgctagcaaagcgttcagcttgacagcaacctcgtctggagtgccaatttccggcctgcacgccctcaaaaacttaagaactaatttggccgagagcgccggttcgttaggaattcgagcgagagtaagcaggatttgagtagtgaaatccggggttacagcaaaggaacatagttgagaaatggcctgttcgtatgacccgttatcgagaagccagtatccgtctgtaagcttgataaactgagagggaatcagccggcgggcggcaaactcagtcgctcgatttggtcctgtagaggaaggatgatctttgaggagatagtagatcaaacaatccgttttgaggtcatcaaaatgactgtcggctatggaagagagtagatggcggaaggagagaacgtcctggggagggtacgatgtcgaatctaaataacccatattccccgacaaagatgtaaaagccacgaaaccatcagcaaccaagtgcccttcaggagaatacgaggtctgggaaagatactacaccaacacgcgataaaaaagaaagagagtgaagagtgaccatgaaagaaacggaacgaaccaattccagccagtcccaataattcatcgaaacataaggtcccggtcaagcttctagcattagaaatccgggcccgtcggtctacagtccacgggaaaccggagggagagatatcgaaataagcgagtgtttggtcattgaaactcaactgtttttggtgtggttcgtattcgttgtatgtcaaggggatgggttcgagatgtcaaacaacaatgtatcagatcaacgtaaagttcctccttgtctgtcagtcttccatcgctttttgtgtaattctggagaagttatctactcacatcgcccatgacgtattttagagagtaagatagagaagaagaaaagaagaagaagaagaagaagaggcgacgggcgatgagccggataggatggcgagtgtagtggaaggttgcgtgaagagttgaacgaaatttcgcttagtaccagaaatttccagcgtcttgtgaaagacagacaaacggtggtcatgattcaagaccttgtcttctctggtgtttctcttcagcactttctatatatttacctacctttacaagacaagacatatacaggatgttcatttcctatctcgatgagagatcgcgaagtcggagggaaaaatacatagatctcgtctagacatagaggctactaaaacagaggtaaccacctatccactctcctctcgtcccaatcgcactttcttccttgtggatcctcatccccgtccatgtcttccttttcatcagacttctctccatctgctccttcgtctccactgtcgttcattcctactttctcatcttctccttcgacaacgactctgttccgcgatctagcctttcgtttcgactgcgaaagcctgtttgagtaaccctgtacaaaaatcaggcctccgagctcgagagattcgtgaaggatttgtgtagtgaacaagtctaattgtagtgctgatgctgtgtcagcatgaagtgaataaaaggcaggttctacgttagatgtttatcaagtcgatcacagtgacatatataaggagacaagaataacgaacgatgatatccaaacggctctcccaacgtcgctccgatcccgtcgacacctagaaagcaaaacgcagcgatagctgtgactggtatagtccagtaccgaagttttgaagcgagttgaggaggaatcgatagaaggtatagagagagcatctgttggaaatgtatggatatcgataacgggacatgggctggagcaaaatacgatgcagtatgtcagttcacaacaaacaacgagcgcacgcctgatcactgtcgcctttgagcagaaagcagcatgaaacaagaagaggaacgtcaggaaagggagaaagtttgacacgaactatctcgtattctttcagctccacctaaagctcttgtcaagccatcgaccaacccaccggtcccctccgcaacgccaggtttgaggacgccttctttggccaatccatccagatatgcgtgaatcagcctcaagattgacagaggcaagttggatggaccaggcacggagagagcggaagagagcctgcgaaccattggagaagaggatgaaggagaaagagaagaaggggatggcggcacgaccggaagttcgtacagtgaggacgatgatgggagcgaaggtatctgttttatgatcggatgaggcgcaaatcgaacaggcgcatctgttcgtcgaagagacgagatgtctagaatgagagtcaagccagatggccacaaggtaagattgagctcagtgccgaggaaaaaaatggacgcatatagtcgataacaagtgtggaagatgccaccctcagctacttacatgcctgaggtaggagaccctccagatcaggatatgatactcctttctcgccgcgcaggtgatgtcttcaaacaaaagcaaatcgagaaggaaaagatgtgtgagtccagaagtcttgatggttcttgggagagacagtaaggtgcacacgagaagctagagtgtgcttactttaatgcgatagggaacgcgacgatcagccccatcagatcttccgccttttcgcattgctccgacgttagggattccctaggcgcaaggccgagagatacctagaacagccatggttgaaggagagcacagtcctgggatcagaacagccggcgatacgagccaatctgtcaggatgaagagaggacaaccagaggacaagaagacttacgttccggataaatgtcctaattatcgtcgagacggagtcccataatattcttccttctttccatctgcttgttgagctttcacttcgcagactaagcatgagaccggtgactatatcgaagagttctccgttcgaaaccaaccatagatcaacagaagagatcaacattccttgttacaacaaacaaaacaagagatagactctggacgaggaccaaccgacagaaagaaagcctcccaaggcggctcctacaccgcccagaacacctggctcaatcaccctggcctcgactagaagcacgacgagtacggcatatcccacgaagaacacgaccttgcctatgactgagggaagggccgattgagcgaagttgagcgagatcgttggatccattccttccaatgcttgtagtcggtccggggaaaaggagggcagagatctgggagtgaagaaagcattaggatttgtcgaagatttcaatacaaaacttcgtaacagattttctaaaattctctaatacttttttctttttcctctcc

SEQ ID NO: 2299 - DNA, 43979 bp, Xanthophyllomyces dendrorhous
ttttttctttttcctctcccaatctatccttcccatcagaccatcatcgaccttctcgtccatccatccagatatccaggagaggccatagcaatgtcgtctcctactcggtcttcagagaatgatcagccagtcactcaggctgtcacctctccaggagtgccctcttctcccgttccagttccagccgcttctgtttctaccgaccaacccattccatcttccccggccgccccttccgctgtcgacgagaacaatgacgaggacgacggggacgatctatttggagaggaagctgatgaagcagtcctggccgagaaggagcaactcgcaagaggtgcagatggaggtgatatgtctgttgatgaggaggaggaggaggaggaggaggaggaggaggctcaacagccgcgaccttctcggttcgttcatctatcgctcttttgtttcctccatttcccatgtccttctcttttgatagagtttcagttgtagcatcatttagttgaggctatgagacttgaagaagaactccaaccgctcacacaagtgtcttttgtgccgtttgtctcgattctcggtgcgaactgtgtcatctttgtagatcgtacaaagaccccgacgcgtcgtctgattcggaagatgacctctctgaatccgagcgacgagcaagaaaccgattggaatacgcagaagatgacgaggagcagcaagagagtgaagtgagggagaagacggtggtcgagattgaggcacaaaaatgggacactttcaagggaacagatggccaggtaaggcttcttcaacattctctctcttccgtcgctatgagatccttctactacaaacatctcctgagactgactctgttttctaatcctcgaactcatatccatcctgtaccttttgaacacatcaaagcgatggaatctccggttgcctaagcacgtctactacgaatctcaaccttatgaccaagagacctatcaggagcctgaagagcctgttttgccaaaggaagagcaggatcaaaagttgcacgcaagagagattgaacgaaggcgggcggaggagcttcttcgaacggtcggacacaccgttcgttggcgatgggtcacaggggaagatggcgttagagttcgtctattctctgattcaactctttccaagttttagacctgccttctcatcttcttaacgtctttctttccttccttctttctttctttctttctttctcttctttaaacactacagcgtcaacaatctaacacgcggataattcgttggtctgatggaacgctctctctccaactcgggcacccctcaaatttgttcaccatggtcccccatcctgatgccctatatcctgcccaaccgacacagtacctcgtcgcacatcactacgaggcagagatcatgcagaccgaaggacctctcgctggttcgatgaatcttgtgccggtcgacatgaagggtgagatgcacaaacgattggcaaagacggtcaaggagcgaaacatgacgaaaggaaggctcaagacatgggacgaggataagatggtggccgctaatgtcggtccgaacggagaagaaggaccacagaaaaagaccagacgatcaaccggtggcggagcaaagaaaaagccgacagccggagctggtaggaaaggatacagagaagtcgccagcagtcggggtggaaggagaggaagcttcgggagcgattcgagtgaagatgataccgacgcaggggataggagagccagggtcagagcgtcggctgctggcggtggcgtcggcggtggccggaagaccaggaccgaggaagagttgaacggaaagggagactaccagaacgatggatttgttgtaagtgaaaaccaagcgctcactgatcgtctttcttatcgagcctaatcattcaacctcttcaatcgttgtgtgggattttttttcccttccgtccaggtggacgatgattcggcctcagaggctgtctcttcctcttcttccgctgcttcatctctcggcgatcgtcgtcaccgaaaacgatcttccgggtcgaaatcatctaaacgagctcaccgagcttctccgacgttatcatccgacgaggaaccttctgctgtcgagtcatccgatggatcgctttctgctgcttccgatagagaatcgagaaagaagaaacgctcgtcttcctccagaagcaagagcaagagcgagaataagagcaaaggaaagggaagaccagagtcaggagacgactctgctaagagagacgaaaagaagatgggtgacgacgaggatgaggatggggaaggtgaggaggatgaagaggaagaggcggtagagatggaaagtgaagacatggagaatgagagcgatgaagatgttggtgggaaggagatcaagaaacggagagttgtgattgaggaggacgatgaagaatagaagaaaacggggagaacacaggaagaaaatgattggggagaactctcttcctgtttttttttgtgacctatgtatgcactttgttgattcatttgtttcattcgcccgttcttacttctcaagtatgtcaaccgggtcattatgactgcttcctctcgattttgtctttcgtttttcgatggtctatggagcatgcaatgaaaggactacacaaaaagattatctcacgaccaaaagaaagcaaaaaaaaaaaggttgctcttttagtaaggagcagcggcctgctggcaagctttcagggcctctagataaatcgtcagacaagcaagaaagagaacccagaggaagcgagaggaccaagtcagcaagaccttcaggtagcagaggcaagagagaaaggacgaaccaaagtaatacgagcaggattgcatatcacttccggtagcgtccaagcacttggtgaagtcctgttaggaacaacgaaaagaagatgagtgactgtagtagcttcatacgtgatcgaaaacgataggatgaagaggaatcggtgaatgaaaacctaccttggcctggattgcgcaaacagcgccttggtcctgaatctggtaggcagcctgggcggcgaccggagcggggacctcagcggcagaggaagatcctccgaaaagccttaaagaagatgagagtgacgggcgattatataagtatcgatttgacacgatgcgattgataagaattaaagcagaacgcgtacatgttggaaagaccgtgaccaacggtagacccgacggcgactccagcagcggtggaagccatctaatcggacagagaggcaaaacattaagaatgaaaataaacggcccaaacaaacagagtcagcacccaatgtgcaaggctcacccgagaagacttcaacagaagtatctcagagagaaagtatgatcgaaatcgaaaatcaggttagaaacgaacgttggcaaagagtccacctccagcagagggagcggcggcgggggcagcagcaggagcggctggggcgtgaggccgggcaccgtaagcctgctgaggagctgtcggagcagcggtagagtatcctctagaagcagggggagcagcagaccgagcaggagcagggcgagatcgaccggaagaacgctgatgaaggagcacagagaaaacgaagggtggattgaaaagacaagtgatgaaaagttcaaagtggatggggaaaaaataaaataaaacagaaaatcccgtccaacccagcgaccggaaacgttagcttgcgaaagaaacacggcaacccaacagatatacacgacaaacgtacagccattgttgaagagtgagtgagaggttgggcgaagatgtggtgtatgagaagcacaaaggtggatgttgtagtgttgaaagaatcggccgctgatgattcgatcttttctagaagccggtctgccgagaagagatgatgactaagcgtacatagtgaactagacattatccgccccgaacggggttgattacacttccgtcgatgaaaagtacagtagaggagaacatggcgcgcatgttatgtacagggcaagagtctgaatggtagaggaagagtataaaagaacgcgagaacggacaatggaagtgtttgaagggtgagaacacggagtgttcagatgtatacgacacaacagatgggtacattgacaacctagtttcgtcactcttgtcgctgacacttcacagctccgcctcccttctagttcgttaaactagggatatgctgatgaacatcattggtttgttgttggagctttttgtcgatagaattcatctggagaactcccatatgtccccgtcaccgtacgataccgtcagtgagaccgaacaagacactacattttagatcgtcctttggaacatccgtccaagatgtactggcctgatcgagcaacgtttgggaccgaaacaagaactctatggtgacatggctgggaagagtgaacaggctagagttccagatcgtgaacaacttggcagtcatatcgaattcttcgtccaacgtctcgctcgacgtcgcttgcgttgtgccatagtacattggaaaccgcagggtgatgctcttctcagtagacaagaccgaggagccatccaggatcgaccgatattctgtcaaggactctactgagttgtccgtatctgaccgacagatcattgtgccgtctgtttggttgacggttcctagtcgagtccatttcttagtacatgcctcccactcgtcgtgctgaagccagagaaagaatcgatctgcatcatctttgagaccaatggtaagctccttggggtttaccaaggggagaaacactttgaacggacgcaggtagttgtatccgacccggtccgtttcagacgactgcttgaagtagagcgtgagagattctaagtttggaagacataacggggggtatgtctgagggaaggtcgggtggtcattgtctactatcgtttgataggttagctcattataagagtacaacgtcaatttcgagagattttctaggtaactatgcggtcggttcgacgaggactggcgttgaagttcccccgaagaaggaaagcatagaaagagaagatcgatcgggttaggcgtccagcacaaactaccctgccaaggaaacgtgcaccgggacgtacagttctgaaaggctctaaccacaaggcatctcgaacttcaggcatatcctggaagattattcggacggatcctctccttatttcccgacatgtaagggagaacgagcagagggaccgacgatcgtccttgagactttcgtatatggccagctgcagttcgaacggaagggaaagaaacgatcgcgtctctctacgatcagaagatacagctttagaacacatctgtagagtcacgatgcatcatcagtcgaccaaagatatccaacagatcattctcgacctccaaagacagagagatggcgtcgagagaactagaccaatcaagacgtcgcgcgcgcaagattgcctgatgagagataagatcgatggggttgcctagaaagatcagtagagagcgagccagagttagctatcgtctgctcctgatgctttctcctcgccatcctctggcgtcgtcttccagctctccattaaaaaaaaactcatctacctctcggaagatacacgccgctctaccttgggccccagaggatcagagtgaggattataaccggaaagatgactaagcagatacgatcaacggactcaccatctcgaccaatctcttcatcagcatctctgtagcgcaccacgtactcgctcatctctgatatcttctcactgactctcccagcttgttcagatcctgcctatgaacattgtacgatctcggaaggacatgtcttctattcagcttccaatcgctcgtaagtcacgattcgtgtatcaagacttgaccggacagtttctcctgtggtatactcagcctcagctgcatattctctcctgggttcgtcagatttcaacgacgtatacagatgccatcaaaaatacagctctcctacacccagaccatccgctccatccagtactgataaagccgacaagaaatttgagaaccaagatagattcatttcggccgcccagtttgcacacaccttgcttaccgccagagcaggttggcaggacagcaagacaaagaaggacaccaaagaagggctcgtcttgttctcaggaggtaacaagagcatctttcatctgttggcgtaatatgcaggactcccgaatcatcagaactaacggtgtcaattcgtccttggtcgactttagatgtgttcagtccaagcgtagaatcaacgtgagtagtttgtgcataatatctttgacgtgattcgatcatcgtgacgctcacgctgctttatcatccttatagcatcactcgaggatcacatatggtgccaggtaagagccgatcaccataggtagtcttcgaagacgaacgcagaacctgacaagatttctggacacacggcatacctgatcagtcatgaatacatttgagatcgatgcttcggttacaggcatgtgctttcctcagtgcacatacataatgtcatcgcgctaaccctcctatttcgtttgccttgtcgaaaattaggaaaccatgactttggtgaggaagctcaatggtattgatcgatttgaactattactaagtagcgcacggtattctcttcgtactgtaaaagattattcgtttcctcatctatccaaattgattgaggactgcaactttccttgtccgtgattctcattctttaagagcttaaactttcaaaaatctgacgtctgatattcttccgtgctctcttgaatatgactgaacccactttactttcaccagggatcctctccaacattatcgatactactacgaacaaaacacctgagtccttgaagccattcctaattcttgagcgatgcggcttaaaaatcggtatcctcggcctagtggagaaagactggatcgcaaccataccatctttcccagacacgttgtgagtatttgattctcaattccttcgatccgggggattgacctagtgctcagtctcgctgcttgcttgatgcgtgctgcacttggtccaaactagtgagcatgtctctatgaaggatactgcgctcaaatactcccagatcctcagagatccagacggaccctataaagccgacatcatcatcgggttgacccattcgagagtgggaaacgatattgcgctcgcaaacgaagtgggcgccgtcctcggccaggatggaaagcaggaaggtttggacatccttctaggtggacatgatcatttctagtttagtcatctttctttgggttctacataatcatccgagatttaaattccaagaaacgtctgaccttgatcgcgattgttgacggtggtcctggcgatcagttacataggacgaggaattgaaggatgggaaaattgggatcgcccagagaagtttcccggagcagaggaagatagcagttgtctagtcatcaagtcgggaacagattgtgagtgatctctccatcgcgatcgacgtatcaatagttatcattctgattcctttcagtgtgtccccggctactttcatacactctcagtcagagatctatcgacattcactctgaatcttgtacccactccggatgagacacacaaacgccgatacatcatccaatcggtcgatcttggaaaacaccatgagatcacacccgaaacggagacagatgagggtatccaacatttgatcgactcgcttctaagcagagtggctgaggatctggagagaccggcttgttatacgatgacggagtggaattgtagaagtacttctgttcgtgagtgacccacaacgttctcgccttgttttgtccatatatatttttcattaggtctttcacccgaaatagttcctcagaagtcaaaaaggctgaccagaatttctcgatcgttaggaactgatgagagcccaataggcaatttgttcgcagacatcttgatgcatgcgggtggtgcaaagaagaaggagattcaggccgactgtgttattctatgtggaggtaagtttatatcttttagagcctgtttgtctgcgagtcagatcaacattatgcagattgacacatcttcaccgattctgatggcaaatgactcgaataggtgcattgaggggagactcgacttatggacctggccagatcaacctgggagatatcttggaaatcctcccgtttgaggatccaatcgttatgattgagatgagcggagcggctttgtaagctataactgctccttgtctttgtctaccgttatcttcggcgagtaaccggaactcatacaacttgacaatttctaaatcatgatcgtgttccctggggttcgatatgcaggtgggacaccttggagagctctttgtcaaagtatccggcgcaagaagggtgcgttctctcacttcttgattgccgatccgaaagtgagactgaacccgctcacaagggtctggtttcttgataaagtcgatttcctgtgatcgcaggtctgagaatcgtgtgggattcttctctacctcccctatcccgagtgaaatcaatccatctcgtcactcatcccaaaaacaaatctcgaccgacatcacctggaaaggacagtcttaagattctggtcaaaccaagggaggatggagtgggaatcgagatcaatgcgccaaagcctgatgaatgtgaggtcgaggtcaagagagaaaagggtgggcagatgtacaaagtggtgacccgagatgtttgtcgttttcttgctcttctgattttccttaacggcaatcttatcttgaaaagtgatcccgacactcaccgacatatcactctcgcaactactcagtatatggcgcaaggatacgagttgagtctttttcttcttccgcaacaagttcagcttggatgtctagcaagagatgtgtgtgtgtctaacattcatttctaatcatactatatggcacaaagtgggtttgaagcgatgaaagactctgcgtatacgtcgatggatgacgaaaacgggcaagtgatgagcactcttatccgtcaataccttcttgggttcgtctctcgtttactcttttccttatcgttcacattcttggacctatccaaagatctttttactaaaagagggaacaccgtgtttccttgcctcagagcaacgtttcttatgcggaggaagcggctgaacgattatattgttcattcagagtctgaagaacctaccaaatcctccaacactaaggattcatcaggtgaaggttctcaggcaaagtcgacccagtcgagggagataagtacttcttggaaagcgataagggacgcgttcttggctgccaggaatgagcacatgtcttctgtacgttctttccaattcaagccttctcgcaccaagtgtccagatgcatactcagttggtatatggactttcttcttattcttctgtcgtactcgaatcattcaggttgacgcggttggtggagaggctctccgaaagacgaaacgaattccccatcctcctccccatacttcaagctcgaccattgactctgcctccgccaagaacaaagtcgaccagaatcgtgtcgatgtgaacggccaacctcgacagactcaggacatgaagttcttcgttcaaggccgaaaccgacaggtgctgaaagaattaggggatgatgtggccattgtagtgcccagattggatggcaggctgaaagatataggaaggaaatagagtgttctcatcattctctcttccacgtacatgtctggcttaagcataaatgtttttatatatatatcactgtcatattctatgttgaacaatgctcatgtataatcagatcggagcattacgaacaaacgaaagcactccctctgaatcaaaatgaaaacaatgtttcgcttcagttgacttgtcgcacaagaatacaggagacatgagagaataatcaaaacagagaaaagaacgatcttacgagagaaaccacacagctcagccaatcggccgccttccttcacctgagctctcctcaaattctctaaaccctctctaagctcctctccgttttgaataaggacctcgccgtggattttgaggaaaatgctgatgaatgcttccacggcctcaaagtccttgtgagacttcagtctctgtgtgagagcgaggatgaacaagtttagatgctcgagagatgttcccagggaagatcgaatctcaaggtcggtagcggaaggtgagagcgctttgaggtagaggaaaaaagactcgactgaacgttcgcagttcaataaacgaagagttgataagcaccagaaaatagaacgattaaagcaagaaagaggggggaaaaggaaagaagaagacaacatacagtctccatccagattttcactggtcatctttcgaatgaactccgtttcaaccaggagcccgttatcagtcaatcgatgagaatcgaacgcagtcgacgaggactgttctcctgaagcggcggcctgagcatccatcgcctcgcctaatccagctcgtttctctgcatcggagagtaacgatggaaggaagaaaggggctttctccggagctttgggggcttctttcggcttgtttcgagcctgcggtattggaccggaaaagagggatgcataagtatcaaggaggaaaggaaagcaagtagccacgatcgatccagagctatcgaggagagaaaggacgcaccttgattgtatcaagattcaaaagggtctgccactttgatcgggggaagagagttagcgttaagagttcctcggagagctggtccggagtggtgtagatatttttctccggttgaccgacaggctcaataccctctagttctgttatggatgttggtattcgagtcgtagtcgaaacgaatgtacaacataacgtcagagatcatttgcagcgtgtacaacatataggtcgagatatggattagaacaattgcttaccactgtcgtcatcaagaccctggacagaaggtaacccagcctcgaagacttcatcctcctcgatagctcgaagagcgacttctgagaactgagctttgttcgccctaaagaatagattgaaatgcacaggtagcattcccaaacgagataacgcgtatctacattagtctaacgttcacatcgactctctgttcattatgatgattggagacaagtgactgaccaaaggtaaactcctagacttccaacatgactactggccaaaaagtcgcctgtaggagagaacgtgatactcgttgggatggaggcggtcttaaaggcgtcaacaagggtaccggtcggaatgtcaaacgttcggatgaccgagtcctgggaagcagtgataatccatctcgaatccggggagaaagcctataattgaatcaagtgaaaagcccacgtattagtaattactaacaaccaatacggataggaagaggttggcactgaaaggaactcacaatgtcgagcaccttggtctgaggacccttgagttctcggaccactcgcctagtctcgatatcgacaatccgaacaacttgatcggcagatacaactgcgagcagattgttatccctatgcaatacgagagaggtgataggcgattccacatctagctgagccaatgcttgagtcgtgtggaagtcaaagaactatgcaaagacagaagataaagatcagtctacggatcattcaatactagaaatagcaatcaagcaaacagattaagaaaggcacatacggtcaagacgccatctccagatccaacaacaacactcttgttgagcgaatccgtcacaatccccttgacgtgtctctgactttcctcctcccctcgcgaagctcctgttcgaggaacggtgaacgactttcgctcctggccggattgtaaattccacatcttgatgatatctgaggatccaaccagacagaagtttccacacccagatacacagacagactaggcagaagcaagtgtcaaaaggagaaagcgcaagatggagaacgaagcagatagtaatggatcagaaattagtcacatcgcagatggacaaaccctgtaagagaaccacatgaataagagtacgaacctcgactggtccatcacccgctccgaacacaaatttaccaagtctggcgtcctttccggaccaagctctggcgactccacccaacttctttcgctcagatccaaagttaccaccagcaccaacctgatgaacagtgacaatgtcgtcccaatctttagttctagcagatgaccacgatagtgccttgataggaggtagcttatgcgatgaatgtgaactttgcgcgtttttcttggccggtccttcagttatgaaaggaaagatcgatattagcttaacaagcacctatttgagtctaaactcgccaggatatgctagtgagattcaaaagaggccaaagaaaagacaaaccttgactgatctctgtgcttctagaatccctgacgacactcgtcaatcgcaacgccttgtctaatcctgcagttaagatagcctttccgtcttcaccatagtaccgaatcaaattaggaggcgcttgatgtcccgatcggaacttgagcaacgacgggggagaagtcggtgtatcgaacgtccattgctgtgtacatattggcgataaaaggaaagaagacaaagattattcaatcagatgatgttgtttatatgagcacgtaggaaatacgaaccttgatggcattatcagctccaccggtgatcagaaggggctgtccggggatccattcaagtgaggtgatcgctccttcgtgcgctgttctcgacatatggagcagccgacctccctgatccagattccaaagagcgagagaaccagaaagcgaagtagtggccaaaatgggttccccgtcttatcgtcggcacgagaatattacagaaaaggaaattggttttcgtttgtcaaactcagtatcgctttagattcgaggatgtcaaaaggagtgaacgtacccatcctgaaagagattgcaccgattccgccttctccttcctttcccaaactatccattctaaccttaaggacgacctcatccatcttgaggtccgtgacccgaactgtaccgtccaagaaaccgacaccaatcacgtccaccgcaggactctgaacgagcgccgttaccggactgggtgctactcctggcggaggaaggaatgtatggatcaacgacctagatcgaatattatacagcgcgagtgtaccttgggtcgaaccaagtagaatcttgttgagatatgtggaaggatgaagcatatgggttgcgtggaaagttgaggcaaaaggaatggtagtggatagttcggtggagacgaggtcccagatgaagagtcgatcaccagcttcggagagagcgagcagctggttaccgaacacgagtatttgagtaaggacatcgttgtcatcctcagtcttgaacgtgtccacctatagaatttattgaaggtccaaataacacttgcatatatgtcagttgcctgttctgatttggagaaacgatgctctgcaccccttcatctatgtttcttgaagtgagaggattgggcttgtaacgagggcacatcaaacgcaatcaaccctttgcacctgaactcttccctcttctgctcttcttcatgaatagctcctacatccgttcagttggctaattaatccctccttcatttttcttccgtacccgacagtatcatctatgatcgacccaaaatctgacgaaaacaaaaaaacttaccaccttgcctctctcaaacttgacgaccaagtttccactagacgcataaactacatcgtttaccaattgcattcccttgatctctttgggtagtccctgaccaacgaacaagagattcatcctgcccccctcccataaagcccaagcgtctcccaggcaagaaagaattgagatcgacggaccggacgtcgcatgcttggaagctctagtctgaatcgcaaacgggacggcattggtgatgaagcctaaagctcggaatggagcaaataaccttggagaggttagtttaggaagcaaagtcggagaaggattggacggcttagaccgcttcgttggccgagtcggaggagccatagttgtaagagaggaccgggaggacacaagataatagaacagggttgactgagaaagaggtaaaagtcgtttgtgccttctgggagtgtccaaaatattttgcctacacagttggtatgtctgcacagccttaagcgagatcacgtgtctttgggtcaaatctcttttcacgcacctcccagtttaagctgacggataggaaaaaagatcttcatggatacatgcgcagataaagcaggagtccaaccagatggaatacatgctgagagaagatacgaaagaaaagataccgaaagatggccagacgcagcaccgtaacatcgtggggcacgagtgaggagagaaaagcacaggaaagattgacgagaaaggatagagtgaattgaaggaaggaggggtcgacagcatgtcaaatcattgttatgagagagaagaggcgtgtggacaagaatagaagagaaactacaaatttgcttttgttgtgtatacggatctgttgtattttcttttttacattccaggaggaggtccagcagccatcaaagcacccagcctggcatgctcagcagggaaagtctggatgattcaacaagaggaaacaaggattaacgatcaggtatatcaagtcatagttttgagattaatgaaactgaacaaaggaagacgcacctccataaaatcgatctgagccttagccgcctgccagaaagtgatctgtttttttttttcgtgcacatccgtctcatgaatcatcagttttggtattactcgtgtagaatgaaaggccattgactcacggcctgaacgagttcctcctccgacctggcaatatccatggcttttctaaacatctcctgggcctggtgaatctttgatgactggagactgatctgagccaaggtgaccacagcgacatcacactcgggatcaatgtcgatagccttcttgatcaaagcttcacatcccgggaaatcttccttgtatcgaagcacacagtttgccttgttcacaagaggcagaacgttctgtccacgagacctgaacgacagagaggcagaattataagggtggaagaaaaaagctcgaatcaacgataaccccgcctaaactaaagacaaggaagaaaaaaggagcaacatacttggcactctcgatctcaatagccctgtcaaacttctcaagcgcctccgggaacctgttctcagccaacaacaattctccactagaaccgacccaataacacgcgtacattcccagtgatcagcaattgggtgatgattatttcaataggctcactatgcatatctatcatcaaggatcatatggcaggagacaactggagaacaagacatactagtagttgtaggcttcacttcgatccgggaaatccttcaagacacgtcggaaggaggccatagcgctcgcgacgttgcccattcggtactgagtcaccgccttctgaatgtgagagaagatgaaagtagagtcgagttcggacgacttgatgtagtcggtcaaagccttctccaaatcaccggcgatgaagtagactagaaaatggatagattgggatgtgggtcagattcaaagtacaaaagataggaagacacggaaagatatggatcaaaccttggcctcgatggtagtagatatcagcattactggcatcttgggcaatggcggcctcaaactctccaaatgtatcgttgatgtcacctgacatggtgaagggtcctgggacatataagtaaaatgaaaattatgaacgtagcaaaaagatactgtacataccgagttccatatccacactggccaacttgatcctgctctgtactagcgtcttgtcgacctcgagactctccccgaaatcactcttagcgcccagcttgtctccaattaagaacttgaaagttcctctcaggttcaacccaagtgcctttccggcgatccaggactcggtgagcccgtggccaagggcctcgttgacgagagtgaaagcatgtgcgtagtcgtaggcgtgaagcgcctcgtatgcgagcttaagggtgtggtcaccggtcgaagggtcttccggcagcgcggggaaggggactgtatagattggcagattttggaagagatcaatactatcagaaaggccagaaataatccacaaggaataaaactcggaacgtacaaggccggaacgcattcaagtaggcggtaatgaacgtatcggaaggcagagagggctctctggtctgtatatatgaggaagaaattcagtcagcttccccttaaaaaatattgttgttgatgggtttgacaagagtggatagtgttttgaatacgtacctcaaggattgtctttgccttcttctcggaaagcttcttcaagatcttctccaagatttctccgctaggaaggtccttcttgtcagatgctctcttgggagggtttagcgcctcaagcaaggtgacggcagtgaagtctggccacatgaatatagtgacacagtttcaaatcagatttgaagtatggaaagggaaggaagagaaaagtccgagaacactaacctcgaacggcctcttcgtctcggtcaagagcctccagtgcgctcgctcgtcgtttgagagctttaagataacccttgtctagcttgagcgcagagtcacaatccttgatcacgttctcatgatcagggggagtcagcgagttgtaagctgagtgagtggtaagtaagaatgatcacgaggtgaacagaaaaggaagtatggatcaggtcagaagaaccgaagactacgatcgaggagggttggacaagtatggaagataacccaccggcagctcggttggagtagaaaacggccgactcctcatgagtagtcgcaatcgcccgagtgtaacagtcaatggcggcagcatagtctttcttggaaaacagggtatttcctctagtcttgagatgaccagccaaggtgtttcgctcctgttggttcggattcagcgaagttcaaacgaaaaaagaaacccaatccgatgtgatgatgtgagtggaggcgctcgacaaagatcgagaaatgagagagcaataaagaaaaaggacgaacctcgttggtcatggacgcgatatcattgctctgctcgacaatgtctaccaaacaaaaaagagagaatcgacttgagcatgtgtacgaaatggtgaggctcctctttgattatgctctctcttttgttatgaacagtttcttgccaccgatgaaagaggaagagccacacgggttgaacagagagaaagagtcgaccaaccatcggtctgttcctcaaccttcttctcctctgtcttgggaggaacaacctcctcgagaagaggtccatcgggatcgttcacactcttcttctttgactttttagatttcttcttcttgctaccactcttggtagtcgagctgtcgtcctcatcagacgcgcctttctcaagatcggatcccttcttcctcgaacctgcaggtgcgagataatagtagtaataagcggcagatccgaacaaggcaacagaggccgagatgagaacggccttcttgtgctccctaacgaaagcggaggatctgtcaagaattgaggccgaagcggccgaggtcgctgacgaagacgggtggatcaagtttgtcggcacggtgtgtggggcaggaggaggaacaggtccgaggttgtgaatgggacctagggaagacatgatcggagaagagatcggatttgtgtgagatgtgttctagttttcttgctgtctgtctgtctatctatctatctctgtaggaataggagagatgagagatgatgatgagaagagagtaaggttgaaatgagggagagaagaaaaaaaacgaccaggagatgacggatatcgtaaccatgtcatgggcacgcgtaacctctacaagtgattattacgtcaacaccttctcttctctgatcgttgcacccttgagagagtcactcagagatgcgctgtcatacaaactcgactctttggtgttcaacgtcgagacttgataacaagctggtcgtttgtgtttagtctgagctagatggataaattttgagataccggatatcaagttttctacttttgacattcgcagttcgatataatgaccatctcctctattcaatccttcctttgacagtcacatttcgacaaagctgcagaatatacttgaacattcttcttcgcttttgtctttttcttcttcttcttatggcactttagactcagttatgttgaacctaggttttttcttcgtcctctctacttttagcatctgatacactttagagataaatcatatgtcttcactagcttcccttccgcggcttcttacaaacagatccagtattcaattttgtctgtgtgtacacttacatcaccctgttcaacagtttggtatctctttcacaccgatttctgatttaatctgatcgtgtctcttgacgttatgtgtatcgaatgattccacttgtcaaacatcgattgccttgtccatgtatgatgcgcgcattccctctcccctttatcgtggatctattcatgcccgtctctggcgctgactgatagattagctacagtatctcctaaagacttacctccagtgccttctgatgatattcttaatgatatagagaacgatatgaaacctgatgaagatgtcgagacggtcgttgagggagttgagtcaatgttgttaacgcagtttggcaaggttctccttcatccttcgttctcttgtatgtcctttgtccttattttcgtgtcttctgcatgcttgggttagcttaagaaggcaatgttccatcgcgaagcaatgttggtttttgaaacacggcagaccagaagtcctacgatcttgtgcagcaatcagattttgctgaatggacaaacgagccaaggctgatgccgtcggtattgtattctttactagacatttcacactcaattattaaagctgcccgaagaaagacgtctgataggagatccttcagccaaaacagcaatctcaagatttatggttgtgatgtatttaaatatgagtgcatgtgttcaatctggtgaatctcattcgattcaaaggatcaatccgaagtgaatgctgaacggtcaggtgactgccccacctgtgctgtctcatacaaaatggccaagcccagaacacgcttgtcaacttactgcgccttactatctgccgtcagggcgcgtgtgaattgcgccaagccctgtttccttgggtacctcgtaccttttggaaacgtgcctctccagtggtgcctgtgccttgactctatgtccaggctgtctgacaccctcgcccgcctgcgtgcccgttatttctccgcccaacaagagtgtttggattttaaacccgctgaagtcgaaacaagaagagacaagatactggagagataaacccagctcgtctttccatcttttcgttctgacgaccaacattcagtctgatcatctgctttcgtgatacgtattcactcgctttcgacctatcaagattatgcgcacatatgccgggtatgttctatcgatcatccttacccttaccttggtggccacggtgagggcacaatcactcacaggcgaccagttctgcaacgatgtgagttctctgtagcacttgttctctcttttgcatccttgattacacagaacgcctgagtgtcttcttcactcgagagcgagtgactctggatgtagagaacaaaatcgctttgttagctaaggaacaattttgacataagaatccgtcctaactgctttattctggtttccttgtgaccgtatcttttcctcttccttctcacgctcttttctctttcactcttcaacaaatccaggtgatttgtgtggaggcgataaagagttcgacaaagacaacatgtaagatcagaactctacttgatctcgagcgcaaaggacgtgttctgtccgatttagctcgtcctcattttctgggtaattagatacactaaaacgatcgtctgacgccattaaggacgaggccggttttggatggattgctatgtgggtcaagccctgacgaaatcggtctgtttgatggtttgtactgatctgttgttgtgctcgccgtctcaaattatcttctcagtggatttggtaccacaatggcaaattctcccatggtgattgcagtacgtacaactacaacacatttcaatagcagattatctcctctcgctcaacagtgccctcatgcttgtactctctacgtccgctctccagtggccgaataccgaaacgaattcagtcacgatttcatctcgtcaagcaaactctcatgttcagccctctgtgcttcaatcgaccgacgccggattcatccagaccaacgcgacgctacagaggcagcagacaaaggtcaacggaagtgacaccgttatcgtgttttctgtcccagacactggcgaccgagacgtcagagacatcatctgggcctatgttcgtctctttttctcttctcttctgcttgttctttcgatctgacaagatctaagattcggtcatcacgtcctctaccacaacagagctcggtcaacccagactcgacgttaagctctgcttcgctcgcccaacacgacagcttcgataccgactcgttgaatctagcccaagtagtctctagcccaaccacttcgacggccagttcgacagaggccgttgcaacagctatcaaaggaaccggtcttcccgccagttagttcccttatgaatttatatcggtcttgattcatgaaaacgacgtcatgaatataaattgttaaacaattgtctattctgcatctttgatcgggacttttatcctctctttttctttgctcatagaaacaaccgcgtcacttacacctctctcctcgacaaaggcatcggcttcttcagttgccaatcgagtcaaacccttcaacaaacgacaaaaactattgatcacccatggtaccctcggtggagttgccatgatggtcttcgttcctcttggtgttgtcagtttcatcctctctttctgttttctcatgatcatagtctgcaaggctgagtcttcttgttccaatcctgtttcgttcctcttcaacagctcgttgccaggcttctgcgcgtgttttatccatggtggatccaggctcattggatcatccacattacgatgtctgcacctctgttgattgccgctatcgccatatcgatccacgtacgttcttcttctctccagttctgcgcggtatcgttggtcatttgcgcctaaccacatgatatctaaactttcgtcgctgtcgaccttcgtttcgattcagactacaacggtcaacattggcaatgatcatttcttctcgactcatcggcagttggggctcaccgtcttcattattttctggcttcagattattttgggagcctttgtgagtgtcttgcttcatgttctctacttgtgctcgactcgtttgctctaccctatcgtttccaaaaccaaccgttagcattaccatttattttcccttagattcattggcgtcaaccttcttctgccaaaaagattcgacgaaaatcgatatacaattggttccatccattcttgggagtgactatactcattctcggttgggccactgtctggaccgggttcggcgagtgggacgattacaacgttggtcggcatgttggttggggtgtcaaaggagcttgggtcgggctcgtggtggtatgaacttctctttttctttttctttttcttccttttcctttctgtggctttcaatattaacctcagaaagctttttccctcctgttagctgtttgcgctcgcttatctcatagggcttctccttctccgtcgccaattcaactcatccaatcttcgagccgggtcttctttacactcactcacgacacccatcacgatcagttctccaatccggtccgaatcatttcctttggacaaacatccatcaccgacttattctgcagaaagagtgggtggaaacacgtttgattcaaacgtttttccgtccacagataggattgttgatgagcacccaatgacggagcttcggataggtcaggctatttaatacacgttctccttctctcggtttcttctatttcctttttctcccttctcttcattttgatcgtttctcatttggtcatgttcaatttgcttgcgtacacgcatgtactatatcactggcttgcctacctcatcttctatctgccctctcagtttatccatccttgtcaactataaacgagggaaaaaactctatttttgactatcaacaactcatccaatcgtcaagttctttagtctacagctctttcgttcactccaagatcgagtgaacctctccggatcgtttgatctctttgtccacataatcaactatatttatctggtttcaatgtatctctggatacaatatgattgttgttccatcctatccgaacaagcttctgagcataacaatctaaactcttcgtgacgctttatgggcaaccatcgtttagaatgaacacaaccccagaaatgttgaatcatgttgaaggaccaactggccatatctattgtcgaaaacccatgtagatcctgttcctgcccctgcccttgtctatattatctcgatcgcgggtcccgactcaagcgtcgcctaataaaacatcccacatcaccccgcctaaagtggtcagcccatcatggggccggtctgctctgtccctagcttcaaccgtcatctctggagtgaacaagcccgttgatgatctagcatctatgatcttctgaacgatcgatggatgaaacttttaggtttgcaaggaagagaaaaagattaggggactgctcgtctttagaacccggatcgatccataaaaagaaagagaggattactgacttcgggatgaccctggaaccccaagatatggatcttttgttcctcttttcggttttcagacccggtctcggaatcattgaatttgacgaatccttggatgggacttcgctcggtcgagcctaggacctgaagatcgccagacggaggaagagcaggcgcataatccgagtgctgtcgtttgatgtataaaaggtgtagcacaaagtcagcttgtgtagatgcacgagttatgtaaaaaaaaatgagatagcgaaccatctgctgaatgttgactgttggagtcttgaacactttttgaccgagttcgttcagctgaacttcatacgttccgatctatgattgcgatgaacagatagaaagaaaagcacgcgatctgagttattttgcttcctacgtttctgcgacttcaatgttaaaaactgaagagagatgcagagaaaataaaaaaggaagtaaagaaaaagaatgttacctcccaaccggcaggattcttgacaacttttcctccataggccctagtgatcaactgcagtccgaagctggatggaaaaagggtgcccactcgaggagataggaccaattaataaaccattacctagctcatgatatcgcttaaaacccaagatcaagataaaggacgtaccagatcccgatgatcttgatatgagatgcttcgtctcctacttttttgatgaattcgaatgtaggtcgaacccatgggttttttttgtcatcgaaagagcaatgcgcttaaagataaggagacatttaaccccatcagcatgcgggcgcactcgggcttatgacatgaaaaccatgccataggaagactcgacatatgaaaagaaaagaaaaagaagaaccactcacccgacccagtgatcatcaaaccttcatatgctccctcttttccttgttcgaatgagtctatcgaaggaagtttaccctccgtgacttggtaaccgtccaaaacaagttcgatctcttcacctcttgctttggtcgcctgagcagccggaagggaagccaggagatgtgttctaaagatgtccaggtatgtcccatgagcttgacgaactgccgggatgggcgtgtcgcataagagaagcgcgatatgaatcttgcgaggcatcttctatcctgagctcggtcgttctcgtgtgtgttttgttgatagtttgagattacaccggatggacattaagcgtcaatgatttaggcttaccccgtccaaacctgacgtcatcctggggcacaacacgtggtagggttagcaactttaccccggacagaaaatcccaaatcgtacaaaaacgtcgactgtttcttcttttcttcttttctttttcccttctttcatcaccatctcaaaggactaatctcgactaccatcctcttatttgaaccactatgtccgactctaacgctaccaacattgagacccagaccggatccaagggttcgtcttctcttcttctttgaacaagctatctttcttcccatcgttcttgcgctcatctatcatttcctctttttttttttcctttcttaccttgactggtctcatcatctgtcgtcaccacaggcctcgaggccgctggaggaatcgagggagctctcgccaaggagagagagtaccgaggtgggtcttgttctacctcagcgcatcatcactctttccctcaagcagattgaatcaacaaggtcttgccatcgaggtaatcgctaactgacttcaacaaccttttgtacgataggtgacaagaaggaccaggagaacagtaagcctttgcttcacttgatattcaatacgaattttccttcaccgaatcaattcactcacctttctttctcatttttgtcgctgatacagccgatgaggagcatggaaagggagtcggcgccgccaactaaaggtgttccgtttccagcccatcggaccattctttcttctcttataaatagatacaccggagagttctagacctgtagcattatgcacaatgtatctattcatgcccgttcccgtacatcgcttatgttgagctcaaacggttggagatggcaaaaaaaaataagaaaaagaagaaagaagaaaataaagccagtcacttcgtcaaagagaagaaaattatatcgtagtagcacaagatgattcgacaactacatagagtctaccagacttttcaaagtctcttccgacaatatttcgaacccgttctccttcgtcaactgcagacgtatcatcaaccaaaggtgcatcgtgattgaagtaagagaaggagcacgtcagtcgtatactcaagaatactattggcaggacaaactcacctgagcgagctggacgttatgctcgttcaacttctcctccatcacctgcttcagaatcttgagcgtaagcagatgagcatcgttcaacgacatatcctgatgaaaacgatgacaacaatataagcagacacaacatatgaccattgattcccagttgtgttgtcagcttctgatgctcaaagcttcggggaagagaccagaagcataccttggtgtactggtcttgaagctcggcctgggcagcctccgaacctgagccgattgccttagcatcatgtcgcatgaatgttccagaaggatcggtgtgatagctgatggacaaaaggcaaggttcagagaaatgagcgctgagtatctaatctttcacaataaggaagaaggaaacatatgtgcgtacagctgcggtcctcgctcgtctactcctgcgattaggaaagccactccgaacggtcgagactgattcgatgagcaacaaaaccatcagtctttcatatcatatacattcacgatccacgagtgttaccacactctgaacggaaaaccgactcaccataagcgcatcatcgtcctctacactctctccaaatcgcatagctaaatcagaaatactctgggtgcaactctcgactccaatcggctcgtcgtacacaaacgcgtggttctgacttgtcactcgggcatgatcaatcatcgttcgggcatcagccgtaagtccggacatagcacaaccgatgtgcgaatcgatctccatgatcttttcaatcgaggacgattctagtagcttggaagacactcgcttctcgacacccaggactacaccatgaggcgtacgaatgccgaccgttgttgaaccaagctatagatgggggtgtagagtggtatgcttagtgataaaccgggtcaaaatgcaacaacacacaatctatgaggtaacgcaccttgatggcttccatagcgtactcgactgaacaattagatgaaccaagatcagaacacagagtttgtacagatggacattcttcgatcagccctggtcgacttaccttggaagagacgacctttgaattcatttcaaaaaagacttataggtaagcttgcttgatttcctattatttctatttcacaaatgaacaggcgaaagtcccgggcaagacaacaagtatacgaaccttcaggcgagaaagtgttgactcctcggtctgcaaagcatacagagaagcgatcacagacagggtatgagattagctagttgctccgtgactgcccatctttacacacgtacggagtaaaactccgagcatcaagtatgcagtcgtcacttaccatactctgaacgtgtggcaaacatgacttgtgagatgtaaaacagaaagtatgaaagatggttgttgctgatgaacgtcgagagttgatggttgtcgagacgtccacgtaccatctggctaccgtaaagtcacgttttctcagatatggttacgtaatttgatgcattacgtaaatcgatgtagaaataggaacagttatagaaacggaagactagctggtgtacatgatttctgtgaagagaccttgataataacgagaaagaagcgatgcagctatggaaggaaagggaaaccggagatgaaaacaggaggagagtgaatcgaagatgaaggactaaattagcttttagcggaaccttgaataaagcaggactttaatcattcttctcattgatgttttgtactgacgatcccagtgttccggatattgcatcacagatcaaacttttgcgttaacgactcaaaatgttcctacagagaggagaccgggaagggtatcttcagatttaccaagaatcataatagaatggcttggtgtcatctcgggtctgcttttgccgacaaagatgacgcgagcgcgacaatacgatgcagctctatcatcagaatcaggttgctcacatcagccaaggacccaatatttgtaagggaacgatgaacagaaaccaaccgcacaggctcattgcatctgaatggcctgagtttattgtgcttctactcttattggtcaagacgatgttaacgttcgaatgaagagttgctgtatcttcgaatatataatggtgaggttggctaatgattagaggctcaagaagatggttggtaggaacaaggcgtagataaagggtgagtcaacgtcaacagaacctgccattctgttctgtcctctccatgttgccctatacgtcgtactccttacactcgaaacagagaatatgtacatcaagagagcgcatctgccttcccttctgttgtgtctgtaggtacgaagagcggatgatggtaagagagaagatgatttgtgcgcattggttacaattgatttctctctccactgtaaccaaaagccgcctctgaccgatcccatcgactaagaaacacggtctacgcaaacagaacatacaatcacccagaagatctcaacatccggacgattcccatcgctgactgtatgacatgcgccctagttcgatcaataggtctacacaagcagtcaagaaacttcttgctccttcagcttcaaaactaacagaacatttacaagcatcccaaccggttctattacagaatataatcgatacctggccagctttagccacttggacgatcgaaaacaatctaggtcgattgcgaagcctggctgaaggatataatgtgccggtagagtggtctcagccaggaagagggtttttggacaaagggaagaagggaaagacgatgatgcctttaggtaagtgcttttcacttcttttcgcgcgcaacaacagtcgatcaaactgaacctgtactttctcttctgattttctaccttgggcggcttatgcgactggaaaaaatgggattgtttggtaaagaaagacctgtttcttgacgcattcattctcaaaaagattcctagacaaggtagcgatccagcgaacgacccagtgttctatctggcccaacacgatcttcttgcacaagtcagcatgttctttctctgtgttccacaaagccaaactaattcgtctgaacctacgccttctagatacccgacttaaaagatgacgctcctggcacgtttgtggacaggtacctcgacatcgataagaaggagttctggcgatccaacatctggatcggacctaagggaacctttactccgtttgtccccttgcattactcaaaaaactattgattgagtctttcgctaaatactcaacaatccatatttcttgcaggatacacaaggacccatagtaaatctctgttctcgcagtctgtgtgtttcgttcgactctagcttattcgattgctcgccaccagtcacaatttgttttgtcagattctaggatccaaaacgttccatctctaccctccgactactgaatcggcggccttgtatttgtcaccttttccgcaacatcaaacgtcttcgattccggtctcttcaagccacgttccatcagaggaataccccttgttcgaaggagctaggaagagagagatcgaggtggtgctcaagaagggagaagtcttgttcttgcccgagggatggtggcattcggtcgagggggagggagagggagaagaatgcgcaggtggtcgaatcagtctcaattactggttccgatgagactgaatgtcttaatcatgtttcgaattgaccagcctttaatcaatttgagaaccacccagaatcggaattatttcaattgaaccgcacattctgtgcgcattgtatgtgtatacataagtgtttgcaaatgcttaagtttcagatccgaatgatctttagaaaagaagagcagcgtatctatatagaagcagcatgggcatcaattgattgctcaaagagcatcgaaaagttgaaagtattcactcacccggcgatcatcgcaacaccaccgaggggagtgatggggcccaagaatcggaatctgagtagacggtcgatcgagtaaaatcggtcaatagtgcgaaaacaagacagaagacaacgcacacatatttcttttcccggtcaagtacaagaccaaagattgatccggagaacagaagggtgcctccggcgatgagtctaccggcccaagcatgataaccaaaccgagggtgaagagaaactgccatcaaggcaattccattgaggaactgcaacgatgaagtttgaatgaaatcagaagactgcccatcagcaaagggaaacttagtagatagagagcttacagcgtagtgagaagcggtctcccatgacttgatcaaatcaggagtgataccaactcgagccttcaggccgtgagcaccgaacgctccgcacatgataccagtaccagctgtaacatatagaacgagacgtgagccggacgaagcaatacagttgagatgactgtcgaagattagcactacggtgatctcatttcgtatcgaagtacaacatgtcttctgagaaaagagacaggctcaccaatagcggcgccggatcgccaaagcagctgaggagtaggagtaaactgtagagcgaaagaacgacaattagaacacacacaatactcaactgaatcccggttcaaaccacatctacccaccattcttttgtgatagtttgaaagaagacgaaattcggcagggtcgttcagaacggaagatatccgttgggcacaagcggaggtacgattacgtaacgcaaccatgtagcatgcgctcatgtccgaggagatcttagatcttgacaacttcctgaaccaaaccaccatagtcatggcttcagctcatcctatggcctcgttattcgaggtccacagcgttcgttaggtcgctcgttggattgagctgtttctcttattaggttcatggtattcgtgattgacaagtttcattggtttgatcatcttcccaactataggttctgtatggaggtataggagacgactctcacctcactcacataccttcatcggaggaaatcagacttgcagttgagcgttattacgagctagatgctggttagtcacgaacagaacatagctagcaccattcctttttgtatccccgtttctggaagacaagacaacaagcaccgccagtgtttccaatattggacgtttgcagaggaataactctagaccgagtttcagcccatacactcaacccatataacgtttgcgccttgtccacgtccctttgctgatccatgtgtttgaaatgatagtttatgaaaatcctatcttgtcattttattcaaaaccttcgataaccgacgcattccttctctcccggtttgtgtcctctttccgaggacctgcgctatcagtcctctatccgaccacttgggctcgagggaccatcaacatgatcaaatcaatatggggaagccaagaaaacaaaaacagccagtctgagcatgggtggaaagtggtgagcgtttggagtgagattggggacgtgaccgaatcagagagttttggtaggtttcatttctctctcacggtagccgataagattattctgattcaactcacgcttgatgtactcttcgtttagatggctttcatgtcggcattctcgatcacactcttcatatctccatacttccgtctctgtttccactcagaatctttggtcactccccacctctttccgatactaattcaagcgattcttcaccccaccctgaggtgctatctgtaaccgaagtattacctcactttgccggaccaggcaataaatctttgctacacatcaacctccgaattgtaacaatatttcagtttaatgataacggactgatatcatatcaccgagatcattgggacgtacgggacctcatcgaaggcatcatccctttttcaggattagcagggtccatcggtcgttatctcggaggacttgctcttaggggactcggaactttagcaggaggttgcggagaaggtgtcagaggaccaaggcctgctcctacagctctgaaaactggagaagatccagacgagacaaccccggtcaatacttcaccctcgaaagaggaacgttccgaaggattccctgcgttcggggaatcttctgttataccctcgaccttctcatcttctcccactacacctatcatctacatgcgccctctgtcatccgtctctagcagatcgtccgggcatcatcacaggacgcattcaaagtcttggggatcgggcagcagcatccatcttttctcacccatccgatcggctcagccgcttttcaatccgtccgattctcctataggtgcattaggactgatgggacaagggtctagggggtcttggcagcaaactggagggctagagatggcccctgatcatgataattgatttgccttcattctcctacactctccttagattcctatgtatcggtctttccttgtactttgtattttcttgttcctttttatagattttttgtcatttcctcacatcttctcgtgtccagatactgtgtttcacctgttccgaactcagtttttcctacagtacatatatttctgttcatatcccagtctttactcttgatctgaaagcttcagacagactactgtctcgttcattgtatggacatgtttgatgtattccatcgagcggcatattactgagagaaggataacacatatgcacacgattgatgaaggcacaagacgttcagctcagacatacaacatagctctgagctaagtatatagcaggcggcggtgatatcatttctggaccagcacgcacttggaatttcaacccgggttgttttgatcattgtcgattttgagaagaaagtagttaatcgggcatttccttactttcttctcagcgcatcctgaatccgagcgcttcgttcagcagaagaagacaatgtggaagtccggttcacgtgctcgatcaggtggtgatatgggtcatttctgcgcgatctggtggaagatatctgtccatagagatacccgtttccaagcaatttggcataaaagatgagtcgacttgttgaaacttacgcacaacaccggtctgtacgtaccgtatttggagccctgtttaaaccccacaggttgagacaacgcagctcgtttgtggacgtcctttgtaagggcgtgtatgtcactcttgtcgatttcttgggtttccaagggctagacacgctaattcttgctgcttttggtttcagtttgagtgttgatggggccggtatgtccttagtaagatcatcggcagttgagacaattactgtctggtctggtactcgttcggtcacaaaacgtatatcctcatccagggctgttggtcctagcctcaaacggcaactgatctttgagaggaaaccagaggcagaatgtagttgttcagatacgactgaagtgatctgaggaaacgaagtttccagtttgtcaaactcggccaccatttcttgagcctgattaagaaaggaataaccattgagttgagcagagttcaaaagattgtgaacagaacgagaacgtacagatgaagacttgactgctttattttctccagccgtcgagtaaggtattccgtgtgctttatctaaagccatctcaactaaggctggatctaacaaattactttcaccctttgaatgtgttgttccatccatttcaaaccattgtcgaatcaagtcatcccactcagatattctgtcatcaagtgcggcccgcaagtcttctgaagaagttttccttatcttgggctcggagacatcgggcttggccatcaaggcctgacagtaacacggcttgtatgagtatgcccctctctacttcaagatctgaattcatttagagatacacacctgaatctccaacagggtttctcgacgttcttccaaacgtttgatcctttccaatggttccttttgaagtgtatggatctcattcatagctgtctttaagttcctgaacagatttgttatgcgctgctgaatgaagaggaatatcaacaagctgatctgtactttatcgagaattggtgagagctacctccgcctggcccttgcaagaaaggtttggagcacctgtgttcctcatggataaagaggtcaatccacaaggaaacatatacatatcaacatgcagactcacaactagcaaatagttccggtcttgattgaagagtcttcaaaatatcccaatagaccgtctgacaggctagcgcaagaaggatctggtcaaatctgaattacagcgcataacaacattcaaagcatacaatgttgttcaggatacgcaataggttgcagatcaaacgagctttgcgtagaacataccttggcccagcagcctcgctcagatcgctcttcctgatacctactttcaattctaaccaccaggacttgtcgagtccattcgaactgatgatttccctccggagctctgtcagatagccggctgctattcccacgaaagatttctcttgagatggtgttgggtactcgtgcggactcaatggcctaagcttcggacatatttgatggagaggactatccgggctactcaaatgaatagatagagcacggagaatcacatcccgagttttttgtcttgatacagcaggcgtctgggggtgaataggcaggcataacgaggcgagaggttggggaattgctagtagtgaaagaagggagaccaaaagggtcgtgcttggcgttgaagacatgttctagtgtccaagattatctctgcaaacctaatctgatcaacgagggttcccgagacaaaacagatcgatatcaatatctagtcggctgtatatgtgttgaataatctgatggaatcaggtctgaaagccgaagtgatcgtggttagagaaacaattgtttttggtcgtccttgttgacattcacggccttacccgaaggtatttcatcatcactttcgacccagttggttgtcgttctttccactggatcctcaatttggtacccaaagaatttctatttgctattataaaaatcatcgtaaggctcaggacccatatacaagtgaaggtttattttgtttgagaaagggataacaaaaagtcgatgaaagaataaaggtctttgcgttgaataaagagctagagaacaagataaaaagaagagaggaggggtatttgttcgtccgcgctaggagaatatctaatccgccatataagccaacaccctgttttgttttatttcaattcgaaaaactttgattgggttatcaatctaagcgtctatgaaagtgagctgggacgtggaggaagacctcttcctgaggttagaatcgagaatcttctttcgaagtcggacagactttttgagacgaaatagtgaagaaagagaatgcagtgagtttcagttattatttaggggaagtcaagtgcaggagtgaaaggcttaccttgggcgtgatttcaatcagctcatcttcgtcacagtaagatatgcactcctccaaggtctgtatgagaaggaaccaacaagtcgaggtcagcttgagagaggatatcaatttttaatcttgagccagatgcctatgaccaaccatggttcgggcaggagcaacgaagattccgtcatcctttccagctgctcggaaattagtgaggctgaaaagataggaagatcacatttcagcgaggttaaatcaaaacgagataagcacatgagtccgacttacgccttagtcttggtaacattgatctcaatgttctcggccttgttgctctctccaatgaccataccggtataaactagatttgcgatgtttgatcaatcatccgttagtctcaatgctcctagtcaacatattcagtgaacgtcatatcacgtacgggcctgtccaggagagacaaacatcactcctcgagcctgcaaaggctggatggcataagcagttgcttctccagtcacgctagagatcaagcatccctttcgggaggtgttgatctcacccttgaaaggttcgtaagccttgaaaatatggttgagggttctgtatcccatttgaagtagagtagcagaagggaacttgagtcaagcgcaacgagatgctggcccaatagaatatgaaatgaacgtacccttgtccgtggacatcgttgttaaactctcccgagacatatccgaggagcccccgagcgggaacctccatcacaaccctgaccttgccatcctcctcatcatactggagaatctcagccctacacatcaatgaaaggaagacagtaatacacaaacaaatacgatgagtcaacaacacttgttatgtggtaggcagtgatgtataaacgttgcttactttcgcttggtcatcttctcgatcacggttccgatgtaatctgtgacggagatagttgatggaagatagaaaatcgaaacagttttagaacgacccagatacaacaccacgcctgttcaaaaaacttcagcagagacaaatgcagaaaagggatcaagacgcactgctgtcaacattgatggtgacctcctctatcggctccagaaccttctttgtttccggatctctcttcaacacgggcctaggaggcgaaacagcgatttcgaagccctctcgtcgaagagtctccaaaagaatacccagatgcaatacacctcgacctctgatctccagagattccgattgagggttatcaatgaccttgagagcgacgttagtttcggcctctttgagaagtcggtccttgatcacagccgaggtcaactttgttccttctttaccggcaaaaggagagtcgttggcagaaatgaacatcgagatcgtgggaggatccagaggagtagactagcggtcagaaaaatgtaaatgtgataaccgtttagatatatgtatccgcagaacttagtgcgcgacaagattaagactattggaaacttacaggcaatggagccatgtccgggtcgtcttcagcacagatcgtcacgttgacacctccgcctaatactccggccacactgatgatctctcctgctccagctcgttcgaccggtaccttctccaacccagttctaccgaagatctttgtgcactttccttcaccgactttctttccttccggatcaagcgccacgagcttttgaccaatcgaaatgcttccagactcgattcgaccaaggtataacgctccgacgtacggatccgagtcaatttgagtggtgagcattcggaaaggcttagatctgtcgagccgcaccggcgcaggaacctcagcgagaatcaggtcgaacaaagcaaccatgtcctctgcaggcgcgacgtttgtcatctcttgttcggcagtcggtttggcaggaggagaaagtgaggcccatccttgtttggcagaagcatagatgactgtttaagagtgaaaaccatagaccgtcatcagcatcaatttcaaagcggttggcacatgataaaatatgagaaacttactcgggtactcctagatcgacgtaacatgataatcccagactgttcagaagctgtgacatttatcaaaaggttggcaaaagaaggagaatacgaaccatctgatcgtccgaagctccgagggctccgaaaaggtccaaaatgtcggaatcaacctgctcgggtcgagcggtagacctatcggccttgttcatcacgacaataggcctttataagaagattaacgcaaacgggaaagcgcgcgcgtattcagtaatcattcaaagctcgtgcgggacgaaagacgagaacagatgatgcgctcacttcaaaccggccttgagagcctttcctaggacgaatcgagtctgggtggaaggaccttcggtagcgtcgacaactagcagaacaccatcgaccatggacaagactcgctcgacttctcctccgaaatcagcgtgacccggggtgtccacaatgctgttgacagataatgagacaggctagtttagcaaaggcttcatgagcaaaaactcaaatgaaaaactagaaggcgcacttgatgaggtgaccgttgtagttcacagaggtacacttggagagaatggtaatacctagcagaatgagtgacgagatatgaatgcgttcagtgaaatttcggttggctatcagatcaatgtacaaagaataaaactatacctcgctccttctcgagatcgttagagtccatagctctggtaacgaatccagagtccatagcgtatccattgtcgggtccacctgccgcaagggtatcattgctcaactttttgatggttcccgactgtcgaagaagctgatcgaccagggtagtctatgattgtgagatattatatatgggtagaatacatcggaatacacattgaagaaggaggaaaaacatccgcaaagcacaacaacataaagagtgtgaaaacaagccaatgagcacgattcggttttaacgaacatgaactatatcggatagaacggaagctcacctttccgtgatcgacgtgagcgatgacggcaagtgttcggatatgtgacaaatcaatgaaaccatcctcgttcacaagcggagttgaaggagcgatagaagcctgggccggtgtagatcgactgaaggatcgttttgagtgaaggccaaacgatcggggaaccacagagagagtggtcgaccgaaggccagatttagaggaagacgaaagcgcacgagccggaaagatggttcggctagttgcgggcctcgcggaagcggcggtcagccgaggaacagacgaccttgctgacctgagaagggagagggacgaagccatttggaggcgagaaggatgagcgacggcggtgagcttggatggttggacgcaaaagaaagaaggaaagtaaaaggatgggaacgcaaaaagcggagggcgggtgtaaccgcatggcatagcttttggtcacgtgttgcatacgccacaactacacgtagttacatgtatcctgcttcttctccttctctctttttggtcgactggctgagaccttgccttcatcatatctctctttggctcttaactcaccctcagtagatcaagcaggactgccagtcacagaacgaccaacgccgtcactaacaccactttgaatatcaacaaatcacaatgggaggacctgctgttaaaggagctatcggagatggccgtgttcgaggtcaatttttccttcctttccatcctcttcctagtctcaagaggaaagactgatgtttggcttttaacgtgtatacgtttttgtggacacagtcacctacaatgatatccgttcgtcgtgtctttctcttagtattgtctcttttcttttttgtaacagagaattctgatccacgtctctgttcccgtcgtacagatatccttatcggaaatgctggtaattttcgatttttttgtctcgtccgttttggtcggagctcatccgggcttttgtcgctttgcttttttcgggttgcatttgttaatctcagccgaaagagtcaagaaggacttgtaagagcgatccttgttatcatcttttgtacctatggctctctgaggttcttaaccacattcttcacccgtcctctctatcttcaattatcttatctcaatgcggtgatcaaaaaacagcaaccctgatgtcatgattgctatcggaggaggaggtttcttgtaagctttgatttttcttgcaattcttgttgattacaatcgtcgacaagtgttgacatcagctctgtgatattcagccctgctcgagtgatgcgaacgttcctcaagtgcagcacccgaaagaccaacatccctatccgtatgttgaattgagataaacatcatcaaaacgtatattttctctcccacatgcgcttatttctcgtttgctctatcgtaaatttctacaaacagaggctattggtctctccttgtacgagagcttgccctcaactactgctgagcagcttggagtaagtcgctttccaaagtagcatatcgacatatcatccttctcaagcattgatctctatgtgttcacctgcttgaacatgtacagacagaagtcgttcgaactcagtggttggacttctccacccttggagccgctggagcttcaggtcttttgggcaagaagatcttggttgttgatgagtacgtataagcgcatcacaagacatgaacgccgataggagaacgaagtaaaaaagagctgacagaacccaatgtctttcaaaccacttttcattgtccttcatgaatgcagagtcgatgacagccgaactaccctcaggtagggcctacttttgtttccttcttttttgttcttccgactgacagcaaacaatatgccttttccttctcttccttcatataaaattatctcggcctatagctacgctatcactgagctccagaaggatatcgccaagttggaggctcagttaacagatgagcagcgcaaggtcaccccccctacccagctcggaatctttgttgtccacaacaagtgagaatcttttttcttagtttgtcccctttcttgcatgtttgaacaacgactgatgctttctttatgtttttcacccgcacccggaacacttgaaatgaataggttgaagaccaaagcagccgagatccccggtgacgtcgcctacttttcgggtgcagatatcgaggaccactggatcgagtacccttgggagatgcctgatatcaaggatcacgaccgtacgtttcgtctctattccttattgtaggcttctccccttgaagaggctttgtcgctgtcgctgctgctgacgacaagttttgttgacttttcttcatcctcggacatctttaggattggcttacggagagcctacgcgtgtggaacgtacgtccctcctttctctactcgctctgtcctcttctggagggaaggcataactgattttttgtgattatggtggcatccgaaaacgttttcttctttctaaacaaaacacacagctaccgccacatacttcggagacgcctaaaaaattcctttttcacattcggatgttcatgtctatgccggtttatctttttcatcctgttactatatgatgctttggtcttcttttcagtaaatggacatagttcatcttagggagtaaaaagacgagagctagatatagaacataggcgaggaagagaatggtgtagattatacaacgagagaagatttgaagaagaaagaccaaagcgttttgttttgttgttttcgcccaagggggatgagcaaggaattcaaacctttctcaagctgtctgctctggagacggaagatggatcgaagaacggacgttctccaacggagatgactctatcgcctgatcgtccggtgaatccatagtcgtttgtctgtggatgattaagaattttagagaatgaaggggtcgaagatgtcagccatcgagcatctgacggaacagctgatactcaaaagagaacaacgatagaccacgtacagcacagtggaaggtcgatcggttatcccagagagcgatggcgttctgagaccatttgaatctcacttggagatcatggttcaacgtgatatgatggtgtaagtaagacagtaagttttctgactcgtctactgtgagttcattgatcctctttgtgaagctggtttgacgtatgcgcacaatggtcccaaggagaagaggaaataacgtgtcaataagaaggaacggcagaagtgataccagccccaaaacaaatcgaagaacgaacgctttgttcacgaagagtccacgccaaccggtcacagggttcgttctgatcaccgggtggacggcctccaggatttggcccttgttctctgggtgacctcttggttccgcaaacgtcagtccttctcggctggctttctccaggaatggtgaaccgatgtgagtggccgtcaggccagagaggaaggtttggaacgctggggaaagtcgatcgtaggcttcgtaagctgatgcccagacctagatcacgcagagctgtcagttttcttcttgtcgcgcaggataccaagatttaaaaaaaatacaaggatgagaacgaacagtgtctccaccggtagtgggaaggacgttgagtttgaggatggcatagtctgatggatggggctcgaacgtgatatccgagtgctgtatgtcaagtcaattccaaatatgatcaaaccatgtcagtcctcgttctctttcagaggagaaagatgaatgatgacaaatcgaaaagatgtgacttacccataagtttgatgctcgtgtgctcttcacataagcatcccttgtggctccgttgaattcttttcagagacagacatgatgacacatgggtatacaaaacaagataagcagcgaattgatttaagaatagagcgatgtcaaagaaaacataccaggagtgatcttaaagatctcgccgagctcatctgtacccgccagcggatgaacgtgattgccactctcggctggtctacctgtccctttacccattctcgccaccagctcattctgctcagtaggtgagatatcttggtctcttaagaacacgactcctcgttccgaaacaaggatggcgagatctcggatggctcgggcagactcttcggagggaagggagaggagatctcggagctggagagaagagatctcggtaccaatgctcggagtcaagtcgaccgaagggtaggcagagagagcctggctagagttcaggcgcgatggctgagaagaggatgggtttgcgactggcatggtgtgtatttgtgagtatgtatctgtgagtatgtatctgtgagtatatatttgtgagtgtgtgcgagagtatgggtatatggttaatggtacagaagaagacagaagagacgaaaaggctcgaccatcatctatatttatcgaccatgaccgatggcgacttgattgtgtcaaattgagcgttcaaggtcaacatgaaggtgatcgggacggatcgagccgtgtggcgttttctccgaggctgtacagcttttaactaggcaagccatcagagtcacttctttggcaatcattatatctgatgtttctgcctcggcgatgcgaccttgatgagaaatgtggtgctcgtatgtttttagttggaaaggagatctaggctgtgaatgagattctatctcatcattctagtgacaagagtcacaaggcgctcctcgtaggctgaatccacggattgtgctgtaggcaattgttgcgcccacgtcccgagaggatcacctgcattgtgtgattagatacgttcacgctttcgtcagatcgcctttgcgttgagagacggagatcataaggatgagcgatctttgatccattcatttgtaggtagctctcttcggagagctcttggctcttggctctgggatgacgcgtgcgtgtatatacatatgtcatccctccgactcagcccagagtgaagagagatagacagatatcggtcgctttagatcttacatcgttgttatcgacatcagccttgctatctgaccaaggagtctgactcgaacgatcttccggtatatcaatctactcatgtctgactaaattagaccgcgttttcatccagatccatgacatttctctagattaaagattacattgaaggggctttgcgtagttgccactcgagaccgttggaattcatttgtatgcgagcacttgacaacgcagcatcctcgtaaatgtatatcttgcgtctgctgtatatgagcattcgtacgcataccacggatcgatacatccgtcttttcaaccttccaggtcatattatagccaatggcagacagccttcctcgaccgtgtcagacatgacctcaaacaagtccaactgaactgtatgcggactcgaatactctactcggaggggcaccattcttatttacttatctggcatgccttccagtcatgcttcatagtctcggttttccaaacctacatcgaacactaccatcaattgattctaaagattctcttgaatcgagcatatgaacattcggtgtgacctcaaagattcacgaacccaccaagataacaagttcgaacgacaccaattagctgcaatttaatggcattcagcgctctcgagttttagggttgatcatgacgtaatcaatcacgtggagctcctcatgatgccagatggcgtgtcctgttccttcctgcaaacgagtcgaacgaggccggggacatgacgatcgtccgggtgcattctcaccttcgaccgggttttatttgatgtccagatagccaagcccaatacaaattgaagagacaagaaaaagaagcataagtcaaagacggcatcgaaccatcaagcttcgattacagctcccgttccagtcccagttccttcaccacaacatccaccctcatactcccgtgttttgttctccgatatgacagactacaaggatccgagcaggctaaacgctcccgctcaagacccaatcgccggaatgggattcggaaaggagccaaagagagatac

SEQ ID NO: 2300 - DNA, 3021 bp, Xanthophyllomyces dendrorhous
tcacagagtatatcgtcctggccgtacgttcgaatacatccaatccttctcttgttcatccatgtagagtcagaatgaatgtctgacggtatcaccacatactcctatacagatcttgggtcagtctaccgtctctcatatctagaaagaagcacagaagaacgagaaggacgctagctcgagaaaagttgctgggaagggaaagggaacattgaacaaagcaaaaaaaaaaagatcaaacactcaaacgaaacctatctatctgcgtccttctctcttttgtatgcacccgctcgcttgttatgcaaccttagctttcccatacagtttccaggtcttaggtatggcaggcggtgtcatctcgacgtaattatcctcttcctcctgatattcttcttgttcccgtatatgaacaatcttgttaatctcggacgatattactctcaactttgaactatagtttgatcgtcggtttgttcactctattcacgagccatactctctggcagtattgcttgctgttagtccttcagtcttgctctttctgtaagtcttgtctcgatcgacattgacactcacccttctctcttgtctaatagacacccacaaatccgggatatcgccgatgccgcttattgggtcagcacttctatctctatcgcgaccttctctgatccatggctgacgctttatccatggttcgaaaactcttgctaactagatctttggagaaaagagaatatggtggtatattggtttcacagggttggcttttgtaagtttctatctttctttgccatgcgcacagaatggtatgtcagttctccgtattcgttgtactgacaatcaaaagcaaattgattggcttccggaacaaagaacaacatcttcatcatgggtctccactgcaacgcaggtgctaccgccatcaacgtgagtccatatgaatcttcgttcaatctcaagcgactctcatgctgacagaacgtcaaattgacaccttctcttgtttctcgttatgatccatcctccttatctggaatatagacgttgagacccacgatttgcacttctctgtgggcattcattctgacgatctttatgtgggctggctcgttgatccgagacctgaggcataccaccatccttggtattgtacgttttacttgccttcaatcatttctttcttcgtaagggactgcttcacttcgtctttacttacacaacttacacatctttgctatcgggattcttgatttatgctgcccatgttaggtttcggccggaaccatgttcgtctgcttccttgtcgttgtcatcggtcacggtgtgcagggtacacccaacggatacgtgcctgctacagcgacgacgcctgcaaccgatctcagctggacggtttgggcgccagaaggaacgacgtttgtacagggcgttagcgctgtcagtttttttgccctaatatctgaatttcaagtgggacgaagactgaacttctcacttctccttgtccgaacttattaatggacatcagctattgaacatcgtttacacattcgtcggtcaagccctcattccctcttttgtaagtttaattcgctctggtgtaatctgaagcccacatgatctcatcgacttttcaaaaacgggctgtcctgggtgacaggttggagatatggctcgacccgaggactttggaaaagcgctctacctgtccatggcagctgagcttctacttttcaccatcaccggagctgtcgtttactgtgagcctatcgtcattcatcttcgctcgattatatctacggtattaattaagtaccataattttcagcttataccggtacccaattgaccaccgctcctgcatacggatctcttagtcagtcaaaacatgatctgatagggctccggggcttgccactaacagtttgtctattggggattgtgttgacagtcaagagatttggtaagcctgccgccgcgctcactttgcccacgatcatcatcgttggaatcttgtcagtatctttccattgcatttgaatctcatcttgcaagtcaggtatccgctgaatttctcttgcacatttgttggttgaccatatccgtctatttcaattttgacaaatcaggtactccctcgtcacctctcgcgcaatcttcttccagatcttcccagaacactccgtccaccgacggacacacaccaagaaaggttggatcgtctgggtgtcgattgtgacggtcatctggatcatcgcctacatcatcggagcttctgtcccattcttctcggacttgctctctttaatctcgtccttgttcgactcttggttcggtttcatcttttggtcgttcgcgttcaagagcatgtacaaaagatccggttactttacctctacctggagaacatgtcaaacagtattgcacatcatttctttggtggctggtctattcttctttggtgagtcacgaataatcctttccctttccggtcatccctgcctcgactggttgtttcgaccaatcttgaagagagcgaccttccttcttctactacaatacttgtttatggactgactggaaccgatttgtgaaacctgaaatataaaggcgcgggaacatacgctgctgcaaaatctattcaaatctcatacagcacaggggccgtcagtgagtattgtctcactatctctctcacagttccctatttggtttctctccgaagatgatcgactgactgtgtccgatggacataatctggtgcggtggttgttattagaaacgcctttcacatgtaccaacactggattcctgtacgtccttccttcctctttctgcttttcgttatcggctgtatcttctctgaaaccaaactaacaaacggactgtatcttatgtgactttacaggttcactcgttaatgaattcttggggttttcctttttcctttctcacttagatcatgaaatcgttttttttttaaaatttttataatagataagccataaactcagt

SEQ ID NO: 2301 - DNA, 59759 bp, Xanthophyllomyces dendrorhous
gccataaactcagtaccacgtgtccatgtttcatccctttcattccaatctcgttcttcttgctcgttttgttcaatcttatccatcaactcgttcaaatttaggccttattgtttctctccttcgaatgtacacaaggtttcgtcgtcttgcgcgcttgtttatctactatgtcatatctagctgattatgcgttgtcgaggaaaagaagacttgttcctcacgaaagaaagaaggaaaggcaaacccatcaatgaccagtacactgagattcgtagagtatagagttcacaacacatcgatcaataacctcgaaagaaatacagtagaatgagggtaagaaaaacaaacacgataaaccagacgagtgtcaaagatctaatggacacccccccggtgcgcatgtcaaaaaagaaaaaagaaaaaaaaagaggtggaaatcacatttcccagctctcttcttctcctccaagagaattctttatcatcttacagacaacagtatccaccatcgatgatgatgtccgttcctgtcacgtaagaagaggcggacgaggccaagaagatgtagacacccttcatctctctggtatcactatctcttcccatcggggtcttttcgtaccactgacgaccgaacagtcagaaccccaccagaactatcgtcaggtcggtgctttcgatttggaaactcaaaggcgatcgaactcacgacaggcttcatggcgtcgtaatcaccactcgcaggggtattgatgtacccaggtgagatggagttgacccttgatggataaaagaccaggggttagtacatgatttgtttctcagcttctggtcagatgaagagagtgcataacaagattcccgggtagactctattcacttacctcacgttgaacgcagaatattcaacagccagggatctcacaagatgaatacatccggccttggcggcgttgtagatcgactgggactgggggacgttcacaatatgcccagacatcgaggcggtcacaatgatgttcccttcaatcttgttctccttgaagtactgtccggcgatctggcactggaagaatactccatcaaggttgctgaaggggcccatagaagagagaaagtggcatcgattacgattaacatccggatacaaagagagaggaagttcaagccgagagatgggaaaaagaaacttacacatccatgatgtctcggtactgcttagggctcatcacgagcgctatgagtaaatcgatacatatcggttggaaacaattcaaagatcaatatgctgcatcgaccagtttgaacatagctctttagtgaacacaccaggagtagtctgctgaacaccactgttggcgacgacgatatcgtactgtccaaagtctttggcgatcttggcaaaggtttctttgatcgaatcatagtctccgacgttgcactctgcaagttcaagggcaaaggaagacaacagtcagtcacatcggatcgatcggacgatatgaagaggataaagggacggactgtaagcttcgacacggacgccatactcctcagagatttctttggccctgtcgatggccgagggagaagagttgtagatgatggcctatgataagaggtcgaagggaaaaaaagttcagtcatgactactaaatacatcggatcaaagcaagaaggatcaagttcactactcacaacgttggcgcccgactcggcatatccctgcgagacggctagtccgataccagatctggagaatgaggagttacagatgctatcagctcagaagcacctgcgctgtagaacttaaaccctgatccgaggacaggtgatgcttagagatgaacataccctcctccagagatgatggcggtcttgcccttgagggagaaaagatccttgacagagtatgactggacaggatcgggctttcgtctacgatcggaaggagcgaccacggaaagagatgatcatcagaggtcaagaccaaatgagatgctagttggtgatgagtacctactggtaatcggatgtagttcggtcagtcatgttagatgttttgctcagataggttgaaggtgaacagaaaagatgtatgtggtagatagatggaaggagaaaagagaagagaagagagtccgatacagaacgtcatgtttatatagaatcttcagcccatcacttgttctcgtcatccctagcgctacgcgtttcccctccggcaaccctcgggataacatcgccaagcggaggctttctcgacgcttgacagtcaggcgaaagacgggtgacagtcaaagaaatagaaccgagtgaagatggaaggtgagcagaagagagtcaagaacagtcgtttgggaggggccccagatggacgatcacccggctcgtcggcatgtccactcggtccccaactcattgccagctcttcatctactcaattgaggaaaaggaaagtacatcaagacaagattacatgttgatgagtagcagtgcattctagtgtttcatagatgatggtcagagtgtgcttggaaagagcagaagtcgatgtctaaagcggcaaaagattgaagagttgcgttgtgttcaaagaagatacacaacacgttcattaaatacgatgacgacgtcaatgacaaacacggaagtcatgtccatgatcacagtcaaagcagagagatatacgccaacgttatcagacagagatgacgggtagcacaattatcattccatggtgttgaggtgcacgtcggagatagacattaaaaaggatacaactggttgatacagaatacaactcgagttgatggaagcaagaaacacgcgtgtgtgtgtgtgaagataagaggcaatacagatatagaacacgacgggaagtgaaacgatatcggatcgtacgtatgatagaaccgcgccatccggttccaacgacgagattgaaagagagttgtatagaaagaagatggaacatgggcatcgagggcatcgcttgaggtaagataagcacttacacctcactccatccgccgtcgctagactcatcctcggctccgaacggatcatccgtttcgaaacctatactcccactcacacttccaatcccgctcgatagagagcctgacctggaaagcacatgtctcgatatgtctgacacggacgacaacatgtcggatgaagtggtcattccagacggagaagacggccgtttaggcgtttgaggatcagtaggtgtcaaacactgactgggcgggtcagaagtagccggcgtgaagaaagtcggatcaggggtgagagcggggatggacatcagttcgtttgagggcgtgcggatagaagaaacaggcaagagtggtggcagatcaatccggtcggcatagtcaaacaaagtctacgctgccgacgtatcagccgaacgagctgacgatccaagacaagactttcataagaaagaacccactctagtggtatccttcgctcttctgtgtctcaacagcccgctctcactctcgatgggttccctgctgtgcattaagcctatattcatcgagcgatcgtcccatgttccactggacatcatatcgatgtcgagagaggatgtttgtgcccattcggctggctgcgcacgaactggctgtcttctgttctgtcttcgggtctcaagaacgccatagagccatgtctcgagcctgtccgctaggtctgccgatcaggtcgtgagtatcaatccggtcatcgaacactgcacacagaacgctggacagacacccacaaggttcatacacaaacgcataagccagccccgagagggctgcgacagagagaaagatagggactactggaggcatatcttgctcgatgcagtcagtgtgtcagtgcgtgtgagtaagtgagtgggtgtgagtgagtgtatgcgtgtgctgaggagacgatgggaggttgggccggacacaaaagctgtacgtcacgtgaaatagatttactcacgtgacaatcacgtgagcgctcagcccgccggccgagtctttgcccgaagcccgatcaaccgtcgtccgctcaatgtttaaatcaaggccaagacgaagaagagcaagaagagcaagaagagtaagaaggaagaggaagaacaagtagatcactcgctctcagtatcgttctctgctagctgcatacatatcatacaacacccaaacctcgaccatgaccagcgatagtatcacagagacagacaccgccgtccttcctcggatcgatctcgacctatttcgggcagatccgacttcgccagctgctctggcagaatgcgaaaaggtatgcacatctctttccttctgtcgtctggtatacaagacagttgaaactgatctgattatccaatatgattccgttctgatcaacaggcagctttagctcttcagacttttggcgctctggtcttgagcacgtcgacggtttccgatgattcaaacaccgaattcttggacttgttcgaaggtgagttgagatcagacttggtcttttacacgtcggtcaatcagtgcactgagctcgataagagagttttcatcaaacagactactttgctcagccggacgaactactgaaaaaggatgaacgaccccagtatggcttccaagtaggaaccgtaagtttcctcggacgtgctttgtctacttttgtaattcttgggtcttactaacgtttgctctttcattggttcttagactctgtccaacactgaaaaggtagatcgactctcaaacctccttcgagattcatttctcttcagactgacaaacttgctgttatcgttgtcagccaaaatgtcatagtaatgatgaatgtcagagcgtgatcagcaatctcgatccggctgaaagaccgctggatttgactgcttccttcgcagacccgaaatgcagagttcgtaaatgcagtccaaattttaaacgtatcgaaatttccttatgatgttgactacttgcatatcttatgctctatacttattcaaatagttcttctaccgaatggctcaaattcctccttatcagtcaaaattctctaccgctgccatgctcaatgtagttcctcaaggatttgaagatatatggatcgacaagtgtgaagcatacggaagcctcgtaagtgcttctgaatatgtgttcatcactgccttctgtgctcacccgggtctcattctttgtcttgggacatagctcaagagtgccgtcgaaggattggcagagatgtctgcaattgggtttggacttgataaaagcattttccttggtgcgccttccaatggtcaatatagagttataagacagatgactgacgtatctgcgttggttcttttcttgtgcaacacacaccgttagatgctgggaaatacgggcaagtatctcttgatttcgctatgttgtgggaacgtctatcaactgatcttaacttatgttccctctttagacctcatctccttgctccaactgcaaccgatctggtcaagtatggccaactaggggccatctttgccggctttcatacggtaggtgtgatcctcatatgactttggcattcttcgatccgacctgttgatgaatttctaaataccaatgggctcaggatctcaattttttgacaattcatggtccttcgagatatccggtgagctttgattccaacctccttcgttgttttctcgaagcacgtcctctcataaacaaacactgaatgttgctttcaacagggcctgcatatttgggcacggaacaccggaaagagaatcgtcgcaaaggtgcccaaaggttgtctttgtaggttctgatgttttacatatctttccgttcctacgttctttcgttcttgcgaccgtagcttgatagtcgtcgttctggtgcactcaaagtggttcaagccgggaaacagttggagatcgtgaccggaggacttgtcagagctggcttccatgaagttatctacaacgaacggactcacgctgtgcgtcattgttctttgtcactgatgagtgcaattctcaaacgcgactgactcttcaccaatttcgaaattcgtttatcgacaccctaggcggtcgaacaacgcaagattactcatcccgataggcctctgattcggatctcgagtactatggtaaatatcacgatagaatgcctcgcgcgaatttagcacaacgagctaacacgcttcactcgctttgacaattctctcttctttttctgcttcaaaaagttctggcatctatcttcagattacgatattactcctatccccgcactagcccaaagagcggtggcgctgcgtaagaaaaatggggaaatcacaagttcgaaaagtgaggacgaggatccttataaggaatggcgtggtgtacttgtaggaaatcaggttttgacgtgagtatatatcatttgtaacgtgtaaacgctaggcagacccccactgatgcacttttccctttcatacgtgcgaccattagtgagctcggtctcatcaacctggtggcttgagtgtaacgaagcttgacacctacgccagatgttttttttttcatgtgcttcaatatgtaaactctgcccaagactacgtgtactgtgttcttccacatataccatgaatattgttcttgaacaaacgtgttcgtgtcagcgttgtgtagccatccctgttgggcataataatgatgatagttgtggaagaggatgtggttgcaacactctgcattagattcgaatgatgaatcatcgcccacaatttagttttctcaaacattcaacccatccgtttattcacctccatcaccatcaccagcatcatggggtttctttcatttctctcttcttcttcttcttcttcttcttcagataatccttcagcacctggagaagtattcacagccattccttctagtcctatagcccattctcctccttctcttctcgtgtcagcgatcccaacctcaacatttacccagacatcttcaagacctcaggaagccataacgatcatcacgcctgatcctcaatctccgagtttacctccagatatacctcaacagagaaaagaggttaacccaaatgcgtctttatacatcttttccatagcgggtgtatgtggtcctctgctttattctcgacactcctctttctatactcaggctgacttgaaaactcatatatcatatggaaatgcgtctgtcttctgttgttgattcaacaatgatgacattatcggcaaccgattctaggcggcatttgccggtggtctcattctcggtgtccgaaaagctcgaaggatcaaattcgagccacatcagatcgaagccgccttgaaaaccgatcccaagaatgtttcttccaataatttgaccatgcccaaagtcacagccgctcctacagggggttctcctttaggagcgtttagtaagcccggacgaacgagctctgtactttctcgaggaggatcaaccatcaagcagggatcgggcaagttacctcatgagagatcaatgaatgatctgtcggccatcagtccaatctcaacaccgaaaccaaagtcggccgctccgtcaccacttttcccctcttcgtcggggagaacgagccccaaagtatcttcatcaacatcagcacatccatctttgaattctgccgtcccgactggtacgatccagcaaatatcagtacaaagcccggtcccgacgctcgctcaaactgccaaggcccggccgacgtttgctcaatttagacaaatgtatgccgacagacacaaagacgccctggaggatggcgaacatgaagatgctccaccgataacagcaggggcggtcatgcatgctgctcaagcatttgtgctggcgaccgtgttggcagttagtttggtcggcgtaccgttcggtgcaatctgttggtggctcggggtcgaagaggtcagttttctcctactctgtttctcttgctctgtataaatcgactggagacaaagaatctccgtttcatctgaactgatatcgatttcttttctatctttctcttcttattttttcctctcggttcgcgcaaacatctctctacttcagccggcagatttcacacctcttttccgacaaaaactaagcgtgtacttccctacccttggtactgaatacctccgtcctacggtccccgaagatccggcagaacccccctctccttcctccctctcgtcttcatcgtcgacgatagcgtcgtacctacctgatttccttcgttcctcatcctcagcagcggcgacgaccgacggtcagtctctgggtggccatacgctgatccttccgtcgattctccaacaaggtgcctcgcctgaaggggtagaagaacagaacgtgtacacctggtttgaagaggtcaaggatgcgttcgagaaggatcggctcgaggagatcaggaagaggcaggaagaagatagggagtggaaagcttgggaggaagagatgaagatgaagaaccaaggaatcagtcaaagggtttgaaagaatgggcagggctagtcatcacttaggttaatttaatttaaatattaaacaaaaaaaagatttctcgtcttttctttcttcttttcgtattcctttcactcgaggtttgatatatagtgagaattatgaaagaacattctatagtgaaatataaagttatggtacaacagattctttataactaagttgaaaaggaagcggccggtagaaaaaaataaggtataatttatgaacaaacgttgaatatacagagaaaccccagaagccgagaagcaaaagatggaaggacgaggggggttggggtgtctaacaaattatacatttcccgtctagaccagcgctttcctagaaattcatgtataacaacatagttcgaactcgatcagcgaaacaaatttttgcaaagctcaggattaagtaatgtacactgaccatatcttccttcgcgacttccttctcgttctctcgctgcttgattttgacctctgtgaaaatcaaatgaaatttcggtcccgggataagttaatttcctctatgtagaaaagaaagagccagaaaagcaaagacagcatggcgttacctcgagggaagtataacttcatgtaacttgagaagcaagtaaagaattgtatcagacttgctgaatatccgaattgatacgacagaaaatagatcatgagaaggtaaacttactccatagcttcagtatccagattccctaaaatgaaaacaatgaaaaatcagaaagagtcaataatcgacgtatttctgaatgcgtctctgtctgtcatctgcaataatttagagatacgtacgagcattagcaatcgccaacactggtgctctacacaacggacacaagtcttttcctctacgttgcattttcgccaagcacctgataagcaagaaaaaggtgttcaggttaagagcaaaattcctcaagcttcctggcgtagaaaaagttataaaacaaaaggaacttacctgacacaaaagagatgaccgcaatctagacggatgggcttgaaggcgatgctggtacagattctacacaaacacatacagcatttgttcgtttaaattctcagcctcaatgcttctgtagaaatccgagatttaaaaaaaagcgcaagtactaacaagcaactatagtcttctaaacttggaatgatgggaagcaacgtggcggttaacgaagcgagcaagacatgaggaagtgacgaatcaaacagcgtccaggtcttgatgttatccccagaagccgcatcgagtgaggagcgaacgaattgaggaaacccttgagcggcggtcaaagccgtccgtttgtcatgcttcttgagaatctttcgggcggccttgacgttggcggtctgaaactttttcaagtcgagtaacgtcaggttaagttgaaggaaggtattaaaagccgcccgggaatctctggatttcaacgtccgtcggtcgcctagatttctccttgtgagctctccagcaaacgcttttaaccttttctcagcctcttcgatcgatcgttccccacggtctctctccgccccactctcgaaaatttcggcctcgatccagagcgtgaatatctctctccaagcatataaatcggaataaccatcatgtttgctgaatgaggctttgacctttgcccctagagagttttttgaatggatcgtaggatcgttcggtttagaagctgatgagatagattcgcataaatgctcgacagtcttcctgaatatggcctgttggtttcgttgtaaattgtcgagagcgttgagcgcatgggtgaggacattgaagaactgagatggaagattgttgaaatggaatgtttgtgagtcaagacatccctcgaaggtttaatacggaaacaaaactacgggcgtcccaactcacctctaaatcagaagccagctcgatgtacagttctttctgcggcggtctattgaaatcaaatttcaaagaaaaagacacagagaaagacccgaaagatcgacatgttaggaacgacaaacagcgcaagcaggataagctcaagatatgaactaacgcgactctttccgacaagatcttgccgtcgacttgatgagacaatccgttggttatcacggatggttccctagccccaccaccatccagctcgaacgaatcttcgtcctcgaccggtttgccagctcccccgtactttagcattccctctggagtagccggttggatggctaacagaggcacgcataatcctggtgaactaccgatgacagaagtgaatccgggaggaacgacttcgctaccatctccgtcctcatcatcctcttcattctcctcgtcttcttcgttgtccgcctcgcaaatcccatcgtcttctttcgtaagtgttgccgacgacgacgatgacgatgatgatgacgccacgttagcagtttcggtcgatttcttatcgccacgactggtacctctgcgaatcccagcatctaggaaaccttgttccgagccttctctgagcgcccagatcggagactgaacaacggttctcccactgattgctccttctcttccccctcctcctcctcctcctgttagtcgaccacctcgcgcttttcctcttccacgtgcggtagcaaacaggtccctaggcgtgctcgccatcagaggttccctcggtccgtcgtctactcctggcgtgggatcattcgaggatatctcggaagttgcttctgattggacatcccagtcgtctaagtgaatctgagccaggcgccgattaaatactggctgcgcgaactgagcgtctagattcgaaggcaccggcgaagaagaggaaagggaaggagaagcttgaggggattgggcattactggggcgagagtcatcatcagtgggtagagcatgatggatagacgacggagaccagtgcattggggctggagaggagtctagtattcgtgggagggaggatggagagggtgagtgagaagtatcgagtgaggaatccaaagattttcgacgaatggacgtggcagaattatgtaatggaactaatcgaagtcgaggaataggatgatttgttgagcctgagagacacattcgagtaggtgcccatgcgtaatcatgtcagtccccaatagtctacaagatagtgataatatccagacaaatagatgatgaaacctctgaaacaaaatgactgaccaccaatctcgtactcggccatgaatcctcctctgacggccacgctctccctccggacctttctctcattccgagtcctgattctcttgtgcgcgagctctgcttcggcctcttcctggccgacggcaaagtcatcctcctccgactctcctgggctgacaccttctcctcggactttgactctgaacctcttgccggtatcatccagccaggtctgtacagctctcttgtgagcaccaccatcatccgaaatctgcgcattcgactcttttcctttctctgccgaggagaaactggcgttcaagtagcggctgttactctcatctctgtcgtcatcctcatcctcatcggatgactcggcgagaaattcaagttcgatctcggagtggtcgactgaggaggattgatcgaggtggcgaccggtactaccctccgatggagattcagacgggtgaacgaacagagaggatgagcgttgtttgtgttgatcaacagagagaacgggcgggatcaatttgtcggtcggagccgggataggtggatgaagaagcctgttcagcacaacaggattgagtcccaacgacgtgagctcgtttgagacctttttgataagtttcttgagctatcaagttgggtgggtgaagtgggtgacggtcaggatgtcattctggagtgagggttttgcgacaaatgaggaagacaaagctctcacctgcttgtactcgatggcagactggtttgaggcgacaagacgatagaaacagacatgataaggctcgaggactcttccgagacagaaagacgtagaaggaatgaacgggtggttactgacctctctccattctagcgggaaccctgagctctccaggattcgggcgtactcctatgtgttcatgacagatacagcacggagagcagcaagaagggagagagaaagagaaatagcgagagcaaggccgaagaacaggaacaagaagaaaggaaacccgtcgggttgttagcaaacgctcacaagtgggggacaagggtgaactcgaaagtcgaccgacctgactgtacttcatgacgtccaaggctgacgaaagatgaagatggtgacgacgggataaggggtttgcgtggatgtgatggagataatttggccgaggtggagtcagttgatctttggggtaagggcggaagaaggaaccaaggaaatcgttaggaacaggaatttggggacgaaaggcgcaaaggaacgaagtttacggaacaacgtgatttcacactatggctcactctgatagccacgtgcgcgtgtggggacacgttcgtcgcacgagtaccgtcaccaacaccaatgctaacgatagggagagtgagatgttgagcagatggagaatcgatgtgaagatggcgaagagcatacacacatccacaagatagacagatagatatcaaacaagagatagacaagttgaacaaaaaataggagacaagagaagaaagagcgggggaagacgattcgctcagggtttttatctggagagagcatgttccgtcttcccccaacggaatcgaccattgtttcctttcctttgccttcgtctcctttcctttccttcatgtgtgcgagagagagagagaaagagagggaacacgcacatactctatctctctctcttcctccacattcatccgtctcttgttccttccccatcgatctatctttgagttctccatctcgtcctcgttcttgtcgccatcaccctcgagcacttgctgcgtttctcgcggaaatatgcacatgcacatgacatctcgcttagagatttgatcaatcgccgggttatcgtcctcgagcaaacgaaaaaaaaaaacgttcagattccgttcttcttatcctttctgttcttcttcacatgcaaaaagacgaatacatatatcttggagattaaacaaagtgctatgtgatgataatgatggtgatgatgtcagtgatagtaagaagagtgaagaagagatatgtccgataagtccgtatgcctctttttgttctctcgccctctctctattcgaggtcaggatagaattgatggagtgtgaaagagagagagagggagaaaggggagaaagagcaagagtacatgtaggaaggggaaagataaattgcctggtagaatgaccaaggcttatgagatataatggcaaggacagagaggaagatcgataaccaaacgatacaaacccaaagcaagaggaagaagaagaaaacaccagaggctagagaacgaagaatagaaaatgaaaagcgaaaaacgaaaaacgaaaagcaaaaaaaaaaaaaagatcaaaagacaacagaaagaagaaggactgcttcaatcactctccccatcagagtttaccactctgctgaactctctgaatccacctctaccggtcaacccgccactcgcactcaatccaagaagatcgactctggatgagttcctcgagcctctcgtacttccacctaacgaggccggaccggctggaggcgtcaatacgcccgaccggatatcctcttgcgcttgcgtctgcgtctggaactgtcctccgctcgagctaagattcgagctcgagctcgaaggtctaggtcgaccgctcaacagcccaacaggcgggtcgttccaaccgctccccccggcgagagacgaaggcgcagatagagtgggtaaagatgaaggcggcaatgtcttcttgaggatctctctcaatggcgtgagatgaaagtcaacagcgattccgccgcttgcgtttgaagaaaacctcctgagcgcacctcctgccgacccgttggtcggacccaagacgcctggtgaacccgaaccactggcggtctgtgtgaatgatctgaaagaaggagccgaggacaaggcatgtgtctcgttctcgctcactccgggctcgtcctccagcgacagggccaattgaacggatgacccgggcgaatcaggagagccaggctcgagatcagaagacggtcgatatagccgtcgaggagacgacggaggagagaccgtggtcgaactgtgggcgagcgaaggaatgttcccggatgaaagttggtagaagatcgatgagctcgacaatgccggtccggatcgaccgaaagtggagtgtgaccccatgaacggtggcgccaaaggtgctggcggaggggtagaggatgaacgcataataatcggagccgatcgggtttgtttcaacgcccgtggtcggtttggtcgatggaacaatatgtgcttcacccgagcagcgatcgtcaacggccatctgcccgaccgactttttgaccaagaggaagaagccatcgtcagtgacccgtttacacccatccccgattcttcctcagatgcagagttatatccggatgacagtccttcctctaaccccttccgccactttctgcctcctgcaccactgacgccaatacccaccccaccggccaacgacatctttggagaccggaggatccgacgcttgaaattcttcaagaagaaaccaaccacgcctaggaggacagctaggtaaagtaaatatgaccatggtccaacagattcgatacttccaccaacgatcccgttcatctccctcaacctggcaggaaagctgaaccatctttctccgtacgaaaagccatcgagagaaattgtcgaagaagaatgcgacgaagcactaggagcaatccctttggaggcctcgatcaccatctttcccaacgtccaggagattgctgtgtcacccactgtgtcaacactttgaaacgccggtcggacactagactttttcttcttttgagatgggcccagattcttttccgctgcctttgcagacgcctcgctctctgtcgactcgaaagatgaagaagacgcagacggatgagggtcgatcgtccgaggaagcccaatcccttcgtgtaacacattcactagccaagcagctttgaaacattgcatctgcaaccgtgggatttcgaccttgttgaaccaagataagaacgaatagacaaacatcgtcagatcaaagaacagaagcaaaaagaaaaatgatcataaagagtaccaaaaaagacccttacctctcgtccccatcgaccgacctcgacaactctaccctctccgtccaacacctcgccatcacccgtccgtggcttgtcggcgctttggttgatccacttgctttgaatggcaccccagtccgtctgacaatactcacttgcttttttctcaaactcctcaaagtcccaggcaccgccgagattgaagacgtgttcggacgagtaccaatactcgctcaccccgatgaacctgtgatggtcgaaatcaatctttggtgttggcagcgcgtcaaatagacattgatgaggttgaccactcggacaaggcaaatgtttgttgagtagcggttgaagggatagtaggcactcggagaacgatcccgttcctttgagtacatgaggaagtgacgcctggtgggcttcttcggcagagagcgaggcgagtgatagtggggatagctttgagttctcgtgcagtgtcagatgtttgggtagacaaggatctgatatatgtctttcagccaaagccgtcgagtctggtccttttcggtcgagctcatacttgtcgaccagggtgccgacgtaacgttctctcgctcggtttgttccgtagcccaaccaagaggcaacgaacacatcgtagtcgagatcttcaccagaaagcaagcgtaacttgacggatgagagtgactcccggtgtgccgaggcttccgagtccgaaggagtgaacgctatctgagtggaagctcctcccatgtcgagaaatccatacggatgaactctggacgaatgatcgagcgtagaagaaatagacgttggtaccagctcagtcggttcgccaaacccgtccatcagataattcaccgcgacccagccccagaggccttcttcctcgccagagatgattctgaccgtctccccgcatgggccaccaggatcttgactggagccgaccataaacggatagtcctttcgtaaaacatcacatgtcgtctcgatcaactttgaagataattccgatggtaacagtcgcattcccgcagttgcgaggatgtatatcggagtggatgcatattgggaaggaggtatagagttgatcgcgtgagccatcagagggtcgatatactcggctaccgaatcgtatgtgattggagatgcggccagactcgaaatgcctgaatgtgtatgaagggtgaggttcgagtcgtgttaaccaagagcaccaaatcagccaggacagttgagcctgctgagcgtgaaaagtttgatactcaagccagaaaaggttgagcgagcgagcgtacataccaggctcgaccttcttttgccattcgcccatcccgtcctgaacgcctttctcgaccctgggtaaccttcgaagagcttctcgctctctctccttgccctttcctttattggaaggagcgacagatgaaagcacaagctgacgctctgccttaggatctctccatgaatagatctggagtctagacccagacgagccggcgtcgataacgagggcatacctcctgctggcaaacgcgttcaggggaggaggcatccttcaggagggaaaatgaaagagtgggtgtgatgccgaaggaggagaaacaaccaagaaaagaaagaaaaaaaggagcgagtgggatgattaaatgaactgggatttcgcagagctaatcaagacaagattacgagccgggtcaaacaagaagggaagtagaaagagagtgagtgaaaggttgaacgatgggaatgtttgacctagtccaaaaaaaagtgcgctttcgcccgaaccctgctcttctttccgactgcggctgtctcactcttggcgtctgttgtttgttacgtcgggcggctatgattttgtagtgatcgattaggaagccttgtctattagagtttgtgatcggcctttgtaataggctactagagaggtttcctattgaatgtgtatgttcggtttttctaatatgttgtgtcagcttattagagccatcctctaatgttcttccggagtgcaacacactacacaaattacttagtatcagactacaaacaatctctattgctttttttcgtggctcaacacactcactcggtcacttccgatctcatacctcaccatcttcacctcgtcatcatcatccaagtcttcagggcagacacccgatgagttcaatagcagattcttctctgcagacatctttgaaagaagtagacagcccgctcgatacctcttttctttcgacgctcgccaaagataatctcgtccaggccctgaatgctgtaattggctcaatctcttgtgtttctcgttctcgttctcgttctcgtcgttggaactcacactcatccccatctctttcggctttcctcgttagatcaatggagcaaagaccttggtgttagatcctacgttggcaggtcctctcggcctggtaacagaggtctcgttactcaaagttcgttcatcagaacatctgtcagacatccttcatcgatctgataataagactattcgcctacacaccctatcagcatcaagcggtcgacaagatgttttggctagagaaagggccgttgaccgcaccgacaaagaacatcatttggatgtgtagaccaaagatcagttggatgaagacgattgctagtgcgtcttgattgtttcgcttaccttccctatattcatcaatttccaaccttatgtctttccttactttctcgatcagaccagatcaggtcgcacaatttgtcggcttcttcccacacgtacaccattttactcgttccccgaaagacagagctttgtagacagattcttgaggaagaaggcgtcttgggagatgtcaagctcgaagagtacaatctgagcttcatcccccttgagaacgacgtgttgagtctggagcttgagcatgcagcaaaagaaatctttctggacaaggatgagacatccgtcttctactctgcccaagctcttcatctccttcaaaagacttacggtatcattcctcgaataataggcaaaggtgacgtgtctaaggttcgttcgctcgttctttctcgctccaaatatttctcttgttcaggtgcgaataaatatttgtttatgatcgtttctggtatatgattcgacgcatggccgagtagagactgtcgagacaactacagacattacgtcggacagactcctcgtcgaccggcccagtcccgctcactctatccactcagatcgactcgctcatattgcttgataggagcgcggattgggtgacgccgatgtgcacacagttgacatacgaaggcttggtcgatgagacaatgggaattaagaatggttcgtttttacaacctgtgtcgaaatatgttacgctctcaagtacttaccaacaggattgaatatgtttctgcgcatcacagcccacgtagaagtatccccatcactgctaaataaccaaccctccaccgtggcttccacaagcacgaccgagaccacaccgtcactatcacagtccacaccggccacatcaggaaaaaagaagaaagtcgcgttgaattcaaaagacaaggtgttctctgagatcagggatctcaacttcgccatcgtagggaacagattaaatgccatggcgaaacggatagcgggcgcgtataaccaggtttgtcttgcccgtgacgtttgttgggaagagggcaaaagataaagtctacgcgaactgttggctaagacttgagtggtttgaacgttcgcaaataccaacaagggacggcacggcaaagatattgcccagatgagagactttgttgggaagctcagcgggcttcagggagaacatcaagctctcaagcttcgtttgtcctgtctcttttttgccccaaacgttctcacccctacattgtatcactgactagcgtgatgtatatcgattttggtacggacatcacttccgaaacaacagacactggcttgacagaagagatcatggcgatcactaaaacggatgagtttttgaagcctctagagatctctcaaagtatggatcactgtcctttcccagtctaccgagcgctttgttggatgcagttgaccatgattacttcttcccatgtagatatccttgccggatacgaactcacaaaccagctgagcgcgattgaggacctgatcaatcagggcctgcccttcaataccatactcaggttgttgattttaatggctgtgacaagtggaccgttaaagggaaaggtgtacgataaccttcgacgagaaatccttcaagtgtacggatacgaaaaactacctctacttctctcgttggcttcgctcggtctgttccctaaaacacctgcatcatctcccccaaaatctttattcccgactatccggaagtctctacgactattggttgacgatctggacgagaacaatccggcagatatctcgtttgtctactctggatatgctccgttgagtattagattggtccaatgtgtggcccagaagaacgcggtgttgagtacaccggtggtggctgacgaccgagcggtaggagggtcttcgaacggagaggatggagaggagactttcctaccgaaagcacatcctattgttggatggaaaggattcgaggacgtggttgcttgttagttggattttcattcctctaaattatttcaccgagcgaccggaagaagagatagattggttgctcacaaatattgcgtctgggttttgggcctttcggggggaaaacagacgtccctggagcgactttcgacgagatacagagcgcagatctccaccagcctgtccaacgacgtacgtatacacataaagcgctatctttcaatatcgtcgctaatccgattgcgctgtgatctctggtaggttcgccgaaggaacaaacgaccacgacaatcgtcttcttcttaggaggtaagtattgttacttcttctttcttccgttccctatcctgaatagttgactcaaatggaaacgtcccttcttgcttgaatctcttcgcgacctcaggctgtacatttacagagattgcagcgttgcgtaagatggctggctcttcaaaaggtacgtttgagcttcactaccgcttgatccacctcgtccatccttgctctattgacacccgttgtttttctcccttgaatgtacttcaggtcgacaatttttgatctgcaccacttccatcatctctggaaactctctggtgaggtcacgtgtttgtgattgtcaaggagacatcatcattattaacgctaccttctgtttgctgtcatttgcctctctgaaaagctcgattctattgctggcgatgagcctcggccgcttgagccggcggatgtataggcgctttcgtcaattggatggaacttagatcatcaactatggatgtattacgtgtgtgcatgcgaacgggcaaataccaaggcgaagcacgccgggcgttactctgaacggtttcgattcccttccgttctgattcgtttagaagcggtggtgaacgaggaaggaaatttttgatttgaaagaagcttgttgaaatgaagggtactcatcaatttgagagcgctttgattcgctgaagtttttgcttaacaaaaaagtttttagtcaaaagctgtgcaaacgcgttaaaggggacgatcaactcaacaactgacgtgctttcatgactttctttcctttctgatccactttcatccagtctcatactctcatccacgctcattgacacactcactcacacacacacatccatatatacaaccacaactatgaccactccatcgacatcgaacggagctcaggctctccccaagcgaagcaagaaccaggagccagctaatgcgaccggctcatcctctgcctcggaaacagccgacgctgccggcaagtcatccaccctttggcccgtcaggtcgtcttcacctactccctctagtttgagagcggtggaggatgtgttgagagctcaccagacgggtgacccgttggctactaagtgcgcggccgatggtggtgtttgctgcaaggacctcaaggggtatgttattggccctttttgaatttaactaggctcgtttttgaatctctagtcgggagacctaacgtgaatcgtcatctttcgttgtcttcatctgatttcacttattctagggaggatgagaggacgttgattgatccggatgtcgttcgagacgtcattattggactgagtgacggattgactgttccttttgctttgaccgctggtacgcgcgtttgtcatctaacagtgctgaaagttcgttcaagacttgcaggttctaattttttgtgtcgtaatgtcgattttttgaatcgacaggattatccggtcttggtgacgctcgattggttgtcctaggaggattggccgagttgattgctgtatgtgtattcttcacacactgtacttatcgtctcaccacatcgggcttatgtttgtttggttggttgcatattgttggatggtctgttttgttagggtgctatctccatgggaatcggaggattccttgcttcccaggctgagcttgaccagtatgtatttgtattcatatgaccagactgattatgttccatgtattaattcttcgcccgaattgtccaccctattcatatccactttcagcttccactaccttcgaaagcagacccacgcccgagtccttcgttcgtgcggtggagagatggagcgagaagttcacggcgtccttggttcggtcggtgtagacgagtctatctctcgagttgtggcccagagcttgctccaggtcgagtcggaacacgccgaggccggtgactgggatgaaaacactagtggaagcaaagctgcctggtggaagtttggtttgggcaaatctgatccggaggagggctcgacgttgaagtggagtaaagacattggagtcaccggtttcttgatgaggttcggagagggtctcggtaggtacttttttcttatcaagttgagatacgtctcgttaggacaagtcctgaaaaattcgttacttctttctctctcgattcggtatgtagaggagactccggtgtcgagattgtatatctctgcgatcactatcggtcttgcctacttcatgtaagtctcacttatcccatttatccggtcgttttggccgcgcacgacctgttcctgactcgacctccgtctatatttcttgactgctcttatcagcggtggactttgcccgctgttgccctacttctttgttgaggacgtcaaacacggtctcatctggtcctctgctttcaccttattggttctcatggcattcggtgtacttaaaacccacttcacgttcgtacacttttgtctctgctagatatcttctttcttttcatgtgcttacttggccttaccattgtgtcgattacttttttggatagcggtgctactggaggtgcgggaggatatgtttggggagctgtctctacagcacttgtcggaggagtcgcaggtttgtcctttcgcgctatttctaaagttattcttgctctaagctcacgtcttttcatttgtcccaattagccgccgctgcgtttggtgccgttcgattgctggaagttggagtttaatgccttctttacttttttcgccgtttctccttgttcctcatccaagaccccccatcttgtatcatcaacatatttcgtttttccatccggcctgatcgaacgatgaacaatgcgattgcttgttctttcatattttttggttttcaactttcgctaggcgtgatggatcctcttgctgcgctacctcttcttcccctgatagtgtcatctttctctcctgtcccgatcttacattgtctcttctaggtaattaccctcttcaaccctttttggcttctaccattcatgtcccctgctctacacgtgtacttatagattcgatagattggtttgcttctgctatttaaagacatagtttttttcttcttctgaccgaaaggatgtgtgcgctataagagcagaaggacagatgaatagtagaaaaaaacatgagtcatgataagtggctaatcaacctcctcctccaaaccatcaaacacattcccggtatttcccgctcgttccgccctccagttaacacctttgttcccaaactcgtccactcccgaacgccattcagcatcttcccccctgtctgaggaaacaagtttgatagcccgttggaaacgcgttcggctccttctcttgagcctatcaggtttcctccacctggccctagctacatacgaacaaatgaagagaggacgttgaatgagactcgagttgctgaagactgtaggagtgaggacaaatagaatcgaagacttacttgaagacctgcgtagccacccatacagaaaaacggaacgtccgctctccattgacaatctgtagtcacaatcattcagctcaacatacagagagaaaggcaggagggtaagagaagtagtaggattagtaaggaaaacgaatcgtcagtgaggataggcattccgccaatcgattggataggatagtctttgttaagttcacgaaggaaaggaagtccttcgacaccgaacttcgacccagtcgcggatctgttgcgtccaaaaaaaaaacacttgagatgcgctgcaaaaaaaaggaaggaaaagaatgggctgagaaactaggtgaatgaggaagagactaacactatataatcgatatcttccaacgtttctctcgtgatctcgaacgttgggccttcttcacaacaatctggcaatactgtcatgcttgattccttagtcgccttttctacctcccgttctctttccgattcggcctctcgtggatcctctgcccattgcctgcttcgacggcctcttctctttgatcattttccgttcgcgcgcagctcggccttctccatcctaggacatttgacagcagctttcttcaaacatcgatgctcgacctcgaccgaccaagttccagtggtcgtatctctaacgagagattgtatcgtggtttgagttcggaggtcgagcttgcctgctttggcgtgagactgaagaagtttatagtatgcggcaggaacagaccctccattcctagcggttcgaaactggttaagacgagctgtaacaatgagaagatagaacaagaatagagacaggaatacaattaatgatcagggatgagatgatcgataataagacaggctaatcgagctttcatacgaaccagatgggtcgtcttcttggtaaaacatcatctttaataagttcgaatatttgcccacccactcaactgaaatttcggatttaaaagtttggacacagttcagaggaagcaaagatagcatagcacgataaataagacagggactcactgcctatatcgaatggtttgactgtgtgtattatgataagatggagcccgaacggtgttcagattcgacacaatttagaagatatccgataaacccattcgatacgcacctttgatgaaagatctggcaacaaagacgacctttgtgaacccattcgagagagccagatcggcaatttgaacagatgttagcctgcgcagaaccaaacaagccacagaacggtgactgaagagtaagtacatgtatgactggcattcaaagcaaacaaaggagaagaacttaccctcctccgattacaagcaacgttcctccttttccagacgtgatcttttccgttaatcgtacgtcttctttcgggagaagtgtcctccctggcttcaagaatgcagcggtatgacaccatccttctccgtcgatcatgcctgatcgaccgcctgaaagataatcaggaacattcggaattccgcctggtccgatactcatgataactgctttcgagtggaagacttgtccatcaccggattcaatagtaaaatacgaatcagagtcgtcgagagacttaaacagagagtctgaagagtatcttgtggtcgggtctgagtgagcatggtactttacgctggtcaccagacctttttgcacgatggattggagagagtagcgttcgataacctcggaatggatgaatgatttgaatagtggagtagagggaatgaagtaatcagaaatatctctaagaccgccaggtgataacggaaaaatatcagttttctaaaagtgtacggttccatagagagttttgcatataaaccttaaattgatatgaggttgttgaggcgcttttcctttgatgcgagcactgttcgtaagagatatccatagatagacacatagaagttatctaatacagcctttcgagatcgagacaatgagttaggaactcacgctttcttctgatgcttactccattcagttcctacgacgttctcgatctcaatgagcgcttttgccctgtcgtttgcatgagcataagactttaacgcgtcgagatctcctggatgtggatgaaagaagagaggagaacgaagatgctttatcttgaaggcgtcctgtaaattgatatggcaggcagtcccacacgattgagcggagtctaatttgtcgatggttctagacaacgaagagacatagcttacaaagaaggtatcccaagtgcccataaatcgcgccgcctgtttatccataaccatcacctttggcctcttctctgtcacatcgtttttggttcttgaaggtgattggggtgtcttccgctgctttgaaggagattcccgaccctcagctacatcgtctgggacgattctttctgtcttacctggtttggcgtgctttcgaagccaatgaagacgggcgtgctcaaagtcggaatagagagcggatggggtatcttcataaagtcgggagacggcggccaaagctttgagagttcatatgattcgatgagtgaaagatacgacggaaagagaaatgtatggccttcgttagcgcaacatgtatttgactgaagagagaaaagcatctaagaggaaatcgcatacaatgaggacctgcgccaataatgaagatgtcgagcattgtattgaagaaaacggtccagatgaatgagagattgagattgttcttaagcgatcagcttggcatttcgatctcatatatacatgagagattcagccggtcattcttcgcgatgtttcgttagaactgcctcgtcctcacccaccatagcggaggaggactgagaggtcgcctatagaacaatatatcttcaggtcacaacgaatccggttagtctccgaacatatcatcagtcagtgtcattgccttcaacatctacatgaaagtatcagtggttttcaaacacgctgcgctctttctcagcaaagagaaagatattgacatggaagatacgatcaagaaagatacaagcgtgagttggaggtaggaaatcacattattgtcgaatcacgtgaccatgattgcaccggcccgatgatccgccgagcggactttcttggacaaatctcagaggcgggctaaacgagatcaatttagaagggatgaagaaagataaggctgatagaagagaagaatgaggaggtaatgcagaggacggaccgcaaatttttggcatctagtaggagggggagtacaaaagaggcgacatcggagagcaaaccaagaatcggatggatggactggagaatgtatcgtttcgtttaatcagctgataggagatcaagatgggatacatacaatccttataagaactctacaagccgctcttccttggatcttcttgttcaatctctggctatctatcctttcttccttctattgaacatgcttctcaagtctctcgctgaagcttccgttgtctataaatacacaagtctgattcctccattcagacgattggcaactactgctagcctatggaagaagaaaggtaaagtcgaccgatatgattctaagctctatcgatgtctcggagagagatcctgatattatatcactcacgatctatgtggtgcagattctatccccaagaaggcttccgagcccgcttttcagatggcacctaaacccatcgtcggtgtacaggctgctctgaaagctcagagtgacccaggttacaaagtgttagtatatttacatacatttgtccgtttctttatcttcttaaaagatgcaaacgtcttataaaacgctctgtttgtctggaatatcaatcacataagagcgcctcagatattcaaagaattttctcaggccgggaaggtcgctgtcatcactggtgagtacttttgataaatctttcattcgcatccaaatactgctcaccaaccccaagctatgtaacttcaacaggagccaacggaggactgggacttgagatggctcttgccctatgtgaggccggagggacggtgtatggaacagatcttgccgaaacgccttctggttcgtggcccaatcttgcgcattgatacagttcgccatgcgcgtactcttgggtcttattcgaattgacctgggttttcaccggccttatagatgactatctagcctctcaaaattttgtgaaggccctcaacaatggaggcgctcttcattatatccaaggagaggtaaccgtcaaggactctattaccggtgtaatcgatcaggtggtcaaaaaggaagggaagattaatgtggctatcgcggcagctggaatcctgggtaccgctacaggattcgattgttgggactttccagaggctgaatttaaaaaggtatttcacagttgttcatacttctcttgaactcaataatagactagatactgagcaggcatgatcttaaacattgctggcctacactagatttttgatgtgtaatttctcaatcacccttgttcaaccacttgtcgattagaaactgaacagttctgtccctctttcatctccagaaatgtgaacggtgtattctacacagcgcaagctgccgcaaagcatatggtcgataagaagaattcaggatctatcattctcattgtatgcattctttctactactgcgttcaataagaacagagatgcttcttgtattcaaaagatgttatgttatatctggtctcacatcaggcgagtatgagtggtactgtagtcaaccgtgtgagtgtttctctctctcgtattatatgtttatcttgattgcgccagagctaatcctcctgctattcgacaggatgaacgatggacggcgtacaatgcttccaaatccgccgtgcttcagatgactaggtcaatggcggctgaactcggaccacatgacgtacgggtcaactcactctctccaggtaagaccattcttccccatacccgcgctatgtttggatcatatatactcgttcccacgttaatctactttatctgatgaactccccacgatcgattcaggacatatctacactaacatgactgccgcacgactcgataaagaaccaggcacggctaagagatggtgttcactgaatccgatgggccgactaggtggaactcatgaagtcagaggtgtcgtagcatggttggcctctgatgcttcgagcttttgtactggatcggacatcatcgtctcgggtggacataccgtttgtcctgttctttgaaggcttctttgttcaagttttggtgtgcgatatgcgctaattcgggtggatgttgttctcgactttattatttccgacgccgacactcttatcagatctggtagagaacatctctgatggtttctgttacaatttcacactatttttgtgatatttttaatctcacttgtatttatgtcgctttgaaggtcttgttgtcagtttgttccgcctttcctacttatcggcatttagcctataggatacctttcaaatatcatacgtccaaacaagaagacaggaaagagggatcattctaataagatataagattgatgagttgtataaacattctattcgaaacaaagactaaagggtatacatctgaagaacagtacagtctagaatgtgaggccagaaagaatgaagataaagagagtcgatgcttgatagtcgaccagaaagtggaggatgtttcctacttcactcggggacgagcatgcctaccatacacccgtccatcataaaatcagcgttcacccaagcgtgggtcgccactagttcagtaaattcggaatgaaaaatcaatatatcagtgatgactaatttaatccatgaacgcagaacatgatagagaaaggtacggactaaagagttttgttccgtcccttcctgcgcatctcaacagttctttttctcctccgggatggaacttgttgtacggcgtcaagttatagactcttccgttgattgccgtccatgcgtcatgcggtttgtctggtttgtgatccagtcagaagtcaaagaaagtcgacaggccaattattagagactgaggaaacatgggagaaagaaacgcactatgcttcttaagctcagatggagtgactcgcatggggaagtgcgtgatgtcaccctgtcgaaattaaccatccagtgatgtgttataagtcaagagcagagacaccttcgaagagctttcgttctacacaaagggggagaacgtactttcagactcttgccctgatactgcccgctacttttcactctagcccaatctagagctgaatgtcctggagcaagcgccaccttctctcgagcttttaccaccttcgtcgttgttgtcggtgtaccgagacttcctttcgacgaagcgacagatcgaggtttagagggttttgggtcgtcttcaaatgtggaggtcagtgggtcgcgcaacggagcggaaggcgccgagagtgtgaatgatggaggaggaagaggtatgcttggtttctttgaagaggacggtccagacgatcgttgatgagattcaagtagaggaaatggtggaggatcatcgtcgtcctcctctttgtcagcatcttgggcaggaggattgaactcgaatacaggaacaggaggtttaggggttgatttttcactctcagacaccggaatcgatggcggagcagggaattctgggcttgaatcggagcttggttctgactctgcagaaagtacagacagatcggagggaactaagggagtgttttgaggagtagacaccgaggcgaggagggtgttgaacgtggaggccacagcttggtttaacacaaggcacaatccaatgttcagcgttccgtgttttcagaccaactcaatagaagaacaactcacatgtaggaatccaggcagacatgttgggtcaaacaagatcccaacagtgaacaaacagtcaacgtcaaggagcgagaagtggatatcggatagaacagcccagccaattcagaaacgtcgattacttgcctgagtagtctcagccaacccttgtgagggatttgatcttatcttatctataagctaaccctaacaacgtatctatcgtcgtcactgtatttaaccatcgtggaaagaagaagtgatcgtgataagcgaatgattctccgatccataagttctaaaagacgatcatcatccacgcgtcgactgtcaacaatgtcaaaacttcccgagaaatcgtcccaaaagaaaccaagagtgattcattggtacaggacggatttacgagtccacgattcgccaagtctcaaaaccgttcgttctgttacaatacgcacgtcggatcggtataatctgataggtttccttgatttttggaccaacgattcatgtgacccttccaggctattgacctcgatcccgaatgtctgtggtctatatggttcgtatgattcgatctgatgagtgaggtgccgatcgagtgctaacccggtaggaggtacaggatctgggacccgacatacgttcaaggccatcgagtcgggatgaaccgtcttcatttcgtgttggagagtatgagagagctatctggatcgctaacaagtattgattcgggccataagctatctgtcctcagaggaagtccggagaaagtattggattggattttcaagaattgggatgtgacccatatcgtttgggagatcgtgcgtctgtccttccctatcttactcgggattatttcgacgtgttatcaacaattatcactgtacaacactccaaaaggatacatctgcatacgctcgcaatcgagatgctgctatcatggatctagctcagaaacacaacgtcaccgctcttcccgttctgggtcataccctctactctgtccccctgctcttgaaacataatgccaacaagcccactacgacgatgcagcagtggatgaaagcggcttcccacctaccttcccctgaatttcctatacctgcccctaccgagcttcctcctgctggcaaagttatactcccagaaggagggttcattcatgatgacggaacagaaccaaaggatgtcaatttgcaagaacaagggggttggaggcgagaaagggtcagttgctttgataaagaaggtagaacagcgacagatatcccttccctagaatccgtgggaattgtgaaggaagaagttcaatctctgatcccaccaggagaaagagttgcactggatcgtctagcccgtctctgtgtgagtgaaatcatatgtaactactttaatcagaccgtgtctctcgatcattgaagatgtcccgccaagttcttgctgcttatagaaagataaagcctgggttgcggcgtttgcaaaaccccaatcctctcccgccgtcgtcccatccgaatttatggagggagcaatgtataaaaatccttcccaaaagggcgaaatcaagaatacaaaggcggcaggcggcagcacgttcgtcttgagcatgttcctgaagtatgtctttatatcagatcggcgttgtgatgttcaagcgatagttttgaataattcatcttgagagatcacttcagatttggttgtttgtcggttcgaacattctatcactctgcaaaacaggcgatcgaggattataaagcagcaaacctcactggcgcggttgtaagtggatttgagatggcagctatgtttattgacaaactcttgtcaagtctgcgctgattgaaatcatttcatcgtatcccctgatcaggttcaatccgagccagagaacattgtctgtccatattctccgcgccggcatctagttaaaactttgaggtactatctgacgtctttgtttgcgcgttcatcggtcatttgttgcttctttcagatcggccagttgaaattcagggagatgtacatttgtgcagaatatgcgactccaaacttctcaagaatccgagggaacaaactttgtcggtacgcctctcgagcgcttctcctagggtgagaactctctcatgaatctcgttctcacctcttaccttccttccctttcctttctttcgagacagttatatttcttggaaatgtccgacgcggtatgacgagaatggagtcgagattcatcctcgaccaaaggatgatgaagatgcggagaaaattctgtatgcttgggtaggcagatattcaactcctaacagcttcccaaacatagtgcaagacaaatgatttatccttcttgtgtggctggttgactatcatggatctctgccaatcagacgcatgggcagacagggtttccatggatcgacgctttggtctgtgtcttgcgtctctctgttctggaatgtgtatggtatatttgactgacatgaatgcattcgcaaacacatgcatagatgcgtcaactacgtcaaacagtgtgtccaatacattggcgatataccattcagtcgataccatctgatttactgatcgatattctcttgtgttgcgcttgaaaatctcagggctggatgcaccatctcggtcgacactctgtcgcttgcttcttgactcgaggacagggatacatctcttgggagagaggagcagaagtgtttgatgagcttttgctagattgggacccagctgctaacagtttgtttgtttgtttgtttgtttgtttgtttgtttgacgcctgttaatccgaggcactttttggtttgtggtcaactgacgggtgatttctgtggcccttgtcctcggtggttcattactttgatgtatcatctgctcaggtggaaactggatgtggctttcctggtatgtaatcaaaaaaaaactttccaagagtagatgttccgacttggttgctagctgattcgatacatgatgggtttccggaaaattccatttctcagctcggcgttctattcaatgtattacagggtctactcccctgtgtcgttccctcagaaatgggatcctacaggtcaactcgttagactgtattgtcctgaactgaaggactttccagacaaagtatgtgaatcggccgtttgttcttgtttgttctggtcatctgatagattgatgcgccgttctgattgatattcctgatatggccaatactactatgcagtatatctacgaaccgcacaaagcgccgttatcgatccaacagaaagctgtcggtgccgatctttactgttcctcgttcttattaatatttcacactgatcaacatgacaccttccttttgatcattcattgctatcttagaactgtgtcatcggtgtaacataccctcatcctatccttgatctcaaaacatcccaagcttcgtgtcaacgactcatgaaacaagcgtatgacgctaacctctacggaacctcaccggctgttctggatgggagtgctcaagatttgttggacattcgggcgaaagcgggcaagacggcggcggatggagatggaggatcgacttttaaagaggagagcggtgtgaagtcagacaaggccaagggagcgccaaagcgaatgaacccgttcgagagggcgaagatgggttctacagcatcgacggtcaagacaaatgatccggctgttaagaggaagaaactttcatgaagagagaagtctcgcaaagaagattattgtcttctttatcaagaagatgtatcatatgtcttacatgcactgtcttatttcagataactacaaagcgttatatgatctttcttcgatcttagtcaagtctttcaatcctgactgagcttcttcaaactaggatacattgacagatggatatgagctatcattcatgaaaagacacggacttcaaacagaggcagattgaagcgtgaaacgatggagaggattgaaggtcatgaaaattaccgtaacagaggatgaaagattgggaaagaagagatacagatcgggcgaaggtgtttacgagatcatcatgtgaacaaactcctattgaatgagaaaaaagagaaaaaaacaatatggaaagaccaggtcagacgagcaaagccagactaagtgttgtaaacgagacaagcaacgcacattgtagttgatctggccatctccgtcgatatcagcctcccgaatcatctcgtcgacctcagcctgcgtcaacttctctcccaagttggtcatcacatgactgtgtcgacgatcaatgggaatacatgagcgcaagatgaatagagtatcatatgtatgctctggttcagcatagatgaagacgacgattacaccaaggttgaatgaaaagacaacacataccgaagttcagcggcagagatgaaaccgtttccgtctttgtcaaagaccttgaaggcctccttgatctcttcctcagaatcagtatccttcatctttcgggctgcatatatgacaaaacgacagataggattagggcgctgcaggacgagcgatgtcaaagaaaacttgatcttacccatcatcgtcaaaaactcggggaaatcaatctttccgtttccatcggcatcaacctgagacagcgatcgtgtagctcgatgtcagttggaaagacttcaggggatggatggatgggtggcgtgtgatacaatagagtttatggatgaaactggaaacggcataagagaacgtacctcgttaaccatgtcagtcaactctgcctcagtagggttctgtccgagcgacctcatcacggttccgagctccttggtagtgatggtgccgtctccatctgtgtatcgggcagcccaagagtagatgaaacgctggtcagaggattcgcgttcttcttgtttgtatgtctcggcggacgcgaatataaaaacaagggactgcggactaggaggttcactgctcgtagcgcaacagaacttgtcgagccagtttcaaagggctgtaggatgggtgtcaaacccggagagagaggtgacttacccttatcgaacaaggagaaagcctccttaaactctgattggaaggaaaacatccagatatttgtagaagccttgtcagtactcggtgggctgagacgacgaacaaagattatgacagtgcaggcgacggccggataaaccagacaaggacgaaccagcaatttgctctgcgttgagatagacagagtaaggaaagatagtgagctaggagactgtatcatacaaagatcggacaacaaaccaagtctactaaccctcagactagcaagagtacaaattaaagcaagaagacaacagagtataggtggtttttcgatagagatggggattcgagacgaaagagaaagcagaaagcagagatccggagagtcaactttatattctaccttgacactggaattaatcacagtacgaccgatcccagctagtcagactctgtacataccaaagtatcagccatgtcgtattattattgaaaagagtgtatgggatatgtgtgatgtggctgtcacgatggtaagaacagaagaaagaacactcaaagatggatggaaccatggggtgtgccagtggttacggcttcagcagagatgagcttgcatagacaggtaaatgaattatgtaaaatcagatactttgtgaccatgcgctagaagcgtaagcggttaggaatactgtcaggggcggaagctgggattgataatgggagggttacgagaagagtaaccactcaatgcttttgtgtttcaaaggagagaggctcaggctcttgggattgggatgaagggctaatagaatcactagggccaaggacaggggaataacggcaatgaagcaagggcacagaagcaaggaaggttggaagcagaagtaacaaaggattcaagtttaggattttcgtctacaaatcgtcgagaacgcccgtcctgtatatggtccccagaccctagaagcatggcacagaacatactacagcgcaaagctgcgttggagacacgaggatacgctggagcgagcgacaaagaagaagtagagggttgagagatttcgcgtcacagctgacgaacacgtgtgatcaaggttacatctttgatatggttactgagactggtagctgtcgaggaaagtccaagctcaggagtttaagcttccaggtctggaggaaacaaggatactcgttatcaagcaacagagctgactgatagtaggtactgagctaaggatcctagcttcaacaaccacgtccagcagagcgcgcaagtgtaagaaagaagaaacatgacaaaacggaaaggcatgatgaatgataaaacaaggaaagcggtcacacgaggtgtattacctaatcctgattcataacataaaccactgagattcaaaaaaccagcccttaattattttccacctgccgtcgctcgcccgccagtggatttttttcttcttctttttctcttctctcctttctcctcaagacaccaccttcacccagtaaaaaaaatggtcagtgtatagattcagttgatccttgttctgttctcacatgctgtccgtcactagactggatgagcagagtgtataatgtgtgctgacggctcctttttttctttttttcctttcgaatggaactgttcctgaattcgtcgtctcataattctcttttccttctgtccaggcccccaagaaaacttctgcccctaaggacgagaccgtcaccaccatgggaccccagatcggagccggagagctcgtcttcggtgttgcccacatcttcgcttccttcaacgacactttcgtccacgtgactgatttgtccggaaaggagaccatctcccgaatcaccggtggtatgcaggtcaaggccgatcgagacgagtcctctccctacgccgccatgttggccgcccagaagtgtgctgagcgatgcaaggagatcggaatcaccgccctccacatcaagatccgagccaccggaggaactggaaccaagacccctggacccggagcccagtccgctctccgagctcttgcccgagccggtatgcgaatcggccgaatcgaggatgttacccctggtcagtattctcatttttgccttcttgtctctttgcttggtgcttaccttcctggtcataccttcaattcaacagtccccaccgattgcacccgacgaaagggtggacgacgtggacgacgactctaattgcctttatggcaatacttcctcgcctcccctcgctttcccacggttgggctctcttccctccatcggaggagatctcggtcgttgcttggggtttctttactggtcgctggccgctggcttaaatcccaggcgtgcccccatgttcgctatttaatggtgtcccaaaaaaataatgatgaaacacgtgacatgaatacaacacacattaacaacctttcggcgggttcaaccattgaaaacagtagtcttttcagaggacagcatgatttaagatgggtcagatacaacattcgaaagaatattgatatgatgcagaagcagacataacatgacatgtgcagaagacggccgttcgtccatcgccgacgggcctatcttagttcgtcgacgtcccttccgatggactttcacctaggatcttcatctcaaactacatcacttcattctctttggctttctcttcttcgtctactcgtgtttcaccttacgttttgccgacgatctctgttcatagcgatcgaaccgtacccggctacctaaattacttccttgatagatactcgctctggcgacccgatccaagacatatcggcctcagagtcaacatcgtcaacccaccaccccgtgcatatagttgtgagttctctctgctttctttgtatcttacggagttcgatattttactgaaaactaggcatcaacggtcaactcttcggtctttcattttctgtaatctatcttgtgccgaaaaaacgaaagtatgatggaagatgatccttggtcttcgtcctccccgtgggacgcgccttcatcgtcgtctgcacctcctttgccagcatcctcttctccaacacttcccagctcctcaggaacacctcttaatacgaattcagaagacgacctaggtaaacttccatcgatcgtttccagtgttcgacgtccgtctgctgactcggatctatggggtagtggcggcggcggaggaggaggaggagtttgggggtcgtctcaacaagatgaaggaacagaatcaggaggcatggacgacggtggatgggggagtagtttggagtatcaacacggagatgtatctttaagagcttccaacttggaggatgcaaaagtctccaaagaagaagaggaagaagatgagatgatgaagcaagctgatgatggatttcaaaaacctaccacagagtcagcatcaccgtcagcatcaccatcaccgtcgccatcaccatcatctccgcgaccatcttcccttaaacagatatcttcgcctcccatatcatttccttccagtccgtacccgccttctgtgtcgttctctcctcctactgagcccgagatcaggccagaacccgagttcgaattcgttgatctcgcgacgaacgacttttctcgtccaatatcccctcttccagcacatgacattccttcgaatacatcctttgatgatttcggtgactttggagagtcatccggggctatcggacctgatatagctatcgaagatgatccatgggcggtacaaggggggattgatcatgagcaagctcaatcggaagaggaggaagagacgtctatgccgaacaagggctggagcgcgccagcagacgacgatgaggacgacgcatggggagcacgcaagaacgccgaggatggaggcgagaccgcgaagaaagctgacgagtgggagagagccagaagactggccgagagaaggatggcgagagcggtacgttcatataactctcaactatctgttcatggattggctttcgatcgttcgactttgatggttttcactaatatcttaccaactctctgtattcatctatattctggatgaaactttcttcagcctcctcacgttatatccgaattgaccgagaagtggtctgttctcgcgcgcgatcgataccctgatccagacaagaaaacagttacagaaggagaagaaatcgaaaagacagaaaaggaagaaccaattcaaaccgaagtggacaagtatctcgatgtgagactagcaaatatgaaggagatgtaagtgactcgtggatctgaaggatatctgtttgctatcggttgacagctgaaaggacgatctaaatgttgatgaaataacgatctctctttctgaaacagcacgaacttgctcgtagacctaactgatcttcctccgactataacatcattttccaaacctctttatcgtgcatcccttaccgagcgccgctttcgagaatctcttacccggtctagtcgactatctaattctacatcacttctggtcgtccctcgtcgattgccttctctaaatacgacctaccaaagtccctcaaccaatcaggattctgaccgtaatactggcgatagctgggcgtctcgatctagactgggcgaaccggagaacgccgaggcaacgatcacagaggatgagcaatcgtccagaagaggtctacttagcttctttggacggaaggtcagtggccagactacgccaggcatgggcaaacggagttcctctgtttcaagtctggccagcttcagttctcctcctagcgaagacgctacaaaagttcccgtcacgactgctatcaatccttccaccacatcacttccagtttctcagccggtcaaagactcccttgaacaaactcgcttgcctgttgaccattctcctgatacatacaagccagcaacacctcggccctcgctctccactcgaagttcaagcctatctttgccagccgtttctgagctagctccgtccggctcaacgaaaatgagtccatcgacttctgtcgatagcacttccgccacttcggaaactcccggcccagtggctccctcggcagtctcgagattccttaaccgtttctcgagaaaaccacctgctcggaccacagacggtccacgcgctctcgagctttcggctggtgactttgatttcttggcagaggtcgaaggaatagaaagtggagaagatctcgatagcgatttcttgggttcatttggcgtgccttccgactcttcgtcgtccgtcggtggactggaagacttcctgaaaatcaaagaatcgaaggacattccgttaccggctcctctagccccccctcccagagcctcagaaccaattcgtttggactcaactctcggcgcatcggtgccaaaaacattggaaacgccaatggacgaactagactttctgggatccagtgggctacaaagtctggaaggatctgctaatggtacaaacaaagtagccacgtttgtagacgagtgggatgatttcctctcggatcaacagatcaaacctatggctgcttcatcgatcataccttcaatcacaccgtcaatcactcccagttttgttcttcccaaaccaccctcccttagtgtaaccacaacgttcccttctcttacaccttcgtcacctcttgtaccttcgcgaccgccttcgacatctattcccgctacgaccgttcggtctgatcctttctcgtctcattcggtcactcctacagcccctgtccaaccgatatctgcatttactcagccagtctcatctaaagatgggtttgcagacgaagatgatttcggagacttcggagactttggccagtccaccatgagtgctactgattcaacttttcaaccgtcttcgaactcttttgacgactttgacgacttttcttcgttctcgcccgcgtccactcaaccaccagcagctcccccgcatactgcaactatcattccttcaccgctctctctattcgcacaatcaccgatcaaacctgtaaggatcagcatgttgacttccgaaagtcctccacctactccgatcaacaaatccccaagacatcaacgtagtgaatcctacgctaggagtttcgaagctaaaaacgaccgtcgaaaggtcgaagcgaaaccagccactctacctgccctcctactaccaccgccttcctcttacagctcaaaaatatctgcagcttctctaatggacgattcgttgtttgagaccacagaccatatgagggtaggacaccccgttgccatcccagtttcacggacgtcgacccccatcacagcgccctccgctgcgtcgccaaaggagccgactcgcggatcgacatactcacatggagcaacctcgggttctgcacgatcgataggctccatgtcggatttgctcatcaaagcccaagaagtagatgtcgcgaaagggcattggacgtacacaggttctacgagtcccccggtcatggctttgcctcctcctccttccatgtctggatctagtgtaggaaccggagcaagttcgccaggattcttctctcaaggtaatgaagacaaactgaatgggttcccagtacttggagggatggcgatcagtgatgccgtaggatcagccacggatcgagaaacctcaaaaggaggactgtcacaagccgatctgagtttttttgatggattatagaatgatcctcgtgcttccaaatatgattgttcaagcctcatcctatagacgtttgattcatattgagattatctatattgaatgattgtttgttgagaagagagctctatttcaaaatatctagatacgtgctccatctatcccgactccgcgttctcatctgttttcaaaagcagcaacatctattcctactcctcgtccgacttttcccattcatcgtcgtctgtcacaggtggaggccggtaaacctgaggaaccagcgtggtcaaagttgatggagcctgcgacaaagtcaatcctcccaatgactgtctaacgacatccgcagaagcggtagtggaggctgcaggcacggtttcgttgccggtgggtttcctcagggcgggaggaacatatggtgaactggacctcgagatcgtagctggcgtagaaacacccgaacctggtctagaactcaacgcagaggacgacgcaaggactgttgagctaggtccggctgcaatcggggttgccccccatggtttaggtttaggggccgaaaccgaggacgatgaggatgccgatgcgaccgtggagttggcggtggaaggacgcaaagtggtattgagaagtggctttcgaacttccgttcgtcgagcagattcttgagctatgtaagcagatagaaggggtgaaggaattcgactgtcgatcttccttcgcagttgaacgctgtaaatccataaaccaaacgatcgatcagtcaaaattcgggctgataagggtttactgcaagtcgagataagtcaattacctgcgaacgggatcttgatcgacaagcgtggtctcaactcggtaaagctctgcaacctggatgaccagatctctccgagcaggcggcatgtatggcaagatttggttcattctcgaaccggttacaaaccttatcagagaaaggagatacatgtatgaataaattagtcaggcgtccataaccgattccgatggtaagaaaaattacttgctcttccagcgccttttcgaccaaaccgaggaaagcagacccatgggttatcgccaacgaaaccacttgagcgggccattctactgcgttattttgcgctgctcgggttttgcttattcccaaggctgcagcgagcctttcgttccgtttcgctttctcgcaagcgtcaatgcatcttttgtaagaaggaaaatttaaaaatcagtcaacttttttggggacgatatgtattgcacgatgaccgaactcacttcaagacgatatcttctcgagatgaactattggaaagacaagccccacatgtcgcttgctgctccattcgaccacatctatagagtcaaaccacaataacagggagaatcctcagtgtctattgacgcgttggagcggcatcagagacatcacttacgcgcaactctggatcaccgtgctagggcaaggttcggattgatcgcaggctgccggagaatggcaaggtttctggcaagggtgaccactgtacgaaaccgatcgcaaccatgacggattaacgaaaacaattctgaaagtgtattccatcaattgggacgtaccagatcttgagtggcttcccgcaaggtttcgtgcatttttcacattcgccaggagagtgacacggctatttaaaagaaacgtatacatgtttatacagtttgaaaagaacattatcaacagctgttgacttctgtaagagatcgcgagagagagcaagagaccaacagaccttttcgcaccgatgccacccacaacccaagatctctccacagaccataccgcaagatactttctcctgagagcatctcacattcttgacttcagcctttccgcaagcgcatgtcttcgtcgtcaagaagatacagggtgggcaagtcgatgtttcatggcaagcgtgggatgccttaggatgaccacacggtggagccggtcgagcacatggataagtgcaatgaagtgtcttcccacaagaaatcggaggagggataaccgttcgcccacagttgcaaatcaacttttgacaggaaagatgaagaaggttagtatatttgggttatattaaccatcgtagtatcgaaatcagggacaaacctcgtcatatgaagcttccaagcacggcgggcatcttcctgtgtggtccggagcggggcatgagtggttcccacagctcaacatcttaccacacaccaactgacactcgtgccatgcactctcttcctcgtccccagcgtagagatccaactctcggcgtttacctttggactttgctttccatgccagggggcagcaggctcggccgcattcatgttttttacacgaccgaagcaccctacacactcgctcacaaagaatttcagccgaggcggacaaggatgtctcttggaacgtatgacattcgagtgtgatctggggtgatcaagaaacaagatcaaagtcagcaaacaacgaagctacgaagacgaacgaaccagatgagaggacgagaacaaaccttagattctgcacaacggcaaggaattacgacctgttcttcacaaggcatgcagggccctgttaatgatatcaccaaaatgtagacagcaactatcagtacattgctctcacaccgttgtcgaacagaaggaaggaagacaaaccgttatggcagatcattttgcacgtatgttcacagccatccaaactcttgccacaaatactcttacacgtcttaaccgggtctgtacatttcgttctcaacccagtatcattcggaaactctttgagatttttagctccgcatggacaactccagatgatctttggactgaaggggcataagtttggatcttccgtgccggtgcgagaatcaacttgggatgacggatgaggatggcagggtaatgaacattggtgaatgccacaatcatactcctgaaaacaagtcaaaagacaagaataagagccgagccacgtcttgtcaggtgatgaacaggggatagtggtggaagaagaagacccgcaaggcgcagaacgggttgaacgagagcagaagcaagtttgctcctcaagaattggacaaggcgcacaggggccggcatgacaaggttcctgtgagaaaagatcaaagtccaaagttaatgatgacgatatcgaggatgaacaaatgcaacggaagaacgaaccaagcaaacatgttcagcatttccgcagccaagttgcctcttgcacacctctccgcaactagggatttcatccttggccgctctatgcgagcatctgaccataagcgaggtctgatgtgatccgcaaggaagcatcatagataccgaacaaggtctgtaacgatggtcgtataaacctaaccagcgattagttcacagtaaacaagacagtagaagaaagaggaggacgtacggacacgggccagggtgacagctcaatggacaggggtgatcacatcccatcttttttcgagagcatgactgagcacaagagtgtggggtgaacaagcgaggtggcttagggtccttgatagcccgacagtagcattcgtatcggtttgggacttgtcttctttgcgtctacagatagccaaaagcgtcttccgttagtgatttcgaaactagagataccacaaagatattgaacaatgatagaagatgaatcgacgaacctgacagcctgggcatctccaaaccgggcttccttcctttgctggattcgcagcgaagtccttgactgatcgagaggcccaatctgatatacatttgaggtgaaagattccccagcaagaagagcttccagcgagcttgatttcatcatccttgatgccatccaccaggtgatcggagggatgctgagaaggcacacaagaccagataggctgttcggcatgtatggaactataagatgcaggaaggtgtcagtgatgtgggagtgatgtgggagtgatgtgggagtgatgtgtaagaatgtatggttgcatagatgtactgacttgaagcaaatagcacaatcaggccagggagggtagctgacggcccatgtcaacctggtagcaagatcctcgtcctctgccggctgggggactttctcacggggaggtccccgatctctgcgctgtcctccattaccccgtccattgcgcgcagggggttcgttgctagcaactgaggtggaaggacccttgggagctcgttgacgagatcgttggttgggcttttgatcgttgtcgccagcgccaccaccaccaccaccaacagattcagatagctgacctccaaacccagcgcgtcgacttgattgattcggaatttctctagaagtttgaggagcctggtctcctgtggtaagggaagcctgatttctcgaggagccttctcctgatgcggaattagctcctccacgaccagatgatccacctcggccacctcgggaggatgatcctcctcgacgagatcgattggagtttctagggtttccgttagctgcaggagtcgcttgaggagcaggaggaggaagaatcgatgccatcggtcttgtgttcgatacagacgtcagtgtgtgcaaccaagcagcaaagattgtaagagagatgaccaaaaggactggtcgatgtgcgaaagaagcgaaagttgttggatgagtaaaagtaggaagtggcgaaggtgagtgtggaagagcacgccacatttgataaacacgtgatgttgtgtcaaaagtcattacaaagatttatagtcagcacaggttttgtcgctaatccctccccctagtcttcaccgcccagcctggggtttttctccttccactctctcactcaaaacgatcatcccacaaagtctcatctttgttgatctctcgatcctttctgtctcttgtcataaacacatacatatctacccatgtccacagatcaggacgagccgcaaggacgtctgttggactcgttcactgctccaaaggtacgtctgatgattcagtccgacatcgttcaatgttcttttactcatctgttcatgcgtgtttgttcgtggcctgccctctctcattcccttcattcgattctttcacaggatgtcttggaggagtttgcagagatgaacgaggctgatgatgtcgacccttttggagagacagccaaggctcgtcaagtgtctgccaggcagaatgagtatcaacttcgaaggttcgacagagaagagggcgtgactcgtaagtctcttgatcattcctttctatcttcacacccgaatttactcatcaagcaactcctgtttatcaccatatgaatctacatacaattctccgcttcttcgtgaacactctcttctcatgaaacccaaggttcggatccgtttgcccagaatggtgaaggctccggtgaatcttacgccgagaccatgcgacttcgaaacctcgaacgagatgagcagcgtgtaaagcaggcgattgctgataaagaacgtcaagatgctgaggaaggaatcaagaaggtcgaggacgataagacacctccccgtggatcagtcactgtggcaggagatgacacgcctcctagttcgaccgccaccaagcgtcgaaggtgggacgacgcgcctgctggagctgaaaatggaaaggatgcaccgacaggcgactggtcgacttcagccactgctaccaatggtatcaatggtaccaccgcccaaccggacgagaccccggttgttaaaagaaaacgatcgagatgggatgaaacccctgttgcgacttccgccgttgcggaaacccctaccgatagacgttcccgatgggatcaaacaccggtcaatggtgctacccccgccacaccagtcgttcctgttgcctcaacctcatccactccctttggtatgatggccgaagatcctcgtaaccgatacttgtctgacgccgagttggatgtcatccttccttccgaggggtacgtgatcgttgagcctccaccaggttatgctcctgtccgatcttccaagcttggagccattcccgtcaacaacactggattcatgatgcaggacgaggcagctgccaaggctgccgtcgatgccgctggtggatatgctcatgacgtgccaactgagatcgctggaattggttcgctgcagttcttgaaggcggaagatcaggagtatttcaaggatgtgctcaaaggtgcagatgatgaggatggtacattgacggtggaagagctcaaggagaggaaaattatgcgattattgctcaaaatcaagaacggaacgcctcctgtgagaaagtctgctcttcgacagattaccgacaaggctcgagattttggtgccaaggcgttgttcgacaagattctaccattacttatggaacgaacactcgaggatcaagagcggcatctactcgttaaagttatcgaccgagtgctttacaagctggacgaccttgttcgaccctacgttcacaagattctcgttgtgattgagcctttgctgatcgatgaagactattatgctcgagtagaaggtagagaaatcatctccaacttgtccaaagctgccggtctagcccacatgatctcgacgatgcgaccggacattgatcatatcgacgagtacgttcgaaacactaccgcacgagcgttctcggttgtggcttccgctcttggaataccttctctcttgcccttcctcaaggcggtaagcaaatcgaaaaagtcctggcaggcccgacataccggtatccgaatcattcagcagattgctattctgatgggttgcgccgtccttcctcacttgagaaacttggttgactctatcgcccatggattggaagatgagcaacaaaaggtccgaactatgactgctcttgctctggccgccctggccgaagccgccgccccttacggaatcgagtcgttcgataacgttcttaagccactctggcttggaatccgacaacaccgaggaaaaggtctcgctgctttcctcaaggctatcggattcatcattcccctcatggaccctgagtacgcatcctactacgtcaaagaatgtgtgccaatcttgattcgagagtttgcttcggcagatgaagaaatgaagaagatcgttctcaaagtcgtcaagcaatgtgcagcgacagagggtgtcactcctgcttacgtccgagaagaaattctccccgagttcttcaaggctttctgggttagacgaatggcattagatcgaaggaattaccgatctcttgttgagaccactgtcgagcttgctcaaaaggcaggtgtggcagagatcgttggtcgggtagtcaatgacttgaaggatgaaagcgagccgttcaggaagatggtaatggagaccgtcaccaaggttatcagtactgtcggggcggccgatgtggatgaaaggttggaggtcttgttgattgatggaatcatctacgcgttccaggaacagactgttgaagacaacgtcatgctagatggtttcggtacagttgtcaacgctcttggttcgtccttcttctgcctttctcgttctctctcagtggcgtttgtagatgctcatttctttcttgagctttgttcttcgcacaacaggaattcgagtcaagccatacctcacccagattgtctccactatcctttggcgattgaacaacaagagcgcgaaggttcgacagcaggctgccgatttgaccacccgattagctatcgttatcaagcagtgtggggaggacgctcatctaagcaaggtccgtgtttgccagttttgtacagatattagtcaacaattgaatcatgggctgatatcgcatcatgttttggttgatacaatagttgggagtagtgttgttcgaacagttaggagaagaataccccgacaccctgggaaggctcgttatattccttctcgcaatatctcgtattcttcaatgcgctgacattctatcaaatcgatcaattcttgtatccttagtatcatcgccgctgagacagctatcgccaacgtagttggtatgactcagatgaacccccctgtgaaggatcttcgtgagtttatttattcgaccagctcatgttgagatcaaccctgtcatatgtattgacccttcttttatttcttttgtttcgcagtccccagaatgactcccattcttcgaaacagacacgagaaggtgcaagaggcttctatcaacttgatcggtcgaattggtaagccttgtcgagttatcgtcttttttcaacgtggtaactctacgtatgtatcatcctatctcacacaatcttgtatttacatacacaacagccgatcgaggagccgagttcgttcctgcacgagaatggatgcgaatctgtttcgagctactcgatctattgaaggctcataaaaaaggaattcgacgagcagctgtcaattcgttcggatatatcgccaaggcaatcggtcctcaagatgtgttgagtgtccttttgacaaatctgcgagttcaggaaagacagagcagagtgtgttcgacagtcgctattggtaagttgggcttctttatttatcatatgtaaatgcccacttatgcttacccgacattctttgaatattcacgctcgatagctatcgtttcggagacttgtggaccgttcaccaccattcctgctatcctcaatgagtagtacgtgcctaatatgtatctttacaaagctcgtccgacgttctcgaactgacctttatgctttttgatcgaccattctcatagccgacaaccggatttgaacgttcgaaatggatgtctcaaatcgctctcgttcgtgttcgagtatgttggtgagatgggtaaagactacctactctcctgcatctctctccttgaagatgctcttaccgaacgagatgccgtccatcgtcagactgcgtctgccatcgtcaagcatctcgctcttggagtagctggattgggccacgaagaagcgttgacacatttgctgaatctggtttggccgaatatattcgaaacttcacctcacgtgatcggaggagtgaacggagcgatcgaggctttggaagtcgggttgggaagtggagtgttgatgagttatactctccagggattgttccacccggcacgaaaagttagagaaacatactggagactctacaatacaacctatcttcgttctcaagacgccatggttccgttctatcctaacctcggacacctttctgagaacgaaaatgactatcaacgacatgcgttgtactctttcctttgatttttataaacttgttccactcaatctgtcttctcttggcttcctacccttatctcttggtgtctcttctatatccctatttcgaggagggaaaaaagttctcgtattcatagtatttagcatggccttgacttgctcccgtctcttggtggtctgttgttctctgcttctgcttgggaccgcccgtctttctaaaacaaatgaactgtcactttgtacttttgtgaactggtttcagcaacccacattgataccagcacagacataaccctttagatctccctctgatgcgctctcaaacccagaccaatagacccatcaaaaagatttgagcgatagctatgaagatcaaaaacctcactcttgtcgttctctgtgcgtgtgtgggagaggtacggaccgacaccgaaacaggtgcctgggttgatgacggatctggtaagacgacgtatttgagtgaacgaagctgattcgatttagcagaatgagggggggccgatgaagaagaagaaaaaaggaaggtgagacttgatgggatacatctacagatagatcaagaggagaagagaggtgatgacatacgaggaagaaggcgttggcggaaaccatgtacaaaaacacactccaccagatcaacttcccgaagttcatgatggagacgagcaagcacaaaatgactctgcaggtgatgggagtttttttttgaaacatgaattcgtcaaactcgatatacgcatgcttttcatgatagagtttgatgatatgacttacccaacgaatttgtaacctccatacattcccatctccaagcttccccccacgccttcaccacctccaccctgaacgtccaacaaatacgtacccaacttgatcactagaaactcaagaaggacgactccgaaggcttttgaagcggtgacacccaatacttcgggatggaacctgttatccaacccagagtacagcgcggagagtaggatatacgtcacgagggacatgcctggaagttcgtcatgagacaaacgaagcggaggagaagatcgcagtcagaatgaagacgcattaatgagaacaagtgagagagaggtcaacagagagcatacttactcgggatatagaggtcaggagcatttatgtcctctcttggaggaaggtacccttcggtggaaccgtcctgcgaaagccgtgcctgcagaggagatctggcatatcagtctccgcgcctgaatcgtgctcatgtacactgtcttacggtcgatatttagaggataatatatatacgaactgaacgagcgaacttcccgtgtctccacggccataagagaataccaatctttttgattacatacccattcgtcacagcgaacgagtgtttgagcatcgacataggaagatgtctagcgaactgtataacgtagatagttcatgaacaagaaagcgattcggtgtttagctaattgcgactgaagagcagatggataaacagaaagatgaaatccgagactgactgtcttttcgacataatcttgtccggcgccgatggcactctttccaaactgcattcccatctgggctgtcgcgtcattcatacccattccccatgggacatgggagccggaagctgtctggaaagaatgtgactgtctagattgcccttgcccttgagaggacatggatcccatctgaccggcaggtggaaaggaggaggagccagccgagggctggtagccatatgctagattgatcgtacgagttgcatattgaggtgatgacagtagggcgtcagaagatgtggtgaagacaagactcgaacaagagaaacgggaaaagaaagatctaaccattttgcccgtagcctgtctgagccgggttctgctgctgcttctgctgctgttgttgttgatggatacctccaaaggtctgttgctgctgttgctgttgctgttgatactgttgcgctggaggactggagaatcgcatgtactggggctcgcccgacatgccttcggttgaggtccgctgggagggtaagctgtattctgtcgacgaccgtggtggctctggaggattgaacggagctctaggaatcgggtgttgcagaggaggaggcgtgtagttcatgatgtatgagtgctggatagatgatcgtcgacgtaagagggaaacggagagaacgagatggcggttctgtggagggactgacgaaaaaaaagtgataggacattttggagctttcttgtaatactcgattataagagttttgtagtctttcctcctatcatccatccatccatcaacaacaccatcgacgacttgcaccttgggccaatactttactcttcctaaatctctctcagccgcaactgaatgtcagactttgaggcaacagaactcgtggaggcatacggtgagatctcgcgttatccagatcatcaagcatgtctattgggatgaactctgaatccatcgctcatccccgatctctctctttcggtgggaaacatagactttctactgaagtttatcgtcattggagagggttcgtcttctttctattccctgtttggactaaacttgcaaggatcatcactcgcttaccgttgtgtgcttcttcaaaatgactttcgacagccggcacaggcaagagttgtcttctgcatcaatttatcaacaatacctgtaagcaatttctccttgatgtgttcccgcttgaaagtccatagtcggatgcataacagactctcttgcctttctagttaaagaaaacagtcaacatacaatcggggtcgagtttcagagtcggaccataccaataggagagaagcgagtgaaacttcaagtaagtctccactcgccaagccaacattgtgtcgaacgaccgcatcgcctggcgaaaagttcttggagggctgatcgaattacttcattcatttcgtttggaacgaatcagctttgggatacaggtgagtgaggaagatgatatgttaatgcatatgctcctgtatttgccagcgatgtgttgatagctgatctctttcctttggttggctgaataatcgatagccggacaagagcggttccggtatgttcagcttgctttctttcctttcacctttttgaccggatgattcttggtttgaaccggcttgctcacgatctgagaactctaattgtaattgaccagatctgtgactagatcgtactatcgaggggcggcagctgccatcttggtgtacgatatcactcggttcgtctccgctatcatatatcctgtggatagcgagtgaacatccatcggaggttataaccttgttttatgacgatacttacgcttcaggtcatgcttctcttctttttcaccttcttctttctatcgttctcgcagtcgctcgtcgttcacaaatctgtctcgatggctggcagatgcgcgcgctttggcgtctccacatctgaaggtcgtgctcgtcggtaacaagctcgatatggaggaagaaagggaggtcgatacgttggaggcgtcccgttgggccgaagagaacgttcgtctaatctctcgttttaccgtttccgccattcttcctacgcgcttgagattaactatatttgtttctgcctgtgatctaaacacatgcacaaatgaaggatgtgattcatctagagacatcctcgctgacaggcgcgaatgtgtcgactccgttctttctcgcatcacgttctgtcttgctggcgatcgagtctgggaagctcgacccggagaatgtaggcaccggtgtcagttatggagaacgtcagctgagaagctttggaagttccagcatgttgaagggaaagtttggaagtcggaggaagagtgtggatctgggagatctagtaggtggacggaaggggagatgttgttgagaggtgctcttcgatttctcttctcttcagagtttcttctttctctttctttttgtttttctttgcattcgatttcttttcttctcttttctttcggtctcctttcgctgtaactaacatcctaaacatcaactcatccactcattctttcttctttctttctcgttttttctttctttcatgatccttataacgtatacgcatatacccatctttccgttcttttctccttctcttttcactgattattctctcttcttaatccgtcaatctcttttcctcttgactctcgtatacgttcttccaatgctctccccacgggtcgagctctttgttgtcctgttctccttctttgtatcactttgtacctcgtgcttcgtacgaaccatgatttgactgagctttggcatttctttttcttttctgaccttcgtcttccttcaacgattcttggacaaaagggacggaaacacatgctgataaagctcgaggatgacgggggaagataaaggatagaagaagcagaagcggagtggctctacttcgttttagatcggtctacattaagttcccagggattaggatgtctacagatgaaacagacggacggaagatagataagtatataaacaaggatgaagagggcgattacagaaggcaagtgatggatggatggatcgatcgatggatgccaacagagaaaaagaaaaatagtattaccgaaatcaaacacacacgcacagtaatgaacgaaaaatatacaaagacaatgaatgagaaacgttttcctaaagatatacaacgatgatgtaacaaacaaatagatgatgaagaggaaaagaagagaagagaaaaacaaaagagaagaagaataaagcggtatgcacataaagcacgaaacgcaaagcaaaggcatgattgcgaaaaagcacgcaaacacagcctacctactgtctatctcccaacgaagacgactgttcctcaactgtttggttcctctatcatgcttccaaaccaagatccgatcccaactcttgtgacctttgcctttaaggatcttgccctgtctgatcatctcgagctggacgacgaatctgacgagagcgtggggtttgagcgcgggaaagcccggtcggaccacatccttctgagctgtcggaccgggggagagcaacaagagtgggagtgaagaatggaaggattcttctggatcgaccagcctggatctagaggtactctgtgaaggcacaggcacgggcatattgacgtttgaccttggctgaatggcagcccaggtagaagatgcggatggcgaagcgaacgtcgaggcagaggcagaggggatggacaatagtttaaggatcgaaaggtaaaacaggttttgagacccgccggtttcgacttcgcttggtcggaccaccagaggtgcgtacttgggtcgagtgatcggaatgtcagttgccatcttcgtcatcatcgtcgataaggtcggtagagatgagctgcccgtcaagggacatttaccaatctcgactgattctctcacagctacttcacttctcagtcgaggccgagttgttgaaggttgaatggactctaccgagaaacgcctattggtggggatgaagcgtggatcttggagccgacggttgattgcgttcgcaaacacctcccgctttcttgcgctttcggtctcaccgagagcagatgaaaagccatgcggatcagattgatggggtgagtcgagctgggtgttggcgatggcagtaggggagtctagagaccaaaagatatcggtaccttcggtagagctatcggaacaagaacttccgacaacgctattgtttggatcgtttcgggtgttgttgtcgtcgtcgtcgtcgtcatcgtcgtcatcattcgagcttggtgtgtggacttcagatagatagctggacgagtcaccggaggtggagaacgaccgtatggaggaaggcgtccaactgtgggcaagatcagacgttaagggtgatcaagagaaaggtgatgataagagggcttgaaaagacgaacctgtatgatgtcacagcatacgtattcgaaggcaaggaggaagagagcaagatcgagacaagacccggggtagacgaccgagctttgaggttgttgacgccgtcgaaacttgtctggggaaaaagcggtggccggtggggggtggaagtaaagtttacgcggacgggattgtgacaagaatgatccgaagaggaagaggtgagcggtgccgagtccatgctggtgcaaggcgatgcagcccgtgctttacctctcagccgtagtgaccgaggttgatgaaggtggctgtggttgtgaagatgttgacgttgatgttggtgttggtgttgacagcatgggttccgctgtcgacagcgattgcagcagcaaggcccggtctgacaatgggatgagttgtgggcggatggagaccaaggacgataaggcgaccttcccttccgatgatcctctatggtcggtatgattgatagcgatgtatgagtgtgtgtatgggcgtgaagatgctcttgtcccggtatgaatcgaggttcagagttaggcaagaaggatgatgaagtacaagacgatggacgatgaaatcgatcactctgtttgaaggtggaacaccccacttgatcgagttgcgattgcaacagggagctctgcaccatcaggagaaagcaaaacagaagtcgacgtatgaagcagatgaacgaacgaagagaaccagcaactgtccaccagacaacgttctaagatacgagggatgcggaacacaagcgcacaacacacatccacagacgacacacaagacgctaaaggaataatcgataaagatatgacatatgggtccaccgttggggcggtccgtgcgggctctcggcgctgaaactgctgcgcgtggcttggtaggcaaccagccagccagcctccatgcggcccgctccgggagcggccgacaaaggtggtgtatgtgggctgtacagtcgggtggcgtcgtagcccgggttcgacagtggttcggccacgtgatttgactcgctttatctctccttcggtctctgaccgtgccgatggacgtcatttgactatcagccctctttgtttatctttattttccctgttttttcaaagcattcgttgattgtatatccggtgtgtctatcggacttcactatatgcaattctctatcgactgctccgtgcactacgatgataattacgcacaagctagcgcattttgaactaattgaaagctataagccttaggcttggtgagagtgacctgaatcgatggtggtcgatacatggcccttttagactcgggtgtcctcagaccacaaaccaccctaaacactatgggctatgggctcagtttgcgcccgtcgatggagtagtatcagcagcagcggcaaataccagtactaccgatgagtattcaacgcggatgattgttcatagcaccccgacttctttgtgtcttataagctgtagagaccgaagcctgcttctttgcagaaaatttcttacgatcggttcgtctggctgtaggtcatgatgagtgacctgatgcaggctctggagttcacagacaaagcaacaggcagacagagagacaaggagacatagaaacagaaggacgacgaaacaaagtagagattcttatgatgaaggtcatatattgaatcgaactgcatgcagcgagtctcagcgatgttcatgtagacatccggcgtcaagtatacaacatgaacctcagagtagtcgagtcg

SEQ ID NO: 2302 - DNA, 8246 bp, Xanthophyllomyces dendrorhous
aacgacgaagaagggcaaggcgaaaaagcagctgtatcactctgtcgcgcatggctaggagccagatgatgagattgtatatagacagcagaagcgggtagatgaaagaccaattgaatcaacactgtgtgatcgagatttgatgtaaaccactcgggtcgactccttacatctggattatctcctgctcagattgactctctcactctctcttaacttcaaactgctcgagctctattgaaggaacatcagactggcctaagtcctcgctatcgtctttgtggcctaccacattctctttcacccaaacggtccttctctctccgactcgttcaacgatcatcagtcatacccgccacagtcacgtgatgtgactagctgtacagattatccccggccctgatttctccatcttgttcctccttcccatcgctcttgccggccgtgtttctacgcttatagtttcttttcttcatacatcccaccttccatcttcatcttctgctcattactctattgaatgtcgactgtatcgtgagtggatattgtgagtcctcagcctggtcactaagctgatgttgctgtcctttcaaatcacaaagactaccatcgacgttcgttaattcgttctggacacaggtaatctcgaatccgtctctacatcgcttcgatccttcttttactcacacccaaacactctcgctcatctggctccaaattttcaggactatcggaatggtctcgagatcctttactccaagctcgaacaggttggccctatttctattcctttgattgcttgcttttcgttcgaatcacttgtaagcccggctgtgccgctttcgtattcatcatgacattatccttcttctactgccacagggcttcgcagaagatcaagagatactcggtttcatcaagtctaggtcggcggcaactcagtctttttccctagctctccttgacttgccgccaagtctaaattcagacggctttgacaaggacgaaggcgccggcttgcgtttcgcctttagaggcatccaaggtgcgtcttcctctgccacttgcttccgctgcggtagacttagctcttgatctcacactttctttgtttgctcgtgctctacctctctcgcattctcacggccatatatcgcttccccttactcgctgacctattcatcaatcctcagaccaaagcagagcacaggcagagatacaccttcaaaccgctaaggcactcgcaaacctagtcgccgcgccttacgagacttggtcaaagaatcacaagacaagaattcttgaaagtaaacaactcgtttttaattggatatctgcctgggagaatcagtcggccgatgtcaacaaggtacgctataacccctcagcagatcacaactagagtaaactgacccggcttttggccttgccttgttcttccataaaatcctagctgagggtacattatcatgagaaagccagagacgcagaactagcggaagctgagtgcgtacttgactatttagtctctccaaatatacacaatctgatcaccgttatgatgtgaacaaaccacagagctaggttctctgcgccagagacacctatcatccaaaggtcttcccgacctgatgttcctcttcgtcgttctccctcgacttcaatcccaagttctcatcaaccggcctctccactccctctcggcggacacgtcaaaaacgattctctcacagatgatgtccctctcgctcagttacagtcgacccctgtatcggatcgaccgagaccgccctccatcactgtgcctcttgtgaatagctcctcagatcgaccatcaagaccgcctgacggagctgcctcttcgacaagcacccctccagctcaacatctgctcctagctggtctgccattgagtcatttccagctttctcaactcgttcttaaggcaagagtgaccattcccaaccaccctgtccggcttccaatcctcggagagtacgaacactgcttcaaaggtagagatctcgtcaaatttcttgcatccgaagtcagaaagctagctggaaaagaggaagatgcggctaaagagctggttgagtcttttgggctcatcaaacgggttggtatcgccggtcttgctggtctcaaacccaagggttcatggggtggcggaggggacgaagtctacgtttttacagacaaggtgcgcgtctttcacatcatcgattagaatgaaatataacactgacggtaaaatccgcttctttctttccctcgttatccactttcttaatagaccattgactcatctcttgaccagaaggtttctcttcccaactccccaacatcgccctcagcgacgacgtcacttcctctctcattcctccaacgatccagctcaatcgtcagcaaccttcttgcctcaccggctaccttatcctcttcaagcttccctccggctacgacggaatcttctgacaaagctcgagaacgagcagattcgatggagaaagcctacaaagaagccgtcgacagactcgacggcgtgagatgtcgaatggaagagatcatcgaggaatctctccggacgatgggccgatgggagaccgacaggctccgagcgattaaaacggttctcactgaataccaaaaactttcgaaggcacaaacaacctcgctcggatcgacgatcgactcggtggatctcttactagactcgtacgtgcccgagtctgatttcaaggcgatgatatcgaggtaccgcacaggaaactacagaccggcaccagaaatctttgagccattctcaagagatctttcgaacgtcgtctttggtgggaacttacagcggtgggcggagggcaccggctgggcattgccttcttctgctcctccttccaaggcatcagacacaccggacgctgtaagtagaagtggtgacaaagaagaacagagtatctcgggcaaagatgaagaccaaaccatcaaggatgaggtaaaggaggaagagacagatgaggaggagagtttgttgccaggtgtgttgagagctttgctaagcactttgagaaagggatacgagaacttaaaggacgatgaaggtttgtctttccctttctttgtcctcatcttgtttctttgatttctcagatacattggtattgataacccttacgactcgttttgaaacactttaagcgagacgtatggtctggatttatgatgtaagtttttcttctctcttttcacgaatatgcgagattgaattcccatcgttgacggctttcatactatctgcatccgactctaggttccgctacacgtttctcacggactcagaagtacattgaaggatttaccaggcggagctgcccacatacctcctgagctactcaagcgagatctaccggccattgcagctaccgtcaagtgagcaactatctttttttttccttcttccttcgttttcaaacccatttctgcttcgttgaattctcatttgtggttgaaattatgaaaaggttgtggttgttggagctttctccacctgtaggacccgattgggaggagatcaaggtgacctatccctctggtgcgcatgttcatctttctctttccactcaaactctctcttcttgttccttcgagcctgccctactggctctgcgcacatctcctgttttcttctactcttgctttctgatgcccggactttaactccttctcgatctgaccggaaactttcaatcactctagtcggtgcaggatcagatagaccagaccaagcactcaagatcgaggaattaaaggcagttttgtcaaggataccaaagattaagctgatcgtcctaaacggagtgatttcgcatctcagacagtcagtcctcgaaacacgcccatacttctgctccctgccccgtctctattgttgaaaatctaattctgcttctgactgttgtccttcaatgactgattggaataatttcctgttcttaaagactgatcgacagaacaaaaaccggcgaggagaatgaggtatatatcacgaaactgtcgctttcgctcggtcgaagtgagttctttccttctgtctttctgaaatatacctctcttttcgtaataggatattaatactaatatatgtgttgactgcaactcgttcgtacttgcatcggatcccagccatcgtccggccagaaaaggaaacggcgctatcgatcgaagatcgagctccctccgcgttcgtcggcgatctcttgaggttctacaacgagatctttcctcctgtcatcgcttccagacggacggagagagaaagggtcgtcgttaaacgtcgggcgacgagacctgtggatagaagaccctctaggtcgaacagtacgtttttcttttctcttggttttgacctttaccgtaactcttctcatttctcctgggtttccaatgttgactaatcggtttgtttcttgttgagatatttcagtgtccgaggcagaacggattgaattgcaagctcagatggtactcggcaaactgcctcgttcggccggcagtccccccagcatgacgccagctctggtgagaaatgaaaatgatgctagattagagacagacgaacaagtcagagcggctgccaccgccactggggctagtgctgggacggaaagaggaccagacagatcattaaagctgaagacatcagttatcgaagaacctttacctgaaggagttgagtcttttccgccatctcttacggttcttttcgtagtttctctttttttcttcctcagccgctgacagttgattgtcattgttttctctcaaactctttatcttgggggtaaaattcacagttcaacttggttccgcctacgcctattgcgacatctgcaccagaaaacatccctgccgttgatatttctacccctgcccccgcccttgttcaagcatccacatctacctctacctctacctttgttgcttctggccccgcagtcagctctgaaccagcggctgaaacgggtgaggccgtctctgtcgatcagacgatccgatcaactcatgaacccttgaaaaatgtcgagacctctcaactagtcatcggagaaacaaaatctgtcgaggagccgcattcagaaaaggtgactgatgtcggtacggacgaatcattcattccaccttctgaggaagaaccaactgatcctataccagcaggagagaacatgatcgcagaggaagaaggggatagggaagagatcgaaagagcagggggggaagagggtgggttcaaaccaccagtcgaggataaaggggtgactgtctcgaggggtgttgcctctagctctggattcaattctggagtcggagcgagtaagatcagagggccgagagcggctggtccgagaggcgctagggagagacaggttcgttttctcctggcattttctttttctctgttcttctcgctttcattccctttttatcttgcgcggaagaagctaatcggcatggtttcatttttcctctggggaactcttcttggattgtcattaacgtgcccagtgaccatttttaatcgaacctgacctgaccttaccttctccttattctttctttcctttcctctctctttgtctctctcgtatctactgttcctgtttaggctcttctcatcttgttctttgcttacaacacgacacgcggactattttccccttgccttatgcttctcttcttgtcttgctctgttatatcggggtttgccttatcttttgttgccatgtcctttccaacattcctcatgtgacagacaaacctcagaaagacgcgaagggaagagaaaaagggagtgagggagcgagaagtgaacaggtcgaacaagtcatctaattagccccgatctcatgctcggccaataactagaggattcggttggttggttggttggttggttggtgcgccgatgatttggtcagggttaccgtcgtgtgcgtatgcgtaagagtgacgggtaggggtgacggcaacgagaaaccccaaaaggaggaggacagagtgtcagtcgactttattcttcgagcgcccatatacgttcccggcctgttacactcgagaacaagccaaaaggaaagagacagaggaagaggggctgaccatatttgggatcccattcgatatcgggtacgaatgactacagttggggcagatcatcgatccttcttcgatatggatctacgtttgtcatcccaccatacgccacggtcaggcaagacacatacagacagcacaacagaaacagaaggcaaagtggacgagaaaaaaaagaagcggttaactcgttggtttttctgacatgtcttatctttattcttcttcgggtgttacgaaagaaagacgggaaagcggagaacacgcacctccatgaggacatggtgaagcgctcgaaggacttcttctgatgggggactcgatggatcaggtgttgtttccggcagagaagtatctccgagctgaatagttgtcgtacccaagaaaacaatgagaaaaggaggtcagtctctagggtaaaggtctctatttgatgtctcgttcttctctttcgcctatgtgtatgatctttctagtcgagaggaaaagaaagaaggcgcgactaggaaaggaaaaaaaacgtacagctcgggcggtagctaccaaggctggccactcgatctttggccagaaccctctgaggaaatcagggttgtactctgcctctcggacttcaatctcgatgtttgacaactggagtgggaaattgttggatgtgcacgaccgaacgtggcacgcgaggatgttgctgttgggccgaataaccatcagaatacaaatcacagagagaaaccaacaagtcctggtcagccagacggtcctttataaccacaacaaagatggaatgctgactgggtgatgagtctcataataacgatgatgatgatgataatggtatgtcttcaggatgattgagtgtccaaaaaatatacagaaaaatccgataagattttggatcatacacagagatcttacttaagcttatctaagtctttttcaaaaattcgctttttctttccctactctctacttctctttctcctttcttgccaggcgaccatccatcatcgagcttggtaaacgaacacgagcatgtcggcctttctttcctcccgtctgctccgcacttcggctccttcgtcctcctcattacctagtctaaaccgatctatcaaacatgtggccaaacgaccgcacctgcctaaatacaaacaagcgatgcatccttctgcctggacaaagacacttgactccggtgcgcttctcgtgtacaaccctccacctagtgcaccttccgaccggtcgaccaacgtcctcgaaaaggccgagggagctctccgaggtcccaccagaaagatcctgccttcgagttggaagatcgaagaggggttcggtcacatggcaccgaggatagatagacgtccagagggaacaacgccgtcgcctagagtcgagattccggaggagatcaagaaggagatccgttcgttaagggaggaagatccggaacagtggacggctagagcgttatccaaaaagtgaggtcttctctgttctctacgttctatctcgctttctcgtcccttccttcgggacttcactcggacaatactgaacaaactcggaactctcgtttcattccatgttcactccctcaccagatacaacatcgagatatatatgatatccgaaatcgccagagctcctagagcatacatcaaggacatgaagcaaacaaggagcctcatcaaagaacgtttgcctctcaagaaacttctcaagcacgaagcgaaacagatcaggaagagcttctggtagcctattcttcaatatgctttttctttttctttttctctcattgtggctttgtgagaaagggaaacacagctgaaggggttgagtggaacgggtagacggagaaaaataacaaccagtttgtagagcgagctgtatatcattatgattcatattctaaaaccctctacccacctactaattcatatatcgagtcaagagtgaaatgttgaactgaatgaattcgaagagaggtggtggacggcagaggattgagaagaagaggaagaagaaaggaaagagaattggagtggtatgcgtttgttaaatacgataagagagggagaacttgaagacatctcggg

SEQ ID NO: 2303 - DNA, 21003 bp, Xanthophyllomyces dendrorhous
aagagaacgagagaagaaaaagaagtagagaaggtcatagaacgtgtggacggtggatcgtgttgtgatgtatgagaaaataaggagaaaaagaaaagaggaagaaggcgtccctacgagatgagcgaacgtctgcagatttggatttgaaacagcatagaggattatcacaaaaaaaaaccggcgagtgaaacataatggtagaggggtataggtgtgcaacagatgaaacactctgatatttggaccaacaaagggagataaaaaggtctacgacctatctttgcaccacccactgtcatcccttccaccgctaatgggcggcgtgtcgacctccttgcccaaccgctccatttggtggccctcgttcagattcgtcttgctcaagttgggcgtttcgaacggagatcggaaggagcccgtggtcgagtccgccctgcctcgaaacgcgacggagggcacaagttggtccaagttggtggacgatcggttgaccgcttcagccgcaacggtagggccgtaagcggctgcaatctcgctagatcagataaaaagcaatttcgaacgaaacacacaagttcttcgatcagacaggtacgacaacaaaaaggcataaactgtgacgacccacccagcatatccatccatcatgaaggccaaactgtcgaggttcaatcggtatcgtttgggagtaagtccttttccaaatcgataggtcacgtggttgctgcacaacaaggccgagatgatgatcaacagttggacaggcaccaaagagaacgctactgtccaccacgtcttgagaacggtcctttcgaatctcaagtatttccctttgcatccaaccatgttggatcgagagtagcacgtggcagagacggtggcctcgatgaagggagagtagtacccgcagcaattcaactgcaaaaaagtggttcgtagaaaaagccaacaaggaacagaagaattgaaggaagatgatcagtgacagaaacaatcacggagagaagagagcaaggaaaagaaaacaaaaaacatccgaagggaagaaagaagaagaaaccaaccgaatcctggattcgtagcctgtcatcttcatccagatttcgactccactgtctgttgatcttcccttccaagttgaacgcataattcttgtacgtcaaatatccaggaatcacgatgagcgcgaatgaaatccagcacatgagggtgtagaccgcaaggaaggctcggttgttgaggaagatcccggcgtagccaaccaaggaggtcaacaaacaaaacgcagctgccagcgttgatactgtaagcaaggacaaaatcgagctttaggacacaacactgagatgggaagacaaggaagaggagaacattgcaagaaacacgaacagacgaggggcgttgtgttgcctacgatgacgacgtccgcatgactccaaatattaaaccagacgagaaggagggtaatcaaggcgcctgtcgagtagataatgaactgtacgaatgaaggggttcagatgttgtgaagatgagtgagcggacaagaaaacaatagagtttgagttgttattgctatatccgcaggcatgcgatttgagaaggaaagagagagagagagagagagcgccaaatcgatggggcttacgatagtgttggtcgtgaagagactccatttgaatcggttccagaccaatttcggtttcttcttattctttctagcaggatcgacagatgaatcagtaccgtctggatccaagtcgccgtcatcatccggcattctgtgctcgtgctgttcattcacccagtcaagttatatcagcctctctcttgaaggccgagcgagctccttgtgtgagtttaacaatcagtaaaggagaaggaaacagacctcggcccaagcacctcttcctccgccaacttttcttcgatgagcgtactgtccaggaatatgtctggctgagaactttgtgggcaggtagttgattgagaggggtcgttcaccgctggcgaaaggtctgtttggaggccataaagtcgaggacgagccgctcgaggacggatcgagtctcttcagccgaggagtaggttctcccgggacgaaaggatcatgactggactcggagaaagagccaagagttctagacgtggtgccgtccggacctgaccaggaaacgctggaatctgcctcgtcgattgtgttccggtcgttgtaaaacgtgccggaggcaaaacccagattggacggttgggacgatgccgactgttgaggaaacccatagacgttttctggattggacgggtagccatattcgagcttccctgtctgatgagagtaggaagatcccccgtcctgggaaaaggaggattgatgggaatgggaagactgaggggcaggatcgtaatgtccggccatcttgaattgcaagctaggaattatatatgaaggacggcgagacaagaggaagaggaagaggaagaggaagagaaagaagaaaggcgattatgcggaacacgggtcacaccaacaaactggcaggcagacaaacggacagacagatctaacttctaggtccgcaaacagacaaaagagcgagagtatgtatgtgtgattgataggattgagaaaagagtgaatgttagttcgaagagcaaggtgcaaaagggcaaaaagtgaaaaagggtgaacgagcttgggccccagttgcgcagtcaaggcaggtgagcaagcaaacaagcaagccagccttgccgatttgtctatatttatgtgggtgtgtgtgtttgtgtttgtgtttgtctgtatgtctgtatgtctgtctgtatatgtacgcgcaagtactagcctctatgtctcaagtctgtatccaccaccggtctcgctcactggtgattgttccctcgacaacacagtcgtcgtcgtcgccatcgtgctgcttcgtcgcgcttcagccagtcgtcgttcgtcatgttgttttgatcggcacggtaagggttacatcactgtgatctgtcgagtaaccttgtaccttgttaggtaatcaatcaccaacaaagtcacgtgacgtatgtcacatcgtaaccacccttgcccagattcttggcgctcgtcctactttgttttgttttgctttgctcctcttgccctatccgttgtctgaccacctttgatcctcactcttgctgttcttctttcgctcgcttctttttcttactcttactctccctcctcatttggttcatttcaaacccatccacactcattcagttcaaatatgctcaagtcatttgccaccgctctcactcttgcctcaggttcgtccatccttggtttcgatcatcttgcatcagggccgtcttcgtgtcgtacagggtgacaacacattaggggactgttctatgttctcttctacgcacaccgcgtgcgccatcgtcttcttacatgctgacttgagtctgatgcgcttggtctccttcttcttaatcgtccatcagtcgccttggctggatgcaccaggacttacaccgtcgcggccggtaagtctttgccctggtgattcgtatttgtttctgatgcaacaaagccaagaagaatataccgcgtttcgtccgattcgaggagcaaacaagatacatccaatctctctcttatcttctgtgccctcttctggccgcgatcgtgtcgcctcggatcatcaatcgcgctcgtgtcactttgtccagtcgcgtgcgagctcacaacctcttgactggagactgacgagaccctgaatgcgtccattttatttttatttttttggtccctatcttttctcgtgctctttatccaccacaggcgacatctgcgactccatttgtatgtgtcttttccctcggctctttctcctcgcggctttctcgatgacgctcatgagtctgaccttgtacgcgaaccatcttttccttccatccttggacctgacagccaaggaaaacaaggtgtccaccttccagctctctttcgataacaatggagtcgacgacgtctgctctaaccttcaggtctgttctctcgatcttctgaccttcctagatctacctccagtttttctgtactgatgctgtacgttgttgttctcatctttcttggcttgcgcgtcgatttgggtaatctttgttggggacgaatccagatcggccaagagctttgccttggaaccgatagcgccgactgtactgacgtctacgttgttacgtctggcgagtgagtcgatttctcttcacttttggcatgttcccttcgtgctgtcttactaaatgtgttattcctgtcttgatacattttctagtacctgctccaagattgcttctgccttttctatcgattcgtcgattcttttgaagaacaaccctcaggtcagcatattttgacttaactcaggccacaattcgtatgatcccacgtttgtctgatcagacacgctatccgtcaccgcgcttttttagatcgagaccggatgcacaaacatttacgttggcgaggtgctctgtgtcgccgctcaggcgatcgcttatcccgagaccgtcaccatcaccagcgagaccagcccttcttacctggcttccgctgtacgcatcttctcctgtctgtttgtccttctagggcctagtgacgagactgattgtcatttgttttcacgttatgcgtaaacaatctcaggatgcttacgaggagcttccttggtgcgatgaggagtaactcgccttctcccttccccacttattcacaaaatctgagaattgagctctatcccatctctctccttacgttcgttgtctaccaaagacactcttttatatcataccatatataattcgtttatatattcgcgcaccctctttcttcttcttcttcttcttcttcttcttcttcttctttctttgtccagtggtttctcccctcgccatttcactatattctgaccgctcttttcttccttgtgcattggtctcttgattgtcgatcctttcgttcatcctttgccatctggctatccggaatataccctcctcaatcggctacttcttttgattttgtctatgttctaaccttgccttctgctctccctcgtcattccctctcgattccttctttccctatggtttatcatcttgaccacacttatcataataggcggacacgcatggaattgtgatatgctatcgcgatcgatgttctttgtgcttagttccctagcagcaagcgatggcaacgataaaaaggacagcatgacgtgtaaccaaagggttacacaaccctgaccagacacacttgatcgtcacccagagcacaattctccgtacatcgtcttccatctcccatttaacatgagtcgacactcagacacgatctcccttttgggaaaagatactttcgagctcgttcagaacacgcctattcttgttgtcggcgcaggaggaatcggttcagagcttcgtacgtccgccatccttttggttgccctcgatgttctcggtcttatattcatgatctcgaaagacgaagctgaatctgccttcatccttgtgatcgtctgaacaacactactttagtcaagaatttggttctcgttgggttttccagaatcaccatcgttcgtggtttttacaaaagtagcttgaagtacagcgcccatgtcctgatcgccttcttcttcttcttcctcctctttccatcacccttgatacatccttctctttgattgaacaggtcgatcttgatacaatcgatctatcaaaccttaaccgacaattcctattccgaaagccagatatatcgaaacccaaagctttggtagcagcatctaccgccaaacagttcaacccaaatgtagacattgaagcacatcatgcaaacataaaagaacaacggtttgacgccctttggttcaaacggtttgggatagtgttcggagcactggacaacatgggtacgtgtttctctatccccttggtatatattcaatcgctttgttcacagtgaatgttaaatgaacatttttcttttctcctctattgtttctttcttttcgctactgaatgcgcccggcaatcggtcttgatacagacgctcggcggcacgtcaacaagatgtgtatcagcgctggtgtaccacttttggagtccggaacggcaggttatgccggtcaagtcacacccatcatccatgtccgtctttgctcaagatcccgacaactttcctccatttattcctgtctggttcgacaagctgaccttagtgtcttctattgattaattctatgccatacatagggccttacggaatgtttcgattgtcagacaaaagagaccccaaagacctttccggtgtgcacaattcgctcgacccctagcactcctattcattgtatagtctgggcaaagagttacctatttgtgtaagtcctctttgcactttcctctgtctctctctctctccctctcttttctgaggcttcttcagcgtcgcacatccgagactgatttcaacttcggtcctatagccagttgtttggagaagacgatgaagcgggagagacatctgaacttgacaaggctcaagccgaaggagaaaatggtatgtttctacataacacttcctattctggtgtgttcgttgtttgctgaaaccgatctcaaatcttcgattcctaccttcccaaaaacagctgcagagattgaaaacttgaggaaggaagccaatgcgtttagggcggttcggaagaggatgatagaaccggatgggccgaagcatgtatttgaaaaggttgatcttcttctctttgcggtcgtattcagtcttttaacacccgaaccaacgctgatacaaccttcttctttccaatactcgttctttggcatcacaggtctttaaagccgatatagagcgccttttgtccatgtcggagatgtggaaagttcctggacgggtgaaacctaccgcgttggactacgacagtattctggacgaaacattcaaactctcaactgtccagaaagcaaatagcgcgccatctgatagcagttcttctactactgtgacgtccaagaagaatgccactgttctcaaggatcagaaacagctcagtttgaaggatactgttcttttgttcaaagaaaggtgaggaacagcttgtcttcgtttcctcgttaggaaacttctttatataatcgaagatttacaccaaatacggctgacacttcttttttactctcaattcttagttgcgaacaattggcagcacgaatcgcaaaggacccttcgactccacttacattcgacaaagatgatcaggacaccatggattttgtcgctgctactgccaaccttcgaacgacggcttactccattgagactctgactaaatttaaaattaagggtaacaacgatccaatataagcgcgtgtttcgctattgtgttcaggactgcttactgactttcctttccttctttcactttgatctttgtgcgggaggtagagatggcagggaacatcattccagcaattgccaccaccaatgctataacagctggtctcctatgcttccaagccatcaaaattctcaccaacaaatatcaagagctcgccaacgttttcctgacatctagacccgcacaacctatcatccggatgagacctcagaaaccgaatcctcagtgtggtgtttgtagagatgtctacattcctatagcatgtgacccgtccagactcacacttggtcagatccttaacgagatcgtcaagtccccatcgacaaagacgaccggtctgggatggggtgaggatgcgaaattgagtgtgtttgaagcgggcaggctcttggccgagccggattgggatgatgatccagattggatggataacggaaacaagacgttgaaagaattgggagtcgaagtggggatgtggttgacggtggtcgatgaggaagatgaagaagataaacatgacaacgtcgttttcgcaatctgttcactgtacgtatccgacccacctctttctgtttttgctccccttttcttgttgtgtgcagaaaaatgctaacgctttgatgattggcatctatctctggtctttatctttatttatctcacatcgacttagaagcgattcgacggcgaccgaaccatacattctaacttacccactccccgatgttcctactcgacctcaaccgatatccgcccccgtctcagtctctgacccagaaacatctgaacaactcgttcagattattcaccacaaacgaccgttggaagatgacgacgatgatgttgagctgatcgagggtgagagtagggctaaaaagagaaaggtagaaggtggggaggacgttcttgaattggtggatgatgagattgagatgctcgattgatttcatgtgctaccttgtactccttttctcttctttctgtctcatccctcatattcatttcacactgtcacgcaaaaggaaaaaaaaaagttcgtcatcatacctctacaatcctttcgaacaagacttttttccccatcagctttgttgccctgtcgactctgccagccaagacggacccaggctcggtcttacccgtccaagcggctgcctcccaagtcctttcttccttcggaacacccatcttgtccaacagagtttccatctttgtaggtaggatgggaaggagcaagattgaggttattcgtagagtgttggatgcatagatgtaagctcgttcaacggaagaggtagcagtcgtcgatgcccacggagaatgggatgagtagaacgcgttggcctgatagagcgcgatgtagttcgatgagaaggtggtttcagaatcagttttgccaaacgactggttcttgacgggatctcgtattggactagaggagatgtctaggtgctttactcacttcagcgactacccttaggatctccatgatggcgcttgaaatctcgttcttttccagtttcttctctacgatctctctgatctctctcaatgacttgtctatggtttcttctccctcgagaacctcaagctgaatctgattcgacgatgaggatgtcgtcaactgagattcagggatggatggatcgagaagtctattcgtgattttgggtccgctgaatcggttcaacaaatttccgatttgatcagagagtaacttgtggaacatcaggagggcactataggagtaatctgacgatgtttgttatccgacatgagaggcgcagatagacacaaacaacagaaaatcggagttgattaagtttaattcaaatcttagaaggacagaagacacagactgacctgaatcatcggccagactacctccaatgcccatcaaataagctcgcacactgtccacaccggcggactcgatcgctttgaacggatcggccacgtttcctctggattttgacatcttgaactgatcttgagtccaatgagcatgtacaagaatcgacttggggggaggtagagacaacgccatgaggaaagctggccagaagacggcatggaacctgttgatcattttgaggaggacacaatgagagaaaagatacttgtaaatactaaagtaaacttgtttatcatgaaggctccatgagaaaaaaaacgtaccggacgatatcctttccgacgacctgatagtctgctggccaacccatctgctcagcattaactccctccttccaaggccatcccagaactgtcagatagttgacgagcgcatccatccagacgtatatcgtatggttttcatcatcgggaacaggcactccccatgtgagtcttgaggatggtcgagagatagaaagatccttgagatcctcaaagtacgtcatggtgtttgacctgtactcatttagcggcatagctgtgtaggttgaagttccattccaagtcaacgacgtacacaatacaataacaatataacaaccgtaaatgtgactgaagggctaaaaaaacgaaccttcggggttttctgaaagccacttgagaagtggctctttgaaagccgacaatctgaacttgtaattttcctcctcggaccactcaaccttggaacctgattcgatagccacctaaattcaacatgcttggctaaagtatcagcatatgggtgtaccgtctttgtatatgtgcatctgcgcaccttgtttccatcggggccttcttgaatttggctttcagtataaaagcattcatcagagacggcgtaccatcctgagtgcgatcctttatagatatgtccccgggcaaggagctctttctagagtgaaagaatcaccatcagtgatttatggttagcggtggcccatcaagacgccgacttacttagatcagcttcgtggttgcagaagcagacgggacgcctaaaaagaaggaacacaacggacgcacccacatgtgctgtacagcgatcttgtgcctatcctctgttgttcggatgaaggtagtatacgagatgttggctgcgctagccaatgcctgttccatccgaaccaaaaataatcgcaaagcacaaggcgcatggtatttctggatatgctctcgaaaataacaagagacgagcacgcgaatagtttactcaccttgaatctggctgagttggcatcgcacatctgttgaggtgatatcttgttgtctttcgcagcgttttgaatcttaagaccatgttcatctgtacctgtagaaaagatgactcttcggtttggttgaacgagcctggcataacgagctaggacatcggctaagagcatcgaatgcaagtgtccaatatggggtgctttcggagaaggaaagagatcggcagatgagatttccttcttttgaattgtgtgtaactttaacgaaagaaaactatatgaatatcctaccagcattgacataaaatatgggggtagtgatgtagaatgggcttggtgtcccggaaagaggtgaaggagaggatgggagaagattgtaggccgacgaggacgaagagaacggacgaagcgggcggaccgggcaagacaaaggggggagtttgtttgaacaaacgctgcgccctctcagaaacattgcgtgttcaagtgagaccagggagatgaatgaaaagaggaaagaaagatgaagataaagatgaagataaagatgaagataaagatgaagatgaaagtagaatcagaggtagaaatgtaggtagaggtaaaggtaagaaagaaccattgtggcgccaccgtcacgtgaaatcgaaggcagtgtagcatcacccgggttgtctccttccggcctccttcgtctttaccttgtactcgtcactcttcacctgttgctcgttgccttggtgcaaacagtctttcaacatacagatacgcgtacagatacatcatgaagctgtccatactctcttatttagccctgttgctgttcccaatggcaactagcgcgcttcacttctatctggactcgaacgaggtcaagtgtttcatcgaagagctcccgaaagatactctggttgaaggtatgactctttctttctcgttctgtgaacctgatatcggcaacgactaagatctatatatacttcctgtttctatcaattcaggccattactcaacattcgaatggtctgatgaatctcaagactttgttgtcaacgaaaagctaggcatccaagtggtcgtctctgtaaggatctctctgattctgtttctcttcgatcggctcttcagttattcaatgtgtgccgagacttgttaacacttatacttttgaaacccgatcaatctatctcgcaaaccgataggaaataaccacaagagacgtcgtggtgaacaccaggggacaatcagatggtcgatttaccttcacctctcatgaagcgttcgtccattccttttctactcattcgaccaacatcttgtttctggacagagctgccttgagagagctaactgtcttctagcatgttttgaatgatttatagtggagatcacaagatctgtcttcagaccaatagttcaagctcctggttcgccggttcacatgtcaagatgtacgttctcagatctctgcccccctacccccttgcttcttgcttttcacctttcttttctaattgctaacttgatctctccgacctctccaaactcaggtatctcgatctagccgtgggatccgtcaagcatgatcatgagtacggacacttgactattcttccatcttgtacttacatctccttgacaggtcttgtcttacctaacctattccatcttttggtttgaacaaaaggaacgacaaagcgcacttgtcagatctggcatctaaagtggttgaccttaacaaaaaagtgaacgatatcagaagagtgcagcaattccagcgggaggtgagaccttctgtttggttcatcagacaggcagcattgtttctgacatagtcgcttttgttatatgcttatacctaggccgagtctcagttcagagacctgtctgaatccactaactcacgagcagtctactggagtgttttacaattggccgttatcttgtcagtatcctctcagttaaattgtgatgaggcgatgaaggtttctgttgaggctgatcatttcgatgccatcttcctcgcctcgtagtggaacatgcgtttggcagacgaggaccttacgcgtatgtaccaatctctctttgccctcgtttcctctttacactggaataaattcactcacaaacctttgccgtttgacttgatgcttttgcagaaattcttctcggaaaagaggctgcgctagacgaacaaacgataggaagcttcccattttcatacccattctcatctcctctctagtcatctctctttccttctcgtcaataccttcaggtgtctcttcttagtgtgttcttgttggttctgatgaacgtttataccatgagagtttgaaagtgatggaagctccggtgtgtcttcggagccgctgcgcctttttcggatcctataaacccgatcttgtttcgtccgcccttgcacagacgattctttctcttcattacaaccatcccatccatccaaccttgcaagattggaacacacacggtcatagcagacccgtttgcgaaagagaactcactcgcaaaactccccagcctctctttgattgtttccaccatcgtttagacggatagacgcacacactcacttacatacactcatacaccgatttgacccgatgtcaattccctataccgaagtgatcacaggcactcaatgctctgctcaccgtccaacgtctgtcttccctgcttgaaacctttttgctatcggatcatgaatctgatgtctcctcgctctgttctcctctcctgatccttctccgatctctatctgctgttcaaacgtcggataccttcgatctttcgctatctcctttcgtgaaactaaacattcttacaaattataatagaggaacattccctgtgaccttgcctctcgaggtccaaagacagatcatgatcgattccttagatcggacatcatcctattgtccaaaagacaactcggctgttctcaggagaaatgctcgatttttggtcaagatgtgtatggtcagccatgattggaaggtaagaaaagtttatccattttactccgctcgcggctcctgtattctggttctagtctttggggcatcagtcttctcaagaagacggagggaacaaggggaagagaaaggaagggaaggattcccaagccaagcgtgggctacgattagcccctgaccaatcaaccctatccgagtccttgctcagacatgacaaaagaagtcctgcttgcgagccgccttgccggatttacctggcagcttttggaatcaaagttttccggggatctccgtcaacaacccgctgacattcttccatcttcctcttccttccatcatcgggcgcatcttggacgatgtcggtgacacaatcaggacatgatctatcctatcctctaccagcggatatgtctccctcggctcaagcagcttttcagattcatgaacactatctgtgcgtctccctggttgggagagtataccgtgtacctccattacttcgacgaagttcttccaccaaaatttctgtaagttttttttgtttcattcgtcttgatttcacataccgaggatcttcttctaaacgctgttctcttgttcattttcaacacatgtcgattcacatcgaatttagcaaagttatatatcaacttcccaacctgaaacatttcctgactcaagcagatgctagtacgatccttgatggagatatcgagccaagcaagccaaagcttgctcttcagtcgttggagatcaatccgggaatgcacgatggcacaggagcttacaagaacgctaagattgataggttcggatatggtttctttcccaatgtgattttttgtgcaaggtcttactgattccatttcgatatctcctcgtaacgtagatggcttgacatgagcaagcttgcgtgagttcaatatcactcatgcagtctcaccttcttcaaatcttccgaatactcattttctttttcctttcctattgtcgaccagttcactatccgtcatcggcctcgaaacccccaacaacatcttccagtacaacttcccattcctctgcgaacttcacctccagcacgctgacgacgagttggacgagtacccagaagaacatacgcttgtcctttccattcttcgaaaacttggccgtcagctatctctactccggttagatgaggcttcaatcgaactacttgacgcgcctactcagctgttcgaactctgtcctgaactcgttacactctctataagtggacttgtcctagatccgattttcaaacaatctcacccaaagctgaggaaccttcttttgggtgatccgtggagttatcatgtagaagctagagagctagagacagagggacatttgcttcatacattgaaggaggaagacaaggaagcggcctggtcggtcatcgataatgccgataagtacaggttcccttctctccaggtcataatcctttggaacgtcgactacgcagaggtcagtcttcctttttccatgtcctttccatgcttcgttcagacttatgttggaacgataggtacgacacagatatactgactcgattgtatacacaccgacatgatctcttctcttttcctcatacgctctctacgattcttcttgtctcacacccatctgtgtcataggagcacaatcggttctcgaacgatatcaaacaaatatctgaaaccgcgttcgagaaacacgggtggttggtagctgatagattcgcgcacggtcgaaacccagcttggccggtggatactggcttgaaagcgaaacaggtgaacaacgggtcgacggccacatcgacaccaatgacgacggcgacggtgactgttgaggtcgtaagattggattgatacaacgggagaaattgatggtggatttttctagggctaagagggtgtacacatatagtttattcttaatctcagttctttccgggaacttttatctttatcttttctttgctgattttcttatgatctcgatggataacaatgcagtgctgaagagaaccgtcggaagtcacagcatacatcgaagaggaagtagaatgcatatggcggaaggatatcctcaactagatctagccagaaaaagcccttgggtaaatagagacagaccagacggcagtgatggaaaggacggaatagcacaaaacaaaaggcagaagacgagaacggaaggaatcacaagagagaaaagacacgttccacttgttctcacatagacttcttctccagccagttgttgaacatctgagaagcctctttcggtttgtccgtggggaccatctgttccagttccagttccgaaccgaaacagagcatgaaatacaaggtaaaacaggggttggttagatgaacatacttcgggaataaaggttttgtagaactggagagctgaagagagagagtaacgtacgtggccggctccgttgattgtcatatctacgttccgaaaagaccaaacgacaatcagatctcaaaaacagctctattgttcattcttcgagggggggggaaaacatgcgaccaaagaaagaaagcttacaagtcaatccaccacgaccatcctcagaggaaagactcttgacttggccggcgacttgatcatcaatatgccaatccctggtctcttgcgcggcgtaggcttcttggccagaccattctaggttgttcgtccaaatggcatttccttgattttcgtttcccggagatcgaatggacgtgtggaaaagattgaaaggggaagaattaagttattctgtctctttttcttaatcaagatacgagtacaaagaaaaagagtaacgaaccaaggaagttacagatccaatcgagcttcccaacataaatcaagacgtcgatgtcatgctccagaagcgaagccactgacgaatcccaaatcagtaagagagaatcctgagatcagcatgtagtctatggttgttctgggctcatcctagatgatgaaatgaatttccgccagaaggtaaagaagaaactagctgaccgtagtaccaagtctttccagttatgtcaccagccgcgtggaaagcagaaccaacggctggactacagctctggaactttccaaggtcaggatttgctccaatcttttgtcggacccaaggttggtcgagatatttcgcgatctgtagtgttcatcagcccgtcggattgttagcatacgtggtagtaaggcaatctttgaatgcgcagaagagaaagaggtggatgatagagacaaactttttgagtctcagggtagcacaggaactcggagagctcatcgatggtacatgacttagaaatgtcataaggctgatcacggtgaaacgaagaaaggagagagagaaaatagaattgagctatcgatcagggaggtatcagaggatgacaacatactcacatttcgctcagcagagaagaacggacccgagaccacttccgcgctaggggtaccgaagaaaaagaagaacgagaatcagattctggactgcagaaaacgaagaaaggttgatcaaggacgttttgaaagaaaagatgactcaccagaatgacatcgcgttcccacatcccagtgggtcggctcgatcaagacattcgtccttgagcattttttcgcatctatacaaaccggtctcgtaagagaaaacaatcgatcaggcttctgtaaagaaaagtctcgaaaagagttgtttaaaactagaataagagaaagacatacctaggaatggcagccgccatagcctgacactggaagacgttaagaataggtccaacgccggagaggttggtgcaagagtgttgatagtatcctcgaaccatggagtatgtatcagttaatccgtttctggattcattcagataacaccgtgtcagcggacagccgtagtgattcaaaaggacagaagtaagacaataatcagaggctcacccgataagaatcgacttgagattgataggttttgagccaaccttgatgagtgccttgtttccgtcgtagatggcggcggcaaatacagggagatatctacctccgtaggactctccagagagatgcaacggtcgatcttgaaactctttgaaggtctcgataaagattgagatgaaggcctgaacgtcgatcgcggcttgctcggctcggccgacaatctggccgtgttccgcatatgagaatccgactgtgagccgaagcgtttgcgtcagcttttggtaagggtgctgatatacaagatgttacatgaaaaagctacaaacctccgatgggctcatccaagaagaagacgttagccttgttgttccaagaatgaggattaggcttggtcgttagatttccatggccttggtctacgacagagcaagggcccaactccatgaacattcccattgaagaactgcaaccggggcctccgttgatccacatcactaacggatccgtctcgggcttgtgcctagattcgaagaagtctattcataacacaatctggtaagcatgtgcgagaagagagagcaaagaagaagtaggatagagaaacccctataggcgatctcaagtattatctatcgctcggattcggccaagcccagtcggtcagatctaagattcaagggaacgttgaagacctacagaaaaagaggttcttctggttgccgacatcgaggtacccagtgaaggaagagacatctggatcacaccaaccggtggtttctttgattctgactgaatgagaagggaaatcccggtgttcaagtgtgacaaactcgtcggcctgtcctttgagatcggccagacgggcattggactgatggttgagcacacgatcgaaagtagagaacgagtggataggttgattggccgaagtagcgaaccgaagttgctcggccgagaccaaagtgagcagcggtagaagggacagaaggagtttcataggttgtcccagaaaaaagaggcgatggtggatgttagataggaaagagtgagagcgaagagagaaacaacaggccgaaacaggaagaaagaaggcggagggaggtttgtaatgtggaaccagagagtactcttctcggcgttgtccgttacggccacatgggaaaacatccaagcgcacctcgctacgctctcgaccgccgaccatcgatcatcatccatgggcatccttacccttatctcgctttctataattgcaatggttgctgtggctcgccggaaaacattggccaaatctgtacccaggaaagaagcgtttttaggcagcaacctcatgcatatcaccaaaaatcaagacatgtacgagaaggaggagaaagagagagagaaggaagaggggcaagaagaggatacatcggagaaggccagaacgagacctatccggctctgtatcactggatttgggtaggtcgactttcagtatatgcgatcgaataccgcctgaagctgaatgctctgcctttcaccatctgagcagctcgttcgacaactacccagggaaaaatccatcgagcatgaccgcccgacatctccacggacgagtactttctacgagcccttcacctatctcgtcgattagttccgacgaaccgcttcctaccactactctgccctcaccttctcctgtaccggaccggaagatcgagatcacatttgtcggaccggtggacgtgacgtacgagaaagtggcactcatggtgactgagcttcaccagaccgatgagtttgatgcttttgttagtcgttccggtctcctcacccgtaaactgtgtactttagttgatcgactcgttctcggtggagctgagacttcaaaaggtccatgttggggtcggccgttcgggtgagcttcgggtggaacaacggtcccgccgagttgggtatgacaaaccagggtatgacggtcggctttgtgagattgtggatcttgaaagcggtacaagagggatcaagacttggcccatggagggtcacaaagatgagattcggtcaaagatcgattgtgacaagttggttaaatggttgaggtctcagatggacgtcaaggtgggtatgaccgagttatctgggtatctcgttcttgaactgaaccatgcttgaaccctcagcacgtgctaccttcgacagatgccggtttgtatttgtgtgaatacatctatggggtgcgtctcttctttgtcgcttcagaaattcccggggatctcagatcttcttctcaagagaatatgatcttggtgttgcatctcacgtagatgtctcttgcccaatctatactccataccaagtctggtgatggcagatcgccagcgcctgtgttatttgtccatgtgcccactctcaaaacggatgccaactcggatgcattctacacagagtctgaagtgagtgagatcctcgagcgggtctgctggtgggtgggctcgactgtttgatgtgtgtacgtgattatgcctacgtcactttaggcttcccggctctgtccttatggatcatttgtatggaactttctggacgagagaattgtaagaacttctatatcggatgtatcttcttctacccagacgagccaggtgatgaataaaacaagaaaagaggaaaagctcggatacagctaaaacgaagaattcagcaaaggcggaataaagcttggggtagaatccaggcacaagccgaaaagagatttgaccgatgacgttgccatttgcatccctgaagttccgcctccttcacctcagcctgatgttcagtctgggcgggctaaatgctggctggtttggacggttacgacgcttatgctctaaaccctaaccaccgtcggatcagtgagatgcgcgggcagcggtcatagtgacgtaagtatgcgcgcatgcacagggaggcaggctttttgttccgaaggtctttattcgtgaaagggagtgatgatctcatcgaccctgtgcctggcccgtgcgttctttttttcttgttcctgcctttcccttccatctgagtttctggtatatatatcaacgccttttggatccccatctctttttgtctttttccttttccctcatcaaactctactacattctcattcaaactcaaaactcttccaactcaacccttcacccctttttaatcaaaccactttacaatcatggacgccgtcaagtctttcttgggatctagccacaaggttagcatatacccttcccatttgatatgtctgtctctcccatctccctgacagattccatctcacttgctgtcatcttttaggagggatccaccgaggtctgcagtgagatcgcccctgaggtcgtccaggagaccagtaagtgatatgtggtataccttctgagactagccgattcatcttgccaatta

SEQ ID NO: 2304 - DNA, 427 bp, Xanthophyllomyces dendrorhous; identical to SEQ ID NO: 848

SEQ ID NO: 2305 - DNA, 5691 bp, Xanthophyllomyces dendrorhous
caagacccaggccggcgatgccgtccacaaccacggagacacccagcactcgcaccacttctactctggcctccccaaggttcaggacggtcactctgctgtcggaaccaccggtgcaccatccgctatccctggtacctccacccacactgacgttgctggtcaccagcacaactctgccatctctgagaaggccgccagcgctgtcgagaggcgatctgaccgagtataaacgtttgtttatggtagctaatgtgtaacggatctgtctttgttttgcccttctattctgcctctttgttccgacggaaccatcttcttataattcatctacacaatcttcatcctttaacctacctccaaccaccagtgttgtttccaccaacccgaccacctgtctgtacttctggcggctttgtattcttatgcatgaaatgtttattatcgttttcatcaccgtcgaggacttatcttggctgtctaaccctaacgatcaaaatatcacacgcgcgtgttgttatttccgaccaacatccggacagggagcattttggatcattttctcttacaaccatcgactcctttctctctctcgccatctgtattctcccaatcgatttattcatacagagtcctcgttctcccctgtttcttacaagaccaaaaagagcgcaaggggcccaaagacgttcttgcttcctatcaactccatgccctacacatctatcctcgaagccctcgcctctgtaaacctgctcaagccatcgtctccttcttctagtcctagacctgacatttggacaatctcctagggcgatgtctcttgatccaaaaaaaaaagagaacccctcaaacaaatttaagcccaacgtatctctccttcgatcatcgaaccctctttcgtaactctgatgtttcttcttctcttctcttgtcggaagaagatagaggtctcacagagagaacataccttggatgtttgtgcctgcaactacacctcattcttcaaagtccttggaaacccgagctctagtcttgactctctttgttgtcgactgattggggagggaaatctctccctcgagtctctgtccctgtttgggggagggattttgagaatgaggtgcaagccaactccttgggttctactcggaacggttctttttctttttcctctttttggtctctctctttgagataccttggagaagaaaaaggacggcgtctgggcgttttccgtcttggttgatggagcctgacaggcggtcgatcgagagatgggtttctccccctaaccctaaatgagtctcctttcccttacccactctcgttgccatcgtccaaactggactcgataggaggttgttcggttcccctcggtcgataccacacaaagaggcggatctctatagctcaagatcccctcatcttccataggatggaccgaacgagctctacccttcctaaacaacaaggtagccaatcctgcgtccccccttcctacctagcgtaccccttcacccgatgacatttcttcttgatgtcggcaacaccgggtcgttggcgagtcctgaatctgaaccgatgttcggaagaagagaggacgggttcttgggagataaagtggcatccgatccgggagattctgtgcaaggtcaagtgttcaagcagaagagggcaaccacggacgatggtcaggtttgataggtgttggatgggtcctttcctcttctttcctttttttataccaagagtagaaaagggatgagcgaggaaagagacgagcaggtaggcttgcgactatacagaggcggatcttttcggaaaaagaaaagaggatacctgttgattgggcaacaaagagggttcccttggttctctttcttgtgagtgtagccctggagaggagcgcgctgtcgtgttgttgtttgattatgagtttacatatggaggagccccttgttttctcaatgaacaagggagagatgcatgggtatcgtgaaggaaggacacggaaattcgtgtcctttctcctgctttcttcaacttcggtcaagaaagtagtgggttggaagggcgagcatcctgatctaggttcgtctatcgatgcattcctctgtttctcttctcgtgtctccgtcaagattagggaaccaggggttatgtatatcttgccccttgacctctgactaatttcatcacttttattaggtcagacttgttctcttcgtcatcccctgaactcgttcgatgatgccttcgagatgctcttcccacttcgctggaagatatctcgtttccttctcagaacgaatatcgaggcagagaaagggttcttcggtatggtcgctcgatggatgcttcttttcttaaggagaaacaaacaaggaaagaaagatgaagattagacgaagatattgaggattcatagccttcttctgtctttttgttttctctcgaagaactccgacccatccgatcttcctttctttcttgctcgacacggtctctcctcacacctacttagtacttcccgagtctttctgacccctcttctctcgccatgttcagtagagagtaaacgaaagaagcaaacccaaagacactctttagggcaggtcatccgtcagggatctcgcccgcctcactgtgattaacccctctgagctcctcgcctggcgactctgttcaccttggtcctcttcctggtcctcgccgttctcatcgatcttccctcggtacgctccgctcttctcttgtccgatcgacagaccgtcttcttcccgaagaaagccccccttttcagagcagacgtccttctccttctattctctcgctctctcataggagtaggggaaaagaacggtcggagacatgctagagtcaaggctcgattcctgatgggagcactctttcacctcgagtgggatgaatgcacgttcagttcgatcggaagagtcgacgcgtcctatcctgtctgggaagagcacagacttggggagttgaaaatgaaatgttggctgtgggacagaagagggcaacggtctctttctctcgaaaggaggaaagtggtggacattgagctacgttcggtgtggaagtcagaagtgtggtcatcatgtaaggttctagagaggagaggttctctatcttcttttccttgaaatccaaggacggctgagtgagcagggcggagacatagcaagatgctgtgttggtacgaagaggagcagaaacagagcaagaagagaggactcaaaaggtccttttcagcttggtggattcttcggaattcaaaaacaaaggggagggtgaaagagtcgagaagcgcgcgcatgtccgtgtgtctgttctctctttctctcgaaggagtctttgatctctcctttcttttcggaaagaggacgtggatagcgagatgaattctctatgagagaacgtcgaagaccttttccatgtccagaggagttcatatcgttctttcctccacttctttccctaggttagaggtggaggaggaaactatagttcttcttttttttctttctttcttctcactcaaacttatttttctcaccttctctgatgaacgggtattttgtcttcttaagtcgaccgtttatcagagaaggtcatccttctttaattcgcatctccttccaaactcaagctcgctcatcctaccgagacgattgctttccttctgagatggatgatggagacatgtatgtgatgaacgatagaacgggacttgatctaaaatgcaagcaacggacggaaaggaacgacaaagacctaaccacccttaatcatctctattcccgtcactgtatccttcccggactcttgaccactcgacttcaattgtccatcctcctcggcacagccacaatcataagtctcgtccaacgtctcgcaatcgaacgccggtttcaatagcctagcgttgaccatattgtgtaagctgcataaccagagactagctgatttcctcgatgacgtttggggtgggtattctttcagaagggcttggaagtgctgtttgtccaaaacgaagcgttcgagaaacccattcagctcagacgtaagagcaaactgacctcgaagaaggaggaacaagagaaagatggcaaaaagccaagaggaaaaggagaagctcacggtggcgcactctccacagggatataatctagaaaacaaataaaagtaggaacgcagagccgagcgttcatctgctgtaggtttctactcagacatcggtcattcaaacgacaacaacgacaacaacaacaaccattacgcccgtgaccagccccggcatccgtttcagcgtgcaaaagagttaatgagttgttaataccacatgcactgtgatgctcggagaaaaagagtaggtgtgaggattctgcatcaagcagaaggggacaagataagattcgcacaggacttgcctctggaaaccgaagtgtcatcagatgaaggagcttccagcttgcccgacctagttcggctctaccattcaaacaaaccagacgaaacgtccccaaggaagaaccagccatgtgagacgttcaattcaacaacggttaagaagagccatcgaaaacgcaagccagcagggtcaacgacgagaggtcaggcgggtccacaaaacgacagaacaaaatgagaaagaaacagagaaaactccacactttgcagtttcattcccaagatgacccatcaccacacctcccttgatgatcgcattatctagtctatctccagatccaacccccgcagactcttttccggatacctttgatcccgaaaggacccatcgatgagattcaagatcaacacttccagaagcgaatgagtcggttgtcaggtcgtcatacacatcgggagagggcggtgatggcacaagaaagtagcatgcaggaatctgaggttcgatagtgttccaacagatgagaaggaagccggggcgatggtccgaccagttgggttcacgaaggtcggggaagaccgagagcaaggttgaagtcgagagcgaacatcaaacagacaattcgttagaagcagatcgacgctcgaaaaaaggtaacacagaatgagagcgttgacggccacgaacgactagaaggattaagcagacgagaaatgttcgaagaaactttgaatgaagaagcaacgaaggcgaaaagttgctcgaactcatcgtgatggttacagtccaaaacaaacaagtcgattgtgtatttctcatccgcggctttctatctctcacaatgggactgggcgattgaacagatactcatgaaaacataaagagctatctagtcaaaacagatgacaacatctagcgatacatagtttaagcagaatataacaaggtaagggagatataatattataaaagcctcagagaattcagaaaggtagcattttttttgggtcgagatcaacgagtcaaattaaactcgatcagatcgctgctcgacagcgttggcggccttctcgccgacagaggtcttgtgctggtggccctcaatgtcagtgtgggacttgtgggcgtggatggcagaagcatcggtgggaacaccggcagctccgtgtccgctctcgaccttgggaaggccagagtagaagtggtgcgagtgctgggtgtctccgtggttgtggacggcatcgccggcctgggtcttg

SEQ ID NO: 2306 - DNA, 358 bp, Xanthophyllomyces dendrorhous
gagatggtggggagagtggtggtctcgtgaacgataggggcctcgtggaccttctcgtgaacaagctgaacgttgtggatgacctcgtgctggtgaacatccttctgaattacaggggtgatgtgctctgtaaaaagttgtcacagagatcagtacaatgttcgaggcatggaagatggaataaaagggtgggaaacataccgtgaacgtggtggtgaacgtgctcggaagcggtgacaccaaggttctcctgggtctggatggtagctccgtgctctgaacggatcagacaccagaaaataaccagtcgattagaattaagattgagacatttatacacagaggcgagacaacatac

SEQ ID NO: 2307 - DNA, 5826 bp, Xanthophyllomyces dendrorhous; identical to SEQ ID NO: 850

SEQ ID NO: 2308 - DNA, 21454 bp, Xanthophyllomyces dendrorhous
aagaaagaaaaaaaaaagaagagaagaagccgagtgagtgatcaggataggacaagacatgacatgaacttgcttggtagttgacgagggaagcgagcgagcgttacctagtctttcatataccggcttgccctttgaggcaacaagacacgacgtattgaatgagccgagttgtgtcagatcagctcgtgaggtctgagctagatgagaaggagatagagagaaaaggagagcgaaggatcgcctactcacagcttccgaactttcaagatagacctgaagaccatctgctctcgctcgggagactccatactcgaacaaagccttcgacacaccctggccttggaattcaggatcaacccagagcaagtgctatatggatatagatagtttccgagtaggcaagaaaaaaaagaaaaaggtgatagtaaaacaatctttatcaatggaccttgacatgttgtgagaatcgcatcgtcgaggcgagcagcaaggtgtcagagaagggaagatgacgaagacatagacgcactagataccaatgcggcttgcccttatagtactcctttcgtctgtcataaagggtctgtttgaacatcttggcgaactcgacgttcacccacttgtccgcctccctttctgcatccgtcttcattgaatcgagtgctttctcgtttgactctttcaacttgatctcctcaggtagccactctccgtcggttgatgtacggtcgacaggcgacgaccagaacgcaaagccgatgggcacggacgggtttgacgcgagggctgcctggaactcgtactgaaacggaaagagaaactgtgaagatcgctgatgactgatcgccctttgcgctgcttgaacaaagacgtgagatcagcatgtgtttgtcgtccgttcgttgatccgtgtatcgaacgaaaaggccggtgttgccataaaccagctatcaaaccgccaagatgagaactgattggacggacttatcttgaactcatacggaggcgggctctctcctgggacattctttttgaacctagaacctagtacggaatctttaaatgcctgctctttggagtgttgcagagagtagaaatcagactcttgagtcacgggtgagatcacaagctgcggtcgttgatccaaagggaggacggaggaaagattgggagccattccgttttctgatcgtcttgctcttccttcgtggatggattgcttcttcctctctctcctccttccgggttgcttgcttatatagtacttttagaacgaaggaatggttaaggacacgcgtgaatgactcggccatctcgttgtcggcgttgcagccggttgatcacgtgccagataagattacgatcggacttgaatcttgcacgtcgatcagtcggtagcgcaaaaacgatgatagagaacgatgtggttcaagtcttagcaaggacgactttccgaaaagcaggatctaacttgggaatcttcatgattatcataatgctctccaacctcctcgctgatattctatccaatctcgcttatccatcctgtccaagatatattcgaccttgatttcagacacaaagtaccatctctcctcactcgatttgagccttcgcataatcgtctgagtatcaactccgaaagggggtttaatccctgcaggcaaaatcttttttgaccgagctctgatcgaagcgttctcagtgttgatcaatcgaaggagtaccggaccgagcgtggtcaaatgaagtgggaggtagataggtcctgagaaatcagacaacccgtcactgtcgcgagcagggtcggtagacacaatttctccttcacgaacgagttcagctagaacatgttccatcagattgagtactttcccagctacccatgtcggggttttcagtttggacgtgtagctctcttctttccgtttcctcctctctctctcccttctcctagtggtttcttgttctctcccatcctctgcttttgtcgtcatcgccaccacgtctccttcgtcatgttcccaaccagttagtccctccttcgtctgcttggattcgagttcgaccagtgagaaccaagcctcatgcttgatcctcttccgtcttgattcattccccatagccgccttctcttcttccctctccctcagaatgtcctccctccttctcttttcccattctttagcagttttcttgacaatcttttgagcgtagagtagcagatgaggtacccttgttaatgaccgagctgagaaaggagggcctgctggtgattcggaagataaatcggattgaatttgatgaaagtaagtggatgtggacaacgaggtggaagcaaaagaaacagaattcgagaacaagtcggacgaaatatatgcgtcgatggatgattcgtttcctatcgagatcaaactctgttctgaaagattgaaatgactcctctcctttcctttccttgaaaccagattcgtctgatctagaggtcgaggataaccccacccggagacagacccggagttcaatgtccgaagttcactgaaccactccctgacaggcccattgtcaagatctcgctcggtctgttggtcccacgcgattgaaatcagagtggccatgtgttctttaatccatagcttgaactcgtcgagtgttgtctgatcggatggaatcctggatgggtctcgttgccgactacgaggttcgtcgctcttggatggagtgtacgtctagatcgtttgtgaacaccgtcagaaatttcacaagttatgacgatattgggtgtaggtcaggacaaggagaaacataaaatactcacagttccacgtcggagaggactagaggcgttgcttagtgcacagacggatgaggattccgatatatctgaaaattcaaccgagctcgatctgtctgaccttccacttcctggcgattcacacgcgctcgttctttttgaattagccttgtttgacttcggagttgatatggacgtagcagctgaggcgcgtttaggtagaaagggagaggatagatatgttgattgagtaaagtttgggaatacctcccggcggaggttcacgaccagaatggcgtgaagtgattcctcattcagatccgttcgaactagtggagaatgagggagcatagctttttgagtcaggctcagatgaagaaagagatatatatcaaacgaaataacagaacatacagaggtcggtctgagtgaagaactgtaggttgtccatccactttttaaccttgaccctaactctggttacgtcccctatcgatatctttggaacatgaaccagattcacgccgggagccgaagagtcaactttagttttgggtaagagcggtttcggtggaacgtatgatttgaacacatttttggaatcactctcgccgtttctcgcaggggaagagagggaggtagaggcggaagatgtcgatgtccgtgatagacgtgttgttctcgctattggtggttgaggacaatcctgcgctttccgagctaaggtagcaaagttgtgcacatatctgatatctatattttgagaggatccatcgtccacttcgatagggatggcacatcgcgatagttcaacaccactagccagctttcagaaggtataatcagaggtagaagacgaacaggtgtatatagtgctgttttccttgatgtctattgagacaatcatcccgacgagctccacatatttgcacggaaacgtgtttaataagaatatgtcgactgatggtttaatccaagacagaacgttaaggttgcgaacagcctgtttgtcaaccaaacacgtagattccttgatctgaacgcgagagaagcacggacgtacgagcaacttgtttgagagcttttgcgtcgtcaactgagcatcttgccaccgattcatccctaagtaaccactgatcgatcgtgtaagggtcgtccaccacttcaatcacacctgatccaagtccatcaggagggatgtgtactaggttggtcgtgattggtttgtagaatgaggtcatagagggagggtagtacatcctcgacggcggaaaggctgaaggaggtcgtttaacgcgagtgatattgtgtttggtagaaggggcgagaatggacattatgcattcattagaaagcaatgtaaaggcctttgatcaagttgtgtgtgtgtgtgtgtgtatatgagagagaagaaggaaggatcgaatagagacgaaagaacgaaaagaaatcgaagacgttggtcgaatgcgagtgttgctcaaggcgatgaccggaagtcacgacggtgcgctcaaaagaactagcatacattccttctctatactcttcatccaccttgacgtcctctatatcctaatccacatgcaaccagacacgcacgagtgcacactacttgagcgcactcagttctacccaaactgatatcttgttgttgaccaggtccgacatcatcctggtctgtttggctagtaacctggcttgactgcgcaaatcgattgatgattccattccagcaaacatctcgtttcacaaggctcgagaccttgacacacactcagcatacacccacccagatacctacaactgtacatcttcgaggatcctccttgaagagatagctgatcgatatacaactgttatagacgatcatttagttcggactccataggacgtcatgtccgtcatcgtctttagggcacacgatggctttcaaaccacattacctcaagcccattttgaatcgtccgtcctttctgaatatccaatcttcttgaattccatccgttccttctgaccgatcttgttcttgacgctttcaatcataagaatatacgagctctgtcaagccgctggagatgcgcttgaagttcacccagactctgtcatcctgttcttcgccaacggcgatcagataagagaagagaatgttctgaccgtcggtagggaggacacaagtgaagttagccaccgttctctttcaaccgtccttctctatcctactcctgcttctcttctttgatttgaaccggtctttctggacaaacgtcagctaaactggatcgtacttgcttttccaaagattcatctgttctcccgtgaaatcctacaacaggatccgagcataacgatccccacacttcaccttcacctacctctgccaccctcgacgcctcccgccaccttatttcagacgtacctcatcccgatccatgattctcttctagctcaatcgttcgccctcaaccttgccacgtccaacctggcgcaccatctcgactcgttggagagggcgtaccggtcatttgcgcctgtcgcccgtcgggaacttgataggcaggcagacttgttagccggatatgaaggaagtctctggctagcgggaaagatcaaagtaggcgctagagttgttgaagctgctgccaagaacagctctaggggcggagagagatatctcagagattacgtgagcgagaagaagatgggtattgtcagggacgggtgcgtaaggctgaacggtgcgtgtattaaatacatatactctctctttcatttgccctcgtaatcactacataaaattcgtggtcggagactgatggaacaatggtcatgaatggttgtatctaacgatcaacagctgagctctcctcacgattcgaccaagtcgatgctgagattgagggtctattggccgactcggcagagctacggtcaatagttgatggtctcaggtatgtctattgttgttcatccagaattctgtgtgattccaacatttgctgaacacttcctttcattccttctgacacgcagcttagctgaagctgaagaatgtataggcgtggcggacagagttgtaaagcgagtaaagaagatcgaacaggacgaagaatgcgccgacagtcagtgatgattgatacttgaatatcttgacgacggtagcttcataacatgctgagctttgacattgaccataatatcgtcttttaacagatagcgactctcgaggtccgtgcgatttagttgatgcgcaccaatagctttcatgaattgaactaatcagaattccccttcctaactgtcgatctcatactacatttagagcttgaagatttggatcttttaattcgacaaaagatcgagcttcatcttgagataaaggtagatgttcccatcatcttttctgagtttggcctttcccttaagaatttttaatctctaaatggcaactatgttttcctttccagaattcatttaccgcccagatggtccactcgctcctccggatatcgagtctccaatcgacgatcgccatgctgcccgacagactaacagctttggaaaatgatttgcgcaatcgacaaggattcgctcatttaggaagattagaagctatgccaggcgcgtatggtcgattactgatcgaatgtgtccgaagaagagagtttggtatgtttttggctttcactcttttctaaattttgtctcgatttgaacgttctgggcttcgccattgatttttgggttgtatgcatcggttccaatccgttcgtccaatgaacacgctgaatgggctgggtatgtaaatagcgaagtttttcttatccacctcccaattactcgcagagcttatggccaaactcgtttcttccgaacggaaacgaagagaacgatatagggaggaagttcatgggatgctaccttgggatccgaaaggactcgatgtagccccacctgctttggagttgacaactgctggaggagaatcggatgacgcgtttctgggaatcgagagatcggatgtggatggttcgttatgtctacttgtcctgatacgctgtgctgtcattctacaacacaagagatctaagccttttgttctttcctccccccccctcccttctccacagagtttctgacttaccttcgttcgctcgaaactgaccccgaatacatggatctcagattcagagcaaagacagactcaacaactaatgaagaaccatgtccgctggcttctacaatatccgaactggagaagcatcaggcaaagattgatgacgtcgttctggagtttgagaagcttgccgaaacttcttgtgggtctgttctttgattgatgatacggagaaatctcgccagagattctatattgactggaattcatccctattccttttctcaacacaagtacgacaccggcaaaaaacatcgaaatcaaagggtatggtcgactcgactatccatcaagaactcgttctcagaatgcaatcccttgaggcagaagttaccaccaaacaatcagcaattgacgagctacaagcaaactactcgatcgctcaaactgagctgacgattcttcaagacaaagccgactacgagacgaatcaaattgatgtgctgtcgaacgcactggccgctctccaagccgaccacaaaggcttacaggaaaagtttacagagcttcggctagaaggcgaaaggcgtacgtcagattcaaatagggagagaggaatccatctcagagaactcgctcaggctaggatgaaaatacaggatatggaagaaaccttgtcgggagcgagagaacagttgaagaagcagactcaggacatcgagaccatcagaacggagaaggaaaaggaggtgaaggaaaaggtcggagaggcagagagggtactgagggaccatgtcactgaggctgacgggtcagttcaaccctcatcatcttcttcccgtttctttgttttgtctatactcgtttctaacgtctgctttgctcatcctttcccttcgtctgtaacagtgatcgagccattcttgaacaccaagtgtctcaacttcaagctcagttggatgaactcaagcaaacctccgaaacatccctccgatcggtcaaagatagatttactcgagacgtcgatactatccgagccgagcttaaatttgagaaagttcagtcgaagactttcgagagaaaagcgcaacagctatcttccgaagtacagacactacaggcctcatccttagagaaagaacaagagctgaggttgactgtcgaagaagctctcaaagtggcgactgctttgaaaggagcggatgagaggttggtggatgtgctgaggtcttcatcgatgggcgcttctctagctttaccacctttggtaccgatagtatcgcctttgacgaatattgaggcatcgaaggtggaaaaaactgtaacaggaaaggagaaggaaggacaatatcaagaatcgttggggaggttgaaggcatacgatgttgaagcgtttgaggacttgatgctgaagacgatgaagctcgtcaagaagtggcagttaaaatgctcagagtaagttctctacctggctttctttcttcaggcttgttgaattgagtctctctctgtttccgtgatattctactttttttaatttacttcagacaccgagacagggcaaaggacaagattgcgattggaaacttcaccatcaatgatcttgcacttttcctccctactagaaacttcagtgccgccatcagaccatgggcagctttcaatggtacgtcttacgtgatagccaatcgacaaacggttcttctcttgactgtttttgttggttccgatattccttctcagtcaactttccacattactttttgagtacaacatctgcccttgcagagtttcttttaactgtgagttctgtcgtatttgtctaactacactttgagttgaagcaaagtcggtattggacagctacgctgacatcctgtgttatgcagagagagtattatctggctcgtatcactcagatatctgaacaaacggtggatagtcaggtatgtattctctcaaagtgtctttctgttcgaccgctgtctgtcacgttgcatcatgtctgacggatcgtttggactgttctcggatggaattctagagcgcaacatctccaacaagtgtggggtaagtggttatgccttcataaggtgaatcatctaatcagtttgaactcaagtctgtttgtccatattttttttccgttatcatcaacagactacctataggaactacatacttgtgagtcgatgctacgatgaattggtctcctatcaaacatgaatctcaactaacagttcaacacctttgtagtgtccttgaaacgagcgagttctctcccactcccatccggacgcgttcgagacggataacgtcccactctagcacaaccgccacaccatccgaaggaaaatctagacgaacgatctccccagccgtttctccaacattacatcgactaactagtcgtccactccgagatcccatggcgggtgagactgcagtacctgaagattactttggtcaaggggtttcatcgaccatggcatctttggactccagtctattaccccagacatttaaacgagactcatcccctgaagcttcctcctcctcacctaatacatccggaatctctatcccttctctttccagagttccttcggctgggatagccggagatagcacagatactgatgttagcacacgaaccaccaccgccaccgtcatcacgggtatgcctgtagctaatccaaagaccaactcatccatacctattcccattcctgcatctcgttctccacattttcatcctccaaaagggagagcgccttcggtctcttcttcttcgtcttctaaaagaggtagtttcaaatcgatggcgggtcgtccaccatccgtttcttcgaaagcactcgctactataggcaccaccacgatcggtcatcctacaaccggtcagcccgatgaatcctcgtttgcggccgcaacgttatcgaaaccaccttcgtctacggacttggcttctcgattgagaggggaagatatcagtggtggccagtcgttggcaggtacgtcacccggtaggatgagcttgttgagttctgctgtggccgggcttgggttgagcaagagatcgccgagagcgtcgttcagtgtgggaggggaagctcggcccaccaggttggccagagagttagggatggatgagggtgatagtcaggagtagtgaacggtccgattgacgtgctcgatgatggtggaagcttggatttctttaatttaatatatatttttcccttctctgtgaaacattgatgacattgacgacgataaagggacagagcgatggttttcttttcgactgtttgacaaaagaagaagataaaaaaattaaataaaaaaaagacaaggtgcagtttaatctttggaaggagcatgtacataagggttacgtcgatacagaggaggatcatgtatgatacatatattgggaggaaaggggaggaaaggggagtaaacgtgagatggcccaaagctcaagtccgtcttgacctctgtttcttttgcaaaaagtcttcaaagaactctttgatatctcgctcgctgatcacactttcctccccgatcccgcttccatcggccagagcgagagcccgtcgctcggccgtccttgtccggaagaaggtgatcaggtcggctgataactcgttgaaagcagtgatagcgtccaaggtttttccacgaggaagtgcttggaggaggtttgagagcagaatatcttgggcttctgccgagtcggctgatttatacgaagcagcaacaacaacgagttgagaggaagatggtaatcaaaaaacaaatttaaacggagtaaggttagtcggatcaactgttggatagagaggagtagatgaaaataaagatgaagaatcaaacacggaccggaaggtatggcagaagatgagccctctgtctcatcttcttgacttgaaggtggccaggattgttcttctttcaagaggaacggaagttgtttgaattgatgtttatgctgttcgctccgttcatcgggggtcgatatcagtgtgttgactcgatggatggaggctgatcaagtgcagcgaggataccaagagaaggaagcgagggtacgcacgatatcacaaacacaccaccgatccctgaacccatcctgtacaaacatatccgctctcccatctttccactcactatcgtgtactgtctctacctttccggtcttctctctagagagatagactgcttcccgcctagtgatgagcgctccgagcgcagaagaccgggaagtcgtgggatacgtgcatgttgtcttccgcttctttgacggtgataaagcggagggagagggggataacggacgtttgccgagaccggtcgaattgatcaccttggctggctcgtctgacggtttcgtctctttggcctccgccgttccgtccttttcaggagcgctgttcttttccccgccgtctccttctccttctccctcctccccctcgtcttcttcgccatcatcaaactccaacagaccctcgaccgtccatccggatccctcttcggatcggaccaggcagggaaagccatctctgccgaggtagtccctgagcaccggtctggcgaggacacatctctcgcatatcaggtgatcgtatgcgtcttctgaaaggattggttcttggtcttgatctgtctctgggcctgcgcctgtggagagatcggatgaggaagtaggagaggtggaggcaaggaggttcaagtgggattcatggtaccagtcctggaagaatcatgaaacatgaaccctccgagtcagtatcagtctcctgatctctcacatcgtttctcatcgtcaaggaggaaaagaagaaaccggcgcacctcacaaactaaacattgaaccatcgtctctacctccctctctggatcatacactgtgtcacaccaacagaatctcccagaaaagttgtgattgtatcggtttctcttgttcactggaaatttctgtttctgccggctctctccttgcgcgtagacttgagtaggtggtgttgacgaagacgaagcttgaggctggtcctgggtggaagatgatgacaaggcgggggtgatcaaagaacacgaatggtgaggaaacctttcggtcggacagtcgcatctgaacgatctcttttcgaatagttccacaaggtcatggtcttttattattgtttaggtttcatttagtttccaagttccgtcgtggttgtttccgtgtttccaaaatctgtggtcagctctcaaagatcaacaggagtaggaagaaaggacgagagacgagaacggtaggaagagacgggcagacgagcagacgaaccggaatgacaactgattgaacacccaaaacaaacgcctcctccgtccaagccttctttgacaatacaagttcgacatgaataaaccctttgccttggaccttcccgttcctgttctcgttcagatacatctccttccgtactaccggcagtgtccttttcccggccaaagacggtgttgaaagaacaaaccccgatgtcgcctttgaggacttcggccgcctcgtcattcagctctgcctgtctttggagcaggctcgagagagaatacgtctggctcggatctagtgtctgaaacaacgttggttgaaggatcggagcaggttgcgagggtgtcatgatgataccagggtaggagatgagatgaaggatggggaatggggaatgggaaggcgagacgcgattctcgtctggaacgttagagacgcgtctttgcttaacgtgtatgttcgttcatcataactttcactcgtcatctgtcgacagccagcaaatctattgtcggctgtttcagcaactagacgaaaagagatggacaagaggaagaaaaagaaaaagaaaaagacgacgttcgatacgttgatgaagacaaagacggaaagagcaaggaaaagggtgcaaagctaaaaagacttccttgctttttcttgtctggttgctatgaattccaactttctttatatcttccctcccttcttctcctgcgccgtcgggtcaaggtatttacaagactggtacaaagaactttgtatttttatgttccttcctctctctcctattcctgcagatccgtctagaacctcacctccggtctcgttcgctttcaaagggaaaagagatgtaaaagagggtgagagaaatgaagaaaagaggagtgaggagccaagatcagagaacaaacgcgaaggaattcgtttgggaagagatggaagagaaaagaaaaaaaaaagggaagaagaaaagaatgggttgatatttgaaaggtagagaaagatgaaagaaggagataatccttcatttttagaaaccccttcctctgctccttccgcctcgtccgcctcgcatacccctcccaccacgcatccctcgaccaccccgagcgccagctccgtcctccttctttgtctttcctgctcccttgggtttaggagcgtcgtccacgaggagagtatctaagggaagcgagtccggtagaaggtagtatcgaatcgtgtttcctgcggatcaagaggagtgaggtgagagaagaggagacgcggatggatgaacgtcggtcagcaagagcaaaggaacacatgaaacagggatggggaaaagaagaaagacaaacctcggatagagagagagtcgagtgattgaggggacgcggcgtttcggattgttagcttaacggtcttcaagtgagtgttcatctggggatccacagctgagagacgacgtccggttccaacacaaacacagaaggagcatgaggtcagcacgggtagtcgagacgaaattcgtgggaagcagacaagacagctggttcccggcactaaatcagtgaccgttgattttgtcggatagctcaaaggtcacacacaacccaagacgcatccctagatcatcacactgtgcatcaatccttcaggaatcccatcttgttggtgatccttccatgatatgatgtgcagtacgccacaagctgtccgttctgtgttgtcctcgtcccggtcttgcggttgggagaaagtattgagaaactactgacctacgatcgtgccgtggatgaccgagccgtttttgagctctatcgtgacggtctcattgttgagcttcatgaggaatctgttgtcggtggagagaaggaggaggaggataggaaggcaaagaaagacgacgtgaagacaaaggagagtcgaaggagatcatggtaggcaggatggatcgcgagtttagagcaattgggaagtaagagacgatcggacgatgaagggagaagcgttatgtttgcggataggatgccaacacgacgcgtttcaacgggaaaggaagaggttcgacccgggaggtggggggagggggtttgtttttccacgtaagcacggtgagcgatgtataacacatcatcacgattcagacgaaagagatcgattacgagtaggacgagcagacgcagacgagagatggcgtgagggataggagaatgaggtggcatggacacacataagtatatacacacgcagacaaaagagcaagatgacgagccacatggtcagcgaacgttctggccaagcgatgtgtgagagagaaagagagagaagatatagaaagatgggtcgaggcaacctgaacggaaacgtcttgggttgtttccttcatttttttctctcctcagccatccgaacagacggtcagacccagccgagggagagatgaagggaagacgacggagaacacgggcaggacatggacagctacagatgaactacactgacctaacaagcttcatactgggcgagagagaacaagacgacgagggacagagggaagagagtgtgtgtgagtgtgtggtgaggttgggatgagagacgagtcgatgggcgttgaagagaaagagaaggatggaaaaaaaaagcggcgtgggagaaagtattaggacatttgattacgatggtttgtagtgtaagctcgaggagtattaggatattttgtagttctttctgggcgtccactacaaacatctgtagtcttcctttgtagtcttccgccttgtgccttagtttcctttccttctctccctctctgcctctctcatacacaacagatagaacagcactcgatgttcgaagatcgacctttactttctccttcagtagtcggcatgggttgttgggctgctggcctgcttgctttcttgccgacatactgtcttaccaacacgctggatcgctaacatgcctgctaacatgcttgctggtccgctcggtgcgcatacactcactcacactgaccaagcttggtggacactggcggttgtgctcgaccggccgtcacatgttttctctgttcctgcgtttttcatcgatgtgcctgttccgagggggatcgacctcgccctgaatgatcgccctggatggttgccctgagtgtccgtgctgtgttcctgtcctggaatcgttcctgggtgtccatctgttccttgacctcttccttctttcacctctcattccttcattctctcgtctgtccatcgatcgatcgctcgctcgcttcgtctcttctttcatcactccatcaccatgtctgatcgctcgtccacacccacccagccagaagtttgtccatgttctccttgtgtctcgcccgcctccaatcaagagatactcacccactctccatctagtccctcgaggtacacaccacaaccctcgatccggtcgttcaggaaaagagttactacctctccccgtctctgtttccccttgtttgtgactcactgtctgatccagccctttcaactcccttgccaatcaaccgagaacaccagtcgagaaacacaagcatgtcataacctcgaccgaggtcgacaaggagacccataaagtacgtcgatcacctcgcggccgtgatcgcatcttaaccaaggtgtatactctgttcttgcgctaacaccgagcaccgggccaatcgaacgaagcatcaccatcgttcgtgaattctctctctctctccatcgcgctaggtaagcaccgagaaggtgatcaatcccacgcgctcatctccccgcgcgctcctcatccgtacagaacacaggatccaacctgtgcaggaaacagtccatctccctgaacaacacgtcctcaacgtccagccttccatccagaaagaagaaatcaaccccttgtccaaaagcaaggcaaagcagctcgagaagcagcatcaccagatcccaccttcccgacgtacgtcactctcttctcttgctcgtcggccgtccttgttgaaagagtctaacccgacccacccgcctggtccgagacttcaagggaccgccgaggtagttcggacggaacagactctcataccagtagagtacgaacatgtacaccaccatatcaaaggtttgccccttcatcctcctcgtgtccttaccttcgctattgatcattcaaaatcggcgggatcatctacagagcatatcacccccgttctgttcaaacagacccaccggcatcgggtcatccacaacgttaccccactcaggcagacagtgtgggaggaaccaatcgtttaccggactgccgtcctgccaacccgtacgttcgattccttcttccttccttggctctgttctcgttcgcgtgtgagcggacgcgggtctcaaactatccgggaacttgtaccacctcgtgcgcatacaccatcatagtctcactcctagagtttgaggcgatgatcggccagcaggttcctggtcaagatcaagctagagagcaggcggccggatggaaggcagtcagttctttactatctcagtcatctctccagagtctcttcttttttctttttctctaaatacgggtcaagatttttggcaaaaaaaaaatgcatcagaaatcctcagtggatgaactataccgaaccgagaagggtaacgcagccaagtcatgaatgccaaacaccaacatcaacgaagactgcagtcgatctagaaagcgacgtccagacgagtggacgatcgaatgttgtactatgtttaacgtctccgctcattcaatatgcaattctttctatacacaacatgtgagcctgtgaacctgatcaacgatctcttcatcttgagcacatgagagcgatcaaagacaaagctgaagatgttcaaccaactatttgccgggcaaatctcgagatgtatctcttagacgtagttagggttaacgaccagaatgagattctcgtccatcatctctccacttggctcatcacctccatcatctctggccatctttgccgagcatccaaaccatccatcgtgcaacgagtctccttaggagctctcttatcgatggcaaaccttctagaggacgcagcggctgagtcagttcctgttcactgttctccttggctgggaaaccactaacgacgatcgtctctcatctctcttcctcagctggcagacactggaagatacgttctacaggaacgttcatctgtatgatctttcatggacagtcagacatctggatcgattctatgtatctgtcgataaaaacggaggccctatcggtttgtctgttctctttcttctccttccgtcaacgtggcatatatagagggtccaaggcggaacgaaagcttgacgacgtttcggattcgatgctgatgatggtcctactttagctatgttgagaaatccaacaatccctacaccttatacctcgtcctcttcatcttcgacctctcaaatccagacgtatacttcctcctccatccctctctcaaccgtccccatgtcgactctgaccacgtcctctgcgtcgtcgtcatcgtcctcattcacccagccaatcttgttcgaatatataccaggcacttcgtacttgcttcttctggctgaagactcaacatatcggatctatcctcctggatcctcctcctccctctcatccgcctcggcttcctcaaatccgtcgccgtccggctcgtacgagacgttccagatcggcggccaggtcgggatagaagggatcagagaggcaaagatgtatgacggcggattcgtcgtacggacgctgaaagggtccttctgggatgtcaaactgggaagaagggagagtggctcggtagggcctgtagcagtcggaggggctaaaaagctggcggatgtcaagttagctggagagtcagccggggaggacgtagctacagcaggcgaggttgggtgttgggctgttttggaaccaggagggacggagagtaggcagataggcgtgcttgtcagcgttgacaagaccttggtcagtctcgacgaagaggattgtgtagatcaggtaagggtccacccggagttccgttccctcctctctctctctatctgctgtcactcttgcgcgcgcatacgcgtagtcaactgaccaaagtttccctctcattccaccatccaagcgcctctccgctggtccattcttatcgctccatccatcgccatcaggtcgactgctcgcccttctcttacctcctcctcccacttctcctcattctggaccttcgatctgggttgtctcgtccgactttcagacatcccatgctacaatcccttatagttctctcttaggtgcttctcccgaccaagccgcagaggaaatcgagagatgggagtctagcgggggaggcaggaaaccgagtggcgtgggatggtgtggtgaggacgcggtcggttgcgcttgggacgagggaggagaagacgggggaggaagggtcgtgctctgtggaccagggggtgggagtttgaagttagtactctccatgtctttttctcttcttcactctcgcttgagccagcttcttagatttcccactcacctgccattcttacgcaatataacgatatgaacaaacacataagatatgtatactctggtccggttcatcttgtgacagagatcgacggtcttcgtgtcatctctcctgaatctagtgatttcattcagaaagtccctcgtaagttcttcctatatccttctgatgtcctttctatgtccttatcctctggttctgatcgctactaccgaacaattccgcttcgatcttgactctcaatactgttgctttctacccaccccatagccccaatcttgcatcttcttcttcctggctcgtctcacccaacgtcacttctcctagaagcctacaccgcccatctcgctcgatctcttcgctcatcctcccttctccaactgctccgtccagatctctcagcagctatattaggtattctagatgctgccgttcatctttgggcaccgggcatgcagaaggtctgtctcaaggcagcagtttgggctagagcttacctcgacggcgaagagggtgagggagatctaggagtggccgaaagagggagagagctacgggtgatcaactgtctaagagagtgggacgttggcgtcggcgtcagctgggagcagtacgtgtcgtgtcgtctttacactcttgtttctttttcttcctttcatccttttcgtcctttgacaagaaaaagtctaatccctctatccttctccctgttctgggaaacctgttctgaacgaaccaaaagatacatccgactaccaccgacgacaattctccagctattgaccacccggaacatgcatcttcttgcccttcgcctcgcctcattcctatctcttgatccagatccaattcttgaacactgggcgtgcgcaaagatcacgagtgcgccaggaagggatgacgaagagctctgcagagagatcgtgagcaagttgaagggcggagtcagcaggatgtcgaacggggcgggcgcaagcgaatccggtcaaggaggggtagaagaggaaggcggggtcagaggaaggtttgcaggtgtagcaaagatggcgtggggagccggaaggaaggggctggctactctggtttgtcctctcttcctctctttgtttctttccttccctttctcttctcccttgtgtagacaagatcttgtcctcaattattgggtgtctggttcagttgttgaaccatgagcccagagcggcgaatcaagtcccgcttctgttgagcatgcgagaggatagattggcgtttgataaagcgatcgatagtggagatacagatcttggtacgttctgctttttcgaattggtaaacaccgtcatagaagctaaggtcatatcaatatgctctctccttccggaatcaagtctatcatgtcctcctccatcttaaatcccgcttggtgctcggcgactttttccgaatcgtagacgacagaccatcagccgctgcgcttcttgagttatatgcaaaagagcaggacagagagatgttgaaagatttctattatcaggatgataggaggctggagagtgcaaggttgaggttagaagagggttatcagtcttcggtaaatttctttgacttcttcctttctcttcttcttctcctcctcttcctattttcttcttagatctgggaaggctagattcactgatagcttagtggttgatggtgaaatcaaataggacgcaaccgaacggttggctgcgttcaaagcggcttcaaagtttttctccgaggatagagatctttcattcgaatcgaaggtatgtctccctataccgctgaactcgccaacttccctagctgatgtcatcttatctatcgacattggacttgatccccaagacgatggacgatgcctatcagcttcttgccgctcaacggcagattgagaaggaacaagagaacaagatttcactcgcaggcctctctgtcaacgggacgatcagtgcgttgatcgctggtggttacgggaaacgagcggagagagtccgggtggatttcaaagtacctgataaacggttcgtccatctctttctctctcgctgtttccctcctatctccctttgtctttcatgtttcatgtgttaaataatgaggactgtttgtgctgcatgtaatccctttcaaaataacaatgatactaataataaataatatctatcacaataggtactggtacatcaagcttcaagcgctcgtatccgttcaagactggccttcgctagagagtttcgcgaaatccaaaaagtcacccatcgggtacgagccttttgtgaatttgctttgtgcaaaggggtttccgagagaaggtgctcggtatgtcggccgctgcgagacaaaagttcgagtcgtaagtttcctttcttgctttatgacgcaatggaaggcatatctgatctcgtatttacgttctcacccggaaaaaacccacatcaaaaccccaccacccattaaaaaaaaacaacaacaacaacaacgacgacgtaacgattcaaggatttgtatgtgaaatgtggagattactctgctgccgcacaggagtgtaaagaacgtggtgacaaggcccgcctagagttcgtcctctgttgaatactctcaccttcttgataaggaaacctgctgacctataaattc

SEQ ID NO: 2309 - DNA, 17585 bp, Xanthophyllomyces dendrorhous
gaccttcttcgatttgaccgatcagacaactaagcaaagctgcgccttcgactctggtcaaacgggagatcgaagctaccttagctagcatgagtcgatagcgtatatccttcgaattctatatgaattcctgatcggttggacttgtaacaagggagcatgaagggaactttgagtagcatgatgacgaacacagtcattgttgagactttgcaaaagagaatgaacgtaaagattagacgcggattcgttctctttcccgagagattttatcagtatgaacatgttaacccgtttgaattctattcctcagaggcaaacacagttagcacatgtatgtgcgtttcacagatcgtgcgtcatgtgaaggaacaacgaagaaaaaaagacacatgagagagtggcattggaaacgtcagccaagcgatcagaaggatgatgcttgagtctagatcggattgatcagagagtcgagggagaaaaaaagaaacatatacaatattagatcacaacatacaaaaacacacatatacactcaacctagatgctcatctgttcacacaggggtcatcggcggattgtcagagtctcgctcggtcgcctccttcaaaagcctttgaagcatctgaatctggttctagttgtcgcatgcacaagacagagagaagaggacaaagacagaattattcagtcacaaggaattcatccccgggaggagggtctctcttgaaggttcacgcacgaaaagacaaacctggtaatctgccgttttcttcttccaggccgctctttctctcgcgtgctcgatcttcaaccggcgaacctcagcccaaccatcgtcccttctccaaccggggtcgtcgtcatcatcgtcactggcctggtcttgttcgaccagagaacccatcgaacacatgattctcaactttggcgaacccggcaatctgggcgtgtcttcctctgacagggacggttggttccacccggtatcatccccatcctgtctgttgtcgacccgaaggatctccctcttgacgggagagctgacgaatgagaacgacgatctggcgaacgaaccggtggatgaactcggggtgagacctctgccctcagtctcaccttcggcggctgattgtccaccttcggcgtcttctctatctgtctctcctcttgcgttcccaccaaagagcttccgaaggcttccaccgacagatgctgttcgattcggccggtcgtcccgtaggttttctcttgagctcatctggttgagcgcgttcttccgcttaagagcttcatccaaggggatcaacttgaaccctccttggagagtacctatcgggcatccgttcggtccgaggttggcttccaagcctgttcgaatgctggcgctgccgcctggactggagagggcgctataggacgtgtaggcggaaggaccggcgatcgaaccaccaggcgagtacagcccgttcggtcgacggttgggcgatgatgggctgggcgggccagaagtggagaacacaggggatggacggggtaggttgtgtgcaacttgggtatatgtcaatggcgagctcggcgagagtgggctacgaagggtcgatgtgaacgccacaggagatctttttatttgttcgacacagagacataagattgtcaacgaccgttctatcgctgggctttgacccaaatgaaagacagggccgagaaggaaagactcacaacaacagggtttgtttggtgttcgacgtctcgtcaacgttctgatcggtcctggtctcctctacaacgttctcaaccgcaatttctcctcggacctctccctcggtaggccgattatcactcactcttgaacctggcgtggatgttgagtcaaaatcaaagcctaggccgtccgtgttggattcttccccctttttccctcggatccgtcctccaaaccctttccagagcccacctatgcctcctttcaatctcgtcttatccttatcctttcttcctgagatcaacgtttcgagaggagtttcaggagaagacacaccttggagaaaagaaggagacggatgggtgactccatcgggtgtgatcactcggagagactggggcgttgttctaatgctcacattggccagttcagtagaaggcgacgagggatcagattctgatgaagaaggagaccgcgaaggtttcattctactgaagatcagggacgaccctaaagggctgagaggcgcgagagatgggctgagagaagttttgtccgtttcccaaggtggactctcgtcaaactttcgaagctgaggtccaaacactgttgaaagcggcacgtccgaatctctccttgtcaccatcacgtcctcatctatcccttcttcttcttcttcttctccttcttgaccttggccatgagatggacgagagaatgtcggtttctgagagtgagcatacccggggttctcaacatttgatccgtcaaagtatgagtctctgagagtggcacccttctcgttttcacagatgctaggggtgtgaaccttgacagatccgattgtgaatcttttttgatgatcgtcttcctcgtcggcgtgagcttcttgctttcgctgccttatgcgaacggtcgcctcctcctcataatcctttaatttctcagcctcatagtcgtcattatcgctgtagttgtcgggtttaggagaggcagcaaacatatccaacggagcaaacccggagagcgtgtcgaatgcaggggactgatagtccgagccaatattcgagctggacgatgaggacgggagagtcgaaaatttattagcgagactatgtagaggggaatagatcgagtctggatctatcgtcttgggtggaaggcatggtgagcagtcggtttggttgtccataggaacagaagtagcagcagcaacggccgttaggtgcgatcaacggtcggttggttgatgggttgattgatgggtaatatatatcgagacgcgtctgggtgatcgatgaacaattaaacgcgtccgttcgggcttggccgtcgggggaagcgagcgaaagtgggactgatacattagataagaaacctcaagaatcagtccgggacgtagcatgttgtccgtcgaaatcgtgtgctgcttcttttcgtccttgtcaatttgtgttcttttctgcctgatatgagcgaggaacagaaggaagaaaagattaaggtcgtgcgaggtaccctcagacgatgtgtttataatccccttcttccaatgtcaatcacagaggacagtcaagagaacatccacatcctctatcattcactcgaccttgttgctcctttaccgagcatatattcatcttctgacaccgaaacagcccacctccagttattgaaactgtgtctgatgttgtgttagatgtttaaaatgttaaacgagggaagaaatggactaggtggtatacaaggctgtatcgggacgattgctgccaaagactcgccatcgacatcctaagatagacatcgaagacagttgtttacaaacccgaagacaaagaagagagaaagtcaacaaggaactctcgttctgtatagaaagtttgtgttgttatcattcggcccatcctctaatgctttctcgggagcgcgcaagctgggaggaaagtttcggctcctaaaatgagttccgcaagaagatcacacacgcaaaagatataagaagatacaagataaagtacctgctccgaactaggcgctcttctcaaccttcttcgggccacgttcagcgaattgccctgataactcaacagatatcgtccgaacaatccgcagaaggtcgatcaggttctgttgttgttatcgtcgtcgtcgtcgacgatatagagttcacgttcagccttgggccctctctgacctgacctgccatactagatagcttactcacgattgaatatctggtccagacattgggtcccttacccgtaaatgcttgatgcttatcctgcatccattcagacaagccctatagacagcactgaccggattcttcagctcagtttctttcgataacactgcgtgcatcaatgaaaagctgatatcgatgaaaagctgatattaatgaaagctatcatcttctgatcttccttcaatttctatcttttctgcttctctactatatttgtatatttattcgtttaccatcttgtcttcttctcctctacattcgatcaagatggcgacgaacataatgtactcattaccaaagtctcctacgttaccctccgttgaagctcgtctatctctgagcaagcgcaacgattcctccatgatggaagctcagagtgctgatggtctcacagacatccctgatcggaggaagaaaggccggttcatcattgtcttcatgagtattttgatgtgtttgttcctgttcgctcgtgagtagctaccatctcttcctctccttgtcatcgctgtcttctacacggttgtacgtatgctaagatcaggatgcgttcatggtacgcttttccgattctattagtggatcagttgattgtcaccaccgctacgttagtcaatgaacttctacagaccactctttctcctcatatgcatacgaataacctggactgttctctatgaaacatgattctagccccaatgtcatctctgcatttgattcactcaaacaggtatcttggctgtttaacgggttctatctcactatggctggatctactctcatgtttggtcagatgttggcagtgtttccttcaaaagttatccttctctccgccgtgtttgttttagagatcggtagtctggtttgtggcatcgcacccaacatggccgtcctgatcgttggtttgtcttgcgctctcatcttttgcttcgatacctatgcgcatcatctactgtgtggctgatcggagcgatataaacccttactaaggtcgtgccataactgggctgggaggggccggaatctactcggctgcttatcaaatcaccgtggagataacgacccttgccgaacgtcctagtgagtgcacccgtgactcttctcatctattttgttctcatgctagactgattcgacgacaattaattcaaaaattcctgcgctacggttcgtcgtcttttccctaagtgtatctggcattgttcggtgcttgtttcggtctcgcatccgtcatgggcccaatggtgggcggtgttttaacagatcatgtttcttggagatgggtaggtcttacgtcgtgttcatattcaccaaatgatgcatgcgttctgattatggtttatgtgtctggatcattcaagtgcttctatatcaatctacccatcggagttgtggcttccggcttgatttttgtgttgcttgaacgatcaagcgctttaggaggtagagatgattcaagatccgtttggagaaagatcgtccaacttgactgggtcggaacgagcatatgcgttggacacacagcttcgatatctgttcgtatatggcccttctcttgttcgttatctcttgatctctaaccttctgtacctgctctttggggattaaccgcagcttgcgtttcaatatggaggaatcgaatatgtatggacaaacccacgggtcatcgtcctactcgctttcatccctctgacatgcgtgttgttatgcgtttggacaatctacatcagaccggatagagccatgttcgacattcaattcttgaaacgaagggccatcatgcatgtccaatgcgaacttctcttctcatgttgtgtggagaaacatgtttgaccgactgtgtacttgtctcgtcgtgttctcaccggccttttcaggggagcgtctttgatagcattctttggttgggcaacattcatgactgtggtctgcttcttggtcattatgttagtcatctttttctttttacggatgtttctctgctctgctgaaactgacagtacctctttaaaatctcattttcaattttcagctatcagaccgtctatggggactctgccacaagatctggagttgatctgctttctatggttggtgttcttatcacgctacttttgattgtcggacggtacgttctaaattttcaagtacgcatctttgtattctaattttctgtattgtgtactaatccaaattgactagttcgttcgttgttcatcgctgcccatcatcctacggttgttcaggatcgttgctaaaacgggtcactacaagtacatcgtctgcgctgggcctattccagtgatgatcggatggttagtcatcatgaaatgaacatttgcacaagatagcgacccctaatcactcattcgaggttgccttgttcatcaatctttacgctcgcagtggcctactctactgggctatggacagcggagtgagcttgcgcatcataataggataccaggttctaatcggagctggtgagtgaattctcaaactggctttgctgctgaccttaactagagaagctttgatcaactctttggaaggacttttgttacttgtatcatcgaagggacggctgcatacattcagaataccattatcgcaggccaggtatgtgtcacatatcttccatctgcgcttatcattccagttctgccctctttctgcaagtgctgaactatcatttatatgtctttcaggtcgagttccgagatgaacctggtcttatctctcgagcggtcggcctcatcactttctttggatttattggccgaatcatcggcgtgtctgtctctacctgtgagttcttctttgagcatcgcagtccgtccctccaactcgaaattctttaccttgagacaacaagctcatgctcggatctttgatatctctctctgttcgtcctggcgcagctatctttatcaatctgatcccgaacaaagttgaagagtttgccccggagttgcctgcttcgcttattcctatcgtccgggagggcttcgcaggcatcaggacagtcattccgaaagagtaccaagccggaatcatcattgcgtacgtatcatttcctctttggctcttttgtaaattgtttgctgaacttcattgtttttattcattattcaccatgtgaaatatctcttctatcagctatcggaagtctattgccccagtcttcttctttgctggcgccgcttctgtcctctgcttctgctctacttggttactcaagaacagctcgctgaatgctcccgcacaagaagtaatcgattcgaatcacgacgacacacatctcgagttgaatcatgtctcataccgcatttcttccctttacatctcaaacaataattctgagaataacgctgagacatcttctacgaagcagaaacgataagccgttgtgcatagtgttgccttttgtattggtcattcaatgtcttatagttttaatttattgggatggttagaatactatttatgctacatctgcttatgtatctgtgtgttattatccaactcttttgttctttctcttttctttatgtctatttcaacttttgtgagatcataattgtttgtatatctcgccgctcgcttggaaatatgtagttctgatttgtcgcgcgtcgtgtcattacaaaagcatgcataccacgcattcttattttatcaaaaaaattacaaaacagaattgcagtgccaaagatatgtatagcatgaacaacatgggcagtgccaaagatgaagagtcgttactgacgtgaaggcagtgttaaagaggcagaggttgatgacaacgcctttgcaggttataagagcgtcatcattttccaaaggattgagtgccatcacacagattaatctcttcctctttcttatctctgttcatcctcgacaatttcatctcaactcttacaagaaaaaattatgtctgtcgataatctacctctgaataaaggagagtctcacacgggctctgagcccattcaggtgtgtctatctgggtcggctgtcgtctgttagatcatgctctaggttgattatccaactttccatcgctttcaacaactcttagcgaccagtgccctcggatccttcatcatcagatcacccaccagcttatgaaactagaagttctctcgctacaccagccgtgcctacgtcttccgaggttgagcctgctttgtcctcttctttcattcctcccgctctcgtcgcagcacctcatgtgtcgcacgtcatgttcctctccaccaacggttcggtcaaaaaagaaataaatatcgacttgcgatcgcccgttcctcagctagttctaaacaaacagccaactactcatgaactcaacatcgggccggccggagagaaggtccatgtctatatgaatagtcagaacggaagtgtcaaggggacatttgccatttggggacacgggccagatgatcagaatgacgccaaagtggacaggattcgaacggtcctgagaagcactaatggagcagtctcgtctagctacgtaggttctgttcttcgattgtatcttctgacacgttattgatctgatagttgatcgtgaggctctcttgtgtcgctgatcccaatactagtatgctcgtaagccaacgaccacccgagtcactacccacgcttcgtccgaaaatggttctatcacattatatcttcctcccgcttattgtggaccgattctctcttttgcaaagaacggttctctcaaactctctgctcgagccaaagcgacttattctcctatgggttatcacccgaccggatccggatcatccgagcgctcgtgggagtttggcttcattggcgatagaaccgagtggaacggcgaactcgagaacgatgctgggaacgtcagcgacgagaatatgaaaaaaccgagcagatgggatgaaagctgggcgagcagtcagaacggcaatatctacatcagattgggtgaggaacttgctgatgatccggagccaggcttgggatctaaactctttggatcgatatctaaggcgatctggggggcttagaaggtccgtcagcatttcctcgggttctttcttggtcgactttcatttttctcctcgtcttctctccttcctatcttattcataatccaaatcgggccaggatgatgtcggtctggtgccagcgtagtggacctaattacagatgagatttgaaactctgaattcttatcatcgacatatattttcttacacagaatggatatcttacacgcttctattctctcctttttcccttacgacctatctaacgctttttctatgctgccttactctgttgattttcatgacttgttccctctctcggtctgttatacaagagaatgatcgaaagcgtagcccagacacgctggggtttgcgcatcaactcgttcctgatggttcctttgttgaccaaacaaggagtcgtttcaatcgaccgatggctgactgtttattgcttttccagagactacatcatccccagcatgttcactaaactctcctctttttcctttccttctttcttctccctctctctctctttctccttgtctgacgcaactggatctttgccaccacccagctgctagatttgtgtcacctttctcctctcgcttctcttccttgctgtgctactcttcgctttcagttttacctcagtgagtctctttccactggaacctagctgaatcggttcatttattgatataaccatttgtttgcattcgtgtcaaaacgtacagtaggtagtcctcggccacttccgtcacattcctgcgctacctcgtcgtcatcacgttcttaaatcgatgagtagatcacctcactatcaacttcgttctcagctttctccggcctacgatcagaacggcgtagcttctctagtcgccattcctcatgttcgcagtcttccttggatttctcctgagagtcaaactgactccaaactgagttatctcgtacacaaggaggcggatcattcatcgactcgagagtccactcaagacgatcgatctccttccaaccgacctgtaaaagaaattatctcaaaccggtccgagaaatcattcaggaatgggctgaatcagggcaaaatggacacagccaaaggaaccacttgggatagtccgacactaccttaccttgggacctctgcaccgtcttcgcctgctttgagcactgcatcctcgagccaccctgactcgccggaaggaactgttctgcagactcatctaagtagattaggccccaaactacgaatgggcaaacggcctccttgggaatccccttctttgggtgaagaaaccgagggagaatcctctcctgtttctcgtcctcttgagatctcgtcagacgaatatggttatacttcaaggcccattttatcttctgttgattcatttaatgaaactcacggaggcaaggatcaacatcttgcgactgggtctctcagaggttcgaacagcggaacccaaactctcaagacacttggaggaaggttgttgaggaaagtcagatcccatgccgagttgggtgggggagataatcaacgtcgaggaactcaagttagcagtggaagaggcactccatgtttcgaggaatcgacagactctttgttaggagccgagagcgatgggtggaagagtgacactacgctagagtcccacagtccgattacgccggtcgataggttgtgagtacatctgtttactcatgctcatctgttttaacgacctttaaatgggtgatcaaggcataaccaaccgccttgtgttcatgctttttcttgatccttgtttttagaccagtcacgtacgaagacaagaccccatcgcaccagtcagcctctcagttcgtttcgacacctcctgacccgatgtatgcaggcgctcatcgaactcaacctgatgggcagtacaatgctggccaaaatatacacgagtaagtcggtctctccaatgtggtttcgctcgactttctgctgacctcttgatccatgtggctgttccgctttgttggcttggtgctgaaagtgctgtatggcctatcaccccgaacaccatccatcgaccaactgtgctctctcaccctcaagtacccatcaaggcgagctctcctgatgttccagtctttacccagcctttcagaaatattggctctggactgggtctcatctctcttcaagaggctcaggcaagagaggagtcgaacaaggcggcggctgcctctcgtcttcaaccaggttcctcgatcagctcccagaagccgacgccatcacccccttccgacaaagatcgacctctttctcatatatcggagttatccagtatatcagcctattcaaacttcaccaacacttcgctgaattccaaagggaatagaagacttggcactgcggtgcctcctattccacccctctggatgaacaccttgtcagagataaccagtccggcctccaagacggctgtgcagtcgcaacagtcgcaacagtcgcaacagtcgcaacagtcgcaacatcagtaccagcaacaacaacagcagcagcagagtcaatcgtccagaatggctgggttcaagaggcagaaaagtggcttgttgaggatgtttgagaaagtctcctctccagccctaggtagtaacagctcagggcgtggagcctttaataacaatggagctactccttcttcgcctggagatatcatgtacggggacaaaaatgttaaaaggttagacgaggcagcaatcaatcaagaatcacccataattgaagcccaaccagaaagaccggcctccggaacacttcacagcccttcaccggtagccggtactttccccatgtctcctcttcctcccctcccctcatcaacttatcgaccgttctccaatgcctccctagacggatccgttccacggccagcaatgcccgatgatgttctcattcctgacgaaaagacttacggtacttcaactcctcctctctcttcctccaccattcaagctccttttcccttgacttcgtctacggtcatgcaaccagagactccaatcacccgatcttcgttgtcggtaacgagcatgactcctcctaatctcgaacttcgaccaatttctatggacttcataagtggccttccagcaacctatctcacagatcctgctgatttttgcaccacaaatactacgtccatctcgggcttcttgcctgaattgaagacatcgtctggaaaactagacgtcgcattcgggcttgagttgacaaacacaagcttgtcgattggagatgtagaggatatggtgaagaaaacacaggctggactaaatgataacacctcctcgaccgaaggagagagaggattggtaatgaaaatcaagatgttggaaaaccgattggtgaatgaacaaaagcaatggaagttacaggcgtctgagttcgaggttcgtcgttggttctcgctcctctactctctcgcctcggcactaacttcattgcgaatatataaatctttgtagaaccaaatcagtgagcttcaatcatccctcgctgcccacccaactcattgtgcaacctgcaaaggatccattgagagtagctctgtcggacccgcgcccgggcttgagcgcggacccgaacccgaaccaacgtttagaaaacagatctctaacatggacgaaggatggagagtcgtttcggggggtccaattggaggaggaggttcagtactcaacagaggaagaatgattaagcctgcaagataacttttccccccctctattcgttgactcgtctgttttaatttcacttctgtcagtttcacttctgcaccttatttgttcgcctctacaactagatggcttcgttctttgtttgcgggtttgagttggctcctgactcgagattgtactctatcgttccgtttgtcccgtattcggtatgtgtttcggcgattgatcacttttcatacaaaattaatatcgcattcgttgagaaccgactgttgttcacgccagtatctaatgagcttgtgaaataagactgagtgggataggtttcctttagattgattcatgtcctttcgtccgaaactgattgacaggggttgaacatacaaatcttgatctacgacaacagtgacaggacaaagtgaccaactagtgtacaaggaagaggaagaggaaaaagaagagaaaagaaaagagaaatagtacaagatagaaaacaagtgacgattgaagtttgtttgatagaatgataggagaagcgaaacagacaagtgcaaaaacaaacatcacaggatagattgggaataaggaacgcaaagtagagaatttcagccagatgaaatgaggaagatctatgaaaatctataacaaatttaaagcacatatcggaagtcagggttctcatgctcagtctttccctgcataccaagatctgcagccttctgagggtcggccgggccaaagactctgtctcgcttcttgttggaatagtacatgtaaactccgagcaggatatgagccacggtttttccaccgtaagaggccagcatggcgtaggcagcacttcggtagaccggcttctcatgggtgtacacgaagaggggtccgacagcattacccacagagtaggcaatgaaaaccatagtggacgtgacagatcgcttggtgtatcctccaacgttggaagagatcatgaccaagccgagagtgaatccaatcgactggcagttgataagccaaaatccaataagtcggggccaggtttgagagaaaggcaagaaagccatcaaggcggatccaagcacgcagatgatatttccgacagtgaccatgattattcggcaagaatcccatctggaagcgacgtaaccggcgatgaggagagagatgatttgaagagatcgcccagcacaatcgagaagagcggcgttgacttgactgaagcccatggcagtgatgatgggaccagagaagttggtcaggatgccattctgcaccaatatgaaaagtcaccaacgttagttgaacatcacattgaaaaaaaaaactgcaaagtagataatgaggaataagatagacttacagggacagatgatccgaacataccgatgaccaaacaccatgtcttgacatcgatcagagcagccaaggcttgtttggtgtcgaacttggtggatttgataccgacagagttggtggcaactcgggaaacagccaagatcctgtcgtccttggagagccatcgagcgttagatgggccatcagcgaggaaaaagtagatgacgaaaccccaagagacagtgatcacgccgaggatgacgaaaatgagctgccatcgcttcacaggtccgctatcagacaaccctgagattccagcggccatgagcgctccgatcatacctccccaaccaatagcggagtaccaaatagtctgtcgcaaaggctgttcctttcgggtgtaccctagagattgaataataaagtgctagtcagaatagagattcgatatggacaagaaccagaggaacacagatgagacatacagaatccagtcatcaaagaaagtccgggagttgtggcggattcaagagcacccaagaagaatcggttggcgaggacagcagaataggacctgttcgcgatcatagtcaagacagcaccaccccaaagcacacacgaaataccgagaactcttccagcaggaaaccgaccaataaagtaggtgaatggtgcttgagcgcacatgtatctaagcgataggaaacacaaaaggacaaacgtaagaacaagaatcgacttaggtgcgaaatcatctgaagtaggattcacttacccgatatagaagatcgatgcggcaattgagtattggttacccgtcaaacccatcgccttttccatgccgaagaccctatgagtgagcggaagcgaggctgagtatgagcataacgcgagacaggtgagacgacaggaattcaagaagacgataactcacttagcatagttaagagcggtcttgtccagatattgaatggtttctattcaaaccacgagacacgtagaggagagttagaataaacagttgcaatgctgtatgaaaggtaaaaaggaaacgaacgagtaaccaagaagaagggaagaatgaaccagtcgactttccgcaagatcctcttattctgttcaggagtctatagaaccagcgccaaagcaaaaaaaaatcggcataagcgaccaaataccggagaggagaagaaggtgacacgtacaatggcatccatgtctttggactgaagataggcgttgtttccgacattaccatcttcatcgccctcctcgactggatgaaggtgttcgttgtggtgaacctcggccttgccgtctttttcgtagaaactaccttcgatggaactttggctggtgggttctcttcgcagcgtgggaacaacgttcgacatgatggatttagatcaaaagtagagtaatgtgcagagtggatggaagtcctgattcaggaacaagtgatagacaagaaggcctcctgaaggaatgaggaaacgggaagttttgaggacgggaggttgggtgtcttatatatccttcaactctctcgatcagggaatgggttcaccacatccatctgtaccggcctcaacaagaccttgtgctctgtgtttgagcaccgtcaactccatcagcctctttcagctccgattatttgtgaagagacgcgcggtctatgctcattccagaacaaagaattcgaaagagaagaccggtgttcacggatggtgtggcgttgacccgaaaagagccgatcgtcagcaaagaagcgtgtcaggatcagtatataccatcaccacattattctcgcaggcagaaagaagaatgctttgagaccagagatgtataacctgatattgccgaaaagaacaggtgcggtaacaaatgtgttcagtggtcagcggggtcagtaccattgtgccaagactgaagtgtcagtaattcaaggggttagttgcaagaggtagaaggcaaaacgacacagacaggaggaaaagagaagacaagtgagagtagtgatagaaaagggtcaaacgatcggctcttcggcttttgctaatccctctcgtaacatcctaccggcggtttcaaagtctcatcaagatcgtcgcttctatcggtaaaaagaggcaaagaggacagagtgtaagaaagtgcaaagccggctgattgaatgcaaaccaacaacagcaaggtgttgaggttgattttgcgtcggtgtgtatgtgatccaccgatcctgctgccagtggcgcgactcagtccgaatgtttgagatcttggcggcttggcacgtcgcagttatctccgaccgtcttcttcagaaagattccaattgtacaccaatgtttcctctctccagccacgttatagccattccgatttctttgtgtcgcatcaaaaaccatctttttacaccggtcaaggcaaggtctatcttcgttgaaagccaaacatcatcctacgggtttcgggccgtggtccggaaaacacgagtcatgatttgatgcgctcaacacagataatgtggaccaggcgtgacctcaacttgcgcggaacttgatctgtacatggtaggaaccgacaaacgaacagcatataatcttttgaaagagaattatcagcgagacattcgataggaaacagtgctgattatgggatgtattcatctcaacatatcagctcaatttctctgcttgatagttgaactatgaacaaacaaacaaaaaagtaaagagaaacgggcaaaagaaaatgcatagaagcccttacctgtgttctggcaacatgtaaattgacaaacaagtttaggccaccaccttctttcgacctagaaaaatccgtcaccaagaaaggatgagacctcaagttcggaagatgatacaacttgcaagatgaagacctcttcaagagacttacaaactgggcaacttgcatcttccttcaaccaactcctcgcgcacggctcgcaccccacatgttcgcaaatgaccaaccctacgatccattcaccagctttcagagtccctaaacagccaaatgaacaccgaccgacccgtctcgctcctacagctggacaggatagcttgaccttcgtctttcctttcgacgttgtccgtcgagagagttcgactacttgaccatgaggcagtgcatcgacctgagccgtagtgaggccctttggatgagccggcccgaggaaagaggtcaaagcggttgcggcctatgaggaaaagtgtaagagattgtgtgagaatgacaaatgtggtgtgaacgcgatcagacctacaagactggaactcacttcgtattgttgacttccatctaggctcataacgagtaaatctatgatcataacacatgatccatagtcaccggaagaagagtgaaggaacaataaatcatcggcagccaattagtacgtgacatatatcaccaggttccgctagaaaaaaacattcatttacctagatctgtgtactcaaactcaacaggagcctgagtttgcaacggctcttgctccagctccggcaatgattgtctc

SEQ ID NO: 2310 - DNA, 5030 bp, Xanthophyllomyces dendrorhous
ggtggaggagaggttgtgcgtgtaatctgatcatgagcacgcgatgaaggaggtggaacagatggagatatatgtctttgaattattgatggtcttgcagggggaggcggaggcggcggtctacgatatgtagacgcgagaggagctgaagttggaagagaggttgaagaggggttggccagcctggccaaggaagtcgaggagctagcgatagctggagacgtgtacaaagacgtccaacggggtatctgaggtggaggagccggcggaggaggtcgtcgttgaggtctgggttgtagaggaggtggtaccggaagtggaaacctctccatcagctgatgtgatgagctttgatcatcaccaaaatgtgacatttcaataccaccagacgtcgaagaggaaggtgaagaaagagaggataacgaagaggaacgtagctctggagtcgctcgccctcctcgttctcctacccgtggcgatcggtcctgttcgtgagaccttgttggcgggatagagggcgatggagatctggaggaatcttgagaagaagcacctagattgtccgaagaagacgactgacagtctagctggtcaagatcaaaatcagatgatgaagccagagatggtgacgacgaagaaggggtagatgaactatcatgtaaatctctttcggtcagtgggacaatgggtggaggcaccgaactgatagtttctgaaacagatccaatttgattgggataatgatgataagaagatgaaagattgactgatgatacattggctggagtggttctcgggtccaaaaatccggttgatggttgtataaagttatcgttaataagtaggtttgtggtatctacaggttccacagtggaagaaaggagtatgttcggaataatctcatccgcctggttttgcgccatgacaaacagcgcgtcttcacgcagagggctgagatcgtcttccggtggtactgatccagaacactcttgagcccctagctcactgtgtaggatatgcaagtaaggagctagggtggatggtagggcagtctcgatctcagaggtatcggtgaccgcagcaactgaatttggcaaaaactctgcggtatgaagatgattgacagttgaatgcgaggacgtaaatgaccggtggatagactctgctctatcagcgacaccaaattcggttgatccagacacaacagcttccgatgtcgacccgccatcctctctacttgcttccgtgtcgtgtctgggtccaccttctaaagattcagtagtactgctgcctattattatcagacgctcctcaattgaaaggccttcgtcggctagacggtcccaaagtgttcgatttccgatggcatccagacattgaggagaaggtggcgtagagggtctctccacagtagtctgttcattattcgagacaatcctgagttgagatacagcaatcggtgaagagaacggtaccagagactgctgcatatcctgggcttgggcacggctgagctcaaacgagggaggtggactactaggaatgtttgtcgtaatagatacagcagtaccagataatgaagattggttgtcgaccggagcatttgctatagagtgacttatcactcggataggtgaagcagggaatgctcctggaaagcttggagtagggggttctgcaagaacagaacctcgagggggtgtagacagtgtgtcaacggtcaagctgttctgagactgaggaggtgtttgaggtaagattggaggcggtggaacgtcgaatatggcggtgaaatcaggtgcaggaggatcgctggccggaaacggtccaattggaactcgacgcgaagctgtattgggagatatggtatcgagatagcttggaggaggaagcgcgggggtcagatcggagtcatcacgttgatcatttacaggattcagatctagagaggttgaagatgtgtcgaaccaaaggccaatagatttataagaatatgtcaaatgtcggaagcctatatgatcatcgagaagaaagactgaccttcctgtacgtttcgccgcctcatacttgctcctctactgaagtcaaccggtcctgcttgcaatggtgttccaactgacattctcctagtcctcagtccgatcatcactgcggggtccacacgtctctcagtttggctagtcgtgccagaagactgccgagcagatgctacttcatcattccttactcgactcgcaactggtctcgtccctgttcccgccgatccaggtctactggtagcaggtgcgtttccaacggccatcccagtttgtgtaccagacgaagatccaacagaatcctcacgagattgtagccttgtaggtggtctgggacgcttctttcgtcttggctgtgttccaccgttgccaacactactgccgttccttgtggagaatgagggtgatggagtgtttctcgggttagaactgaatccagctcctccagttgcagtttcgctcggcgagttatctggtgatctctgattcgatctcgaggcccggactctagtcatgttgggaggagggcgtaaggtggtctggccatggtaaagatggtcattggaagtatatggagaagggtgggatgaatccgcccgaaggccacgagagtttcttggaggaggccgagctggaagatctgcgttagagagaagagatctaatatagtcgttagcagacatgagacctctgccacatatgagatagcaatcgatgaagtgtgttggtatgatccgagtaaaattgagagatgatgggagaaaggaacgaacatggaagtcaactaattatgacttcatctgttacttcacaaagatactgcgtgtgcatcgtgactacattcctggccgaccgagtacaactttcacttgatcagaagcatcatgttcgaggatgataaaacgtacaactatttaggtagatatgacaaagtaaggcatacaagtacagatgatgattaagataccaggcaaagacacggatacaggcccaaaagcagatattgacaagcaggagagaagaaatgaacgacgaagagttcttgaaacatgtttgattcagaatcaataacttgttttgtccaccaatcgccatctctttaacgggcctcgccaagaccagccgggatcgtcatccgagtctgaagccgagtctgcgtctcttcgaacctgatcagctgtacgagtttctcgatgactctctctatgacttcctctacgacgtcgcgaaagggtatctggctgttggatgctcgttggtcgaaatggttgacctggcccaggctgagagtcagggacgttcggctccatcggtatcgtcaatctggattgagatgctgatcgactagatactctcgacggggcttggatgatctcttcatccacctagtcgccctcccctcgtccctcttcgggctcacttgcgctgccaggatctgtgctccatggatcgtttgatctatcgcccatcagtcttcctcgccttgcctcccttctagcttgcttgattcgtccttttccatccctggcttcttcaactccgaactgaccgagtccccagcctcgacgctcgtttgctacggcgcccggatttccttgaatcactcgttgtttggcagcctcggtatgagctcgactaagccgggagatagaataattgatgagcgtcgccgggaatgctaatattgatgagatcgatgtcgggagttgtagcgaggtaggcgatgcggtagacgagttcgaagaggacgaatttaatcctgtagtgacagtcgaaggtgcttgcctgttagaggctagccaagatcgagacgactgagtgagatggacaggaactgtagctgaagcgttcggagtcgtcacagggtgaggtaaagtgatatctcgctcgcgttcgtggtcaggtatggttctcatgaaaccgtcgtcctctgtatcaccagagtagattggatctaattcgcctcttctttctcttctcgtgctagaactaggctcgccttcttctccagcatcccgcactcgatgcctatccatcttatcaagctcaatcgctcggtcatcttgatgacttgtctcgcctcgtgagaatgtacgccgggtgtgccgtcggctaaacgcacctccgaaggctgacgaacttgatgtagacccttgctcggggggttctgtgaccgacatggtcgaaagtcgccgatgaagaggtcgagagatcgatatagaagctgccgccactgctgctgccgccttctcttttcgtctctgcctttgctctgccttccgagtttttcgatgttctttctcaagcatgtcctgttcaacacaacgccggaaggttagccaagttcctgaatccaagacaacacatgatagattggctgctcacctcaacttcaccaatacccatcccggagccgacccaccaccaccaacctaggggtacgtttatgagtcagcatcgatctctagatcaataaaaccagtttcggccaacggagaagagaggaaggcaaattcggaacgcacctagccacatctgccaaagaatgatagaaagtatcaggtgctgaagccagctcaacttgtcgatcttgatttctataaaattgaccgccgttccactgacggccaatattagcgctcctgctccaaatgctgccgttccaccgtcggttcgccaagcgcgttttcggttgatgacaaacccccaaataaacagcgctgaggtgaataaaagggtcaacgttgaattacagatgttccggatgatgaggccgtatcgtacaacctggcttgagggtgaaagggcagtaaatgtcatggctgatgaggcaagggccataggcccgagcaagccaaagatcaatcgagcttctagcgctgaaggatagagcaaggtaaggaactgaatatgggtaatctaacaatagatagaattgaggaatagggagagaaaagcaacttagaaagcggttatcttgaaaggtcccaatga

SEQ ID NO: 2311 - DNA, 12409 bp, Xanthophyllomyces dendrorhous
agatagagaagggcttacttgaacaataccagatgagagagcctcgacggtgtaccacgaaataagcttggaagcactccaggaccggaccggcacctccacatatataaagtcgttcatatatctgatttatgtacgacaggcatggccaagccaatcagtattgtggtcctcatgtaacaaaataagcagaatccggatcaaatgcatagaatccgatacttacggccagatagaactctcctgttcgcctaccctcagtgtcaccgccaaagttgcagtcacggccgctaaggtcacgataacgcccgagaactgaagcaggaagttaagtctagcgagcggataatgatgttggacagtgaagagcaggtgaattgtgagaacaacgaggagagtgaaaatgattccgttgagtgcgagctgggtggcatatgaataggcagaagcactgtaatcaacgaaacatcagaagaaaagagcagaaggtatcggcgtcaggctaaggggagaagagaagataatgacgagtatggaacacctcacggtttatatatcaagtaagggtcctagagagggattgatagcagtcaaaaccgtccatagtcaggttcccattgcttaccttttcctgatgttccatatcctcgaggatgaaggagataatcagcgaagtgtggaatactcacctcgaccatctgctgatgaatcagagacgcgttgctggtcatccggtgctacttccccactcggatgggattgttctcgttgtactggggtttctaataagtgtagtagatgacaaagaaggacatcaacggtcgaatcactttccggatggatgattatatgcgatgatggtcaggatgaggaaagaactcgtcgatcgaatttcggaataaacctttcgttctatctcgacgacatccttcatcatgccggctacccacaaacgaaaggcagcagctctagcagcatctcctcagcctggcgtatcgtcagacagacctatcaagaaaccaaagacatctcctcctcatgtcattctgtctccttcactttctcgacccaacttactttcttctgaacctgcgtcatcatccgtccaaacatcaaattctaccactgccatgattactacgaaaccagttgtatacaccacacctccggtcaagattcccagacctccgccaaaatctatcatcaagaaactgattccgccaaaaccgcctcaccggcaaggagctgctttaccggttggctcggccgtccatggccctacagccaagatcgaaggtagaaacgtcgtgctagtctcacgaaagaacagcatagcgggatatctcagaagatgcaagaagctaatcgttgaagaagggtaagtcctgatgtctcgttgcagactttgtcatgtcttgcgatgagaggagctgaagtagagtgccaccagactattcctagtcctctcgctaacgccataaactgtatacttttctctccattctaacccaataccaacgacacacccacagaaactctagcatctctattcacgccctaacaacatctattcctctggcgttcaccttgctgcactctttgctctccatattgccttttccgcggactcaactatcatatacgatccatacgacctctgttcccgtcacggacgagatcactccggaagacgaagaagaggatatcataattcgggaaagaatgtgctccggtgtggagataacactccttgtgggcaagcgggaggctacagagggtaaggcgagagaaggaaccgagaaggcagagagaaagaaaaggttgaagaaaagaggaaagggaaggggcagaacgaaagcaaaggctgccgctcgcgggccggaagggcagaacgaggatgatgcggataccgaagctttgaacgaagcagaggttgacgacgagatggatgctatgaatggttgaagtatgtggtaatgtgatcggtctgtctctgatgttgtagctcactcgtctacatcaacacgttcgctaacacgtatacactctgtacatggtgctgataaacttcgtaaactgacgacggctaagtctagtatgatgttaattgaaccatcgttcccgttattgctcttagaccttcattgaacatgccgttattggcgttatcgtcttagaacttaccgctttagaacttaccgcctttcagaagaagacaacccgttgttgagaatgactgagtacataagaggacgacgggtaagagctattcagtccattctagtgttctttcgttcttttatgcatattctttcacaaaatgaaaacatccgaaccgttggctgtccttcttgtagctcatcatgtacgtcgtttctttccccttgatggattcataagtgtcgtcgttgatctatgactgaggggttcttatatccaaagctctgcgtcgttttccccctcgcctcttcatcctcttttgtacagacgatcaactctcttctcagtctgaattcccaacaccttactttatccaccgccaccataatcaagtctctttttcttctggatgaactttccaagctgtatcctcagctcagagtcatcgaaccgaacgcaggcgagaggatgttgattgcctcttggtggatcgtaggcgactctgatcagaaacgtttgttagaagagagtatgttggtgacaagtgtgttccaagaagtcaagggtggagtgcgagaggcaggagaagaactgagtgagttgatcggccagagtgggagctattgtccaaaggtttgtcatcggatcattttccttatagatttcagtgttgctcaggccttctaaacttttcaaaacaaagagcaccgtccttcgggtagctccttcccgcaatcagtctgtaacttcaagcggacacgctataataccacctctttctccctgtcggtcgatcaagaagacttctcctcccaacttttgccgtcctctaccgaaaatagccaactctaatgaaagacgacaacagaatcccgctgtcaatctcatcgctgaggaggagctgttccatgcgctttaacagcaaagacagacgcctccccgaaacgtagcatataaatggcttattttggtacagcgtttccgggaaataagagggtgattattacgataagtgtaatataattgcatgtatcgatagatgcatttcgtccatattgaactgataactaagcatgaaaggatacgcccaaggtgacaagatatgatagagtacaaccggtagaaatagaatagacaacgaatgttgatgatgatgatgatgatgatgataatgactatgagagaaaagaagggacggtgtctaactaatttatagatcaatcgctagctttatgcgatgttatcttaggaatgaatccagagcgggtcaatcttgtcctcatcgacttcgattcccacgctaattccaatacctaaagatctcccctcttcaatctcgtcgtcttcatagaactcttcttcttcatattcagttccctcgtcctctccgccctctgtatcgagcccgtcgtgtgcggcagccgatgaaacctgtggtggaggagagggaaggactatattggcttccttcaacagtcgatcaaattctccggtttgttggagtgcccggacagcaaaatagtctccgatgggatgaccacctatgacgagcattggaagatccggaacgttgccgattcgggccaagaggggctgaaggtattccacatcggctaaatcaaagcgaagaaaaaggtataggagcaaaataggacgaaagaaagaggaaaacgaatttgatgagacagacaatcaggaggagaaaggaagagattaaccaaagggacgcacgacgatcagacacatcaagatatacattagacgtgtcaatcaatagactgtctaacaagaacatcaatgtctttgcccctctgtatagacatgaaagaattgcaggcatttgagctattttgtcttcaagtcgcgcataagaaagagatatgagacacatattttgagacgaaccctctcctggaatcacctaacccgagaaccatcacggcgcctccacttaagtcgccctcactcgtccagaattcgttgacagcttgttcaaccaattgtctaccttccttcggactgagtcggaggagattgaagtccagaacaagatttggatcaagaggttcgagtgggttgaggggcggtaagactgatgcatcagaagtgatcagatactgcataacacggtccatgatcgttccagacgaaacaagatgtaagcttaagatgttgtcggacagaggaggcaggagaacgatgaaagcagaaggaggaaaagaaacggataacccgtagacactcacacgcatcaatgcgcccaactcttctcttgggttcttccaaacccactggccatttccttctgttccaccaaacgactttgtattgtaatcatctgtatccaacctggccttctccttccgtctggatcgggtgacgcctttcgcgtctttgagaagaatatcggctgtcctatcgtttctccatttgggaacacgatagctatacgcgtcttggatgtcatctgatttgaaccacgtcgaggaaaacaacgtagtttgaggaaacagtgagagaacaaagctagatgctgagctatatatcacgtcgtgcgaatgtgaagaatagatagtccacgcatcagttgaacaagtacaggtttgaagacaaaggaaaaggacgcgtacaagacaaagcatacgagaaagacgacggccaggaggtctttcaagacatccggtagacgagatgaacgaaggatttgtcggactataggaacatttctccaaacagatcgccgatgagtagataaaagttgtaacggatgtggatccggatgctgctcgagatgacaagattagtgaaaggaagggttagtatgctttctggccaactttaaaccatgaatgtatttcgagtaggaaagattcgacttgccgattttctccgtcctccaccctctgcatcagattcggtcgactcaattccaagcccgtgtgtacctgttgcatctgcccattttctggtcgcgttgagctctctgaaacgcttctcgacagtacccgaccagtcgctcgagttgtgtaccttatgaccccagagcccacctccttccatcgcgtgttcaataggaggcgaactggggaacgacgtgttgttgacatccaagttgggcgttagactcggagcggtcgcatgtcgatgtctggccgagttggcagtcgcgacatctagcggaaaaggcgacggtgaacgactgctagtgaacgagttggaccgggcgtgtgtagattttttaggtgtagactatcgagaagatcagatcaagagttgaaatcagagatcagtttaagaaaaacgatgatggctggagtgaaaacctgcaaaggaatcgtcgaagacgagacctccagatagaacccaagggaaaacatgcatacgagtcgatgattctctctaggaggtgagaggtcggacatattgctttctcagaaaagacgcgaactagcgctgtccaagacgaacgaagccaatgttcaggtgtgtgtttagacttccgacaagccagtccaaaccaatcgatagtggtgtctaaccttcccggatgtttgtgttgtgattgtttgtgcgaagaaaactaaagaattgaaagcaaatagagaggacaagctatggaaggttaatctccttgtttttcccgaatgcgcttgttcaattcaccgtacattaaagaccaaaatactaactagctaagactgattgtggcgtatctgcacagccagggcatgtcggccagcacgggttcttcggcacaggtgatgttgtcggggatcgattcagcggcttgaagctgacaggctaggctttgttccgcaacaaagatagggatgtatcacaaaatggctttacgagaacaagagtgtgtgatacagagaacttgtcggctgtgctgaaagactaggtgaacacctggacacaccacattctcagagcagaacaagcaaccatggacggtgtggacggtgtggacggtgtggtctggaggacggacttggacggcagcccggaagatcggacggaagttacgtccgtgtacggcgagcgtaaccatttcccttttttttcctacgagttgctttctggcctacctcctccttctacacctgttctttcctccatcctcattcatcattcactcgtcaagtcagccctttggttagcgcttgcttgattagaaacctatttttaaaaaagaaacctttcctttctaccggtttcttcttcccaaaaagcggccgttcgatcgcgttctactcttttccttctctctctcttttcttttctctctttgcttttccacagaggacagtttcctctcgatcgaaactcttcgcttcaaaccacatcatggcagacgctcaacagcccaaagtcgcttcaggttagtccttttcacattctacctcttgctcgagcatcggctccacgcgatgtttcacaaatgtgaaaagtttgggtcgttcggacaacgactgtaatggctgaaaacagtagtcgtctgatcagagtcagagatcaagatcaagtttgatcaacatctcataaagaacaaaatccatttaaaacatgacttacatgactgatcaaacctcttgcttctcttttctcttcgtcttcccttccctttcatcgatcttaattctctcatccactaatctactttgatttcttttatgcttccactctggtgtcttttcctcttttttcttcttctttttctttctccttagacgatgaggtggtcaacactcagaacgtaggagccagcgatcaggataacgtcaaggagtcttcttctgctgagactaccgaggctaaagccagcgctgaggaggaagaccaggctaacgtctgtatgtgggctctgaacttaccagtcaaatcattcggtgttcatttcgctcactttgcataatctcttcaactctgattttttcccgtcatcttcaacagtggtcttcaacgttacgatcaacctccctgatcccgctttcaaatcagttcatcttcctatatctacgcctgaaggtcacaaggctcctcctagcaagacagttgtcgtccagacggccgccctcgagatcctccatgagctccgacttcaggttcaggactcggctgcaggctactggcttggcccgttctcctttaggaagcccgtacctgagggcatgaagaagggagatgttgtcaacactaccaaggatggcaacgtcatcaaggtcggagaaaagctgagcgattacagcgaactatccgagatctttcaggatgagatcgagaatcacactcccaaggttctggatctggtcatcggtatgttctttaggcagttcaagaacatcctttcgcgccagcttcaaaaatctgattgatcgatcctgaatgatgtcgcatggtcttcagagccgtttaccgagaatgatgctagaacccaggtcttgaagctgaaggagtatttggcccagggtagtgacgcacaggatccctcgaactacatcatctcgcctgcgccaagttgctacgagatggttcgagaccacatggttgcttcccgagaacctggttagtcaattcagtcgtcttcgtatgcgctctctggcttgctgacgcatatatccattctcgaaaacaatcaacagctgagagcgctgactccaagcaccagacggccaatggttcttccaagaaggccaccgccaagaagggcgtcaagccggctcctgtctccacgaccgctaagaacgctcttccccccttcaagctcatccctgatgagttcccccctttcaccgattttgacaactgggtcgagaccccgctctcgacgtttgttccccgaccggcggagagcgttgttcccaaagtttgcctaaagtcgtacggagtgtccgtttggaaccccccgcctccgcagtaccggtcaaagggtcacttgctgtacttgacggtgaccacccttgagggagagaccgttcagttgacatcttcagtccgaggatggttcatcaacaagtccacctctgtgtcgttcgatccattccctcgacctgcgcccaaggacttgaagtcccactctctctttgagcttcttcacggactttcgccgttgttctcaaaagcattctacgagctctcgggcgctgtcgagaccaccaacaagccagctcctcgagagttggtggctactattcctgtcggacaggcagttccttctcatcattggttggttgatcccaagccggctgtgatggccgacccactccgacaacagttggctttcttgaacaccgggtccatctcagctgatcacatggacggagcaagagactggaacgaagacatccagatggccagagagatgcctaggacaacgatgagagaccgagttcttcgagaaaagcatatggctagaattcagtcagagttcaccgctgcctgtgttcgcggagcaatgactgtggcccgaggagaagtcgtttccttgaaccctcacgagcccgtttcgaaccaaatgtggcttcaccgaaacatcttttacaccaagggtgtcgatagcatcgagtccttcaaccaccttggtaagcatgaggcggcccacatcgcttgtggcaaggattgcaacggaatcaaggccctcaatcagatcgatgccgagggagccgctctcctcggccacacagtggttgactgggctggagaccgatgggtttgccagtccttcctccctggaatctttaagcgacgagaagatctcgaagcgtccgaaatcgaggccaaggccatcgaggacgttgcttcctctgccgagacggaggaaaaggttgctggagaggagaccgagaaggacgaatcgatcgccaagcctcatttgatcgtttacggagcggatgttgactttggaccaaacgtcgtccggtggaacgctgccgcccacaagttgatgggcaagtacgccaacgctttccggttggccgagcacgaggtcatcgctgggaaccaggatgagaaggtcaaactcttcgccggaagtgaggtcaaggtcttgaacggaacggacggccgatcatacgtcttggacgtctaccggttgttccctgtcgatgtcgaattcttggagaaggatgtcgacggagcggtgtacacggtcggaaacctctatagccggatcggaaccgaagaggaccgaaaggaggaggcagagcagaaggaaaccgtccaagcggagaccaaggagactgaaaagattgacgaggagctcgtcaagccggaaaagtacccccaccgaatggttaccctccgacaagagctgctcgatgtatactgggagggtgagttcaggaagtgggctacccagcgagctgcctctagaaaggaagccgaagctagcaagatcgctgctcccgccgagggtgaaactaaggctgatggtgaagtcaaggttgagggggaggagaaagagtctgagcccaagcctaaggctcctgaagaggagcttctcgttgaggctaacggagacatccacgtcgccagggctaatggagacaccgagcagatcgttaaaggaggaccgtccgatatcttctccctacgattcaaccctgacgctttcgttgatgttaagcccactgcgtcgtccaagaaggacgattcggagttcgacccgacaacctttgtgccatctccttatactgacgagtctgatcctgctatcaaggctgttcgagatgcttcgatctaccttcgatccattgtcatccctacgttcgtgttcgaggtgaccactggtcgagagtcttgccacgatggtctcagcctgaccgctgttcttcacaagaagggtatcaacatgaggtcagtcaattcttgagtgctttcactcgctctctcctcttcttgcaacacggctggcttacaaaggacttctctgttattttctctacttgttcttaaaaacattgtagataccttggtgtgatttctgcgaacgttgacaagattattgccggcaagcctgctcccaacgctgtcgtcttgctcgaatgtctccaggagactattcaccacgagatgatcttccgagcgtccaagcatatccttcgagatctcctgaaggatcagctcatcgacgactggtctgctatcgtctctcacttcctcaactgtcttctgggctctgcctttgaggccaaccccagccctgctcctactccttcgccgttcgattctgacgcctcaaccaaatggaccgagcttactccgaagacgctacgagctcagatcgagaaggaggtcggccgacgattccgatttgctcttcgagaaaactacctggttgacggactcaagaagcgacagctcttgagagagcttgcgacccgatttgctttccagcttgctgctcgagagtacgagttcgaggctgtggctgctgaggatacggctggctcttctttggagagcaaggtgactaagaagtcaagggctctccgatctgatcgaactgttacgttcaacccagaggatgtattggcgttgatccctcttgtgaagcacaccgagaccggaagcgcctgcgcccgagagacgctcgataccggaaagctgttgatcagccggggagacgcccgagccggtcttgagcttatgcaggaggctattggactgtacgagaacatccattccgttgtccaccctgatgtcgcccgagcgtacaactcgtacgctgtgctcgtccatcagctctaccgaaacgctctttctgagcgagcggccgatgctgaaggcccattcgaatacgctgccgagctcgagtttgcagttcagtaccaacgacaagctgtcatcattgccgagcgggtctgcggtttggatcattacgaaaccctttcattctaccagaacttggcaatgctcgagacttgcacagaggacgttgatatgaccctcaaattgttcagacacgtcatcaagctttgggacgttacattcggaccgaaccaccctgattcaatccacgctttggtacgtattcttctgcaattctctcctgtatgctggaggaaacgtgtgctgatcaatctgttttatgtgtattttttcttccgacaccagacgagcgttggaaactgtctgtcgatggtcagccagtgggagacggcttctaaagtgttcaagattattttcgataacactcaggagatcttcggaccgacggcgattcaggtcgctcatgccagtcatgctctctgccagacgatgttctgctctggtgatcttaacggggcatctaggacatcccggttgtgtgcggatatctttatcgagcatctcggagaggaggatccctacacgaaggaggcaatctcactcgctgatgcgttcgagagacacaagtcccagatggatacgaccgtgacggctgcttcggaacgggctgctgcgatcgcccctcagggtcaacagcagcagcagaagaagctctccgccgctgcgaagaagaaactgatcaagcagggcggtggattggccgaggtggctcctaccgagccggcatctgctgttgcggaaggtggcaaattgggtgcggatgtggaagctgctacatcagagacggctgaagctgttgccaatctgatcggtgcccgaggtcatctcgaggtgagtttttcactatgtatagtctactgagtcggataacctgttcgttttgtagaaccgatctgaccttcatctttcccttcatctcaggtcgaggatttggtcaaattcatctctggagacaagcccaaatcaaaaaagaaggttaccaagaagcgcaattagactggtacataagttagaagagaagatgacagagaaagagtgtgcgagggtgtagagaagaaagaaaaaaaaacaggtgaagcggtccaaaggctgtagcgatcgctttcttggcgatgtatttatgttttcgttcacagaagaaccttccttatgagacacacggtcgcatatacgaacatgaaggcacatgcaaaatggatgttggttgctcaggattgacattgaaaagcactgaagtaaacagaagaaaacaatgctgcttctgactatcgaatgtttttgttttattgtttcaactattttctgtaaatgttcattagaggaagagttcagaaacaaattagggccaatgatgatgatcttgagggcagacgaggcagtgatgcaagagtgagtgggtgcatgtggtataagatat

SEQ ID NO: 2312 - DNA, 29201 bp, Xanthophyllomyces dendrorhous
gacgagaagaatgaaggtaatatcccgaaatagagaattcaaaaaataaaaaaggataaaaaaataaaaaagaagagggaagtgcaaaaaaaagcttagaaagaaggagaagagaagaagaggaaagagaatctgatccaagaggaatttatcttctagccttgccgacaggtctaccgatttgggtatcagaatatcctcccaggtcatcatcttcatcacttcccgccggatccggatggtcagctagccaggctttcgcggcttggatcttgttccatctgtgcattgagaatcccggctttgctttggctctctccagttcttccagatccgtcttgcttaacctttcattcgttgtcgtcggtggcagcccattctttcgcgctctttctatcccttcatattcctcatcttcttcatcatcttcttcgtcgtcgtcataggaaggttgggggcggtttacgtatgatcgatgaccagccacagatgaactttcagagcgcaagccgtcctgatctgttgagcatccagacgccggtttggatcctctcgaccaggtggatgaattgactgtactcggtatgttggaatccgtcgtagtggcagaagtcgtattggaagaagaagcgtatcgatctgatggatcaccatcttcttctgatagatgaaccttctttgctgcgcgtggaagggtcgccgatgttcgtctgtggtgggtagactgttcttcggacatcgctgaggccggtcgggtaggatgtgagacccctgggacgacggacgaagaagaggaaggacctgaggtgacggcgactgattttcgcggaggaattggaagattgtgctcgattgcgttctggatatcttgtattctgaataaaacaaaaggttgtcagaatgagccgggctcgagtcatgaggagaagggccaagattgtgataggagctctggaagaaaagcacatcatacctgttgcgaacattcttgttgccaggaacatatatagaggctcgagtatatgcgcccaatgcgtagcttaattgttcactgatccaacggagcgggtcatctcgatatacacatcagcgcgtttattttgaagagaaagacaaaggtcagaattttatggccagacttactagtcatcttctgcgtaagcggcatcatgatatcttctagcctcgttgagaagttcattggcagccgccctgtccttctccgcttgcctgatcgatcgtcaagtatatcatcaagaatcagcctaccaaagaaaatagtttctctttttttggggggcggggagggaggaaagaaggattcttgaaagaaatgaaatatagacgatacgaacatatctttctcaagattaagaatccgtgcttcataagcggctgggttgaatgagtgggctttggcttgagcggccaacgcctctgcaacagcagcttgaactaaggctttcacctatatcaagcaaaaagttagcgggcattcgtccgttttgaaacagtgcataaactcctccaaccctttcggtcatactatcgaaccgaccaagggaacattgatcagaaaactcaccctgtcgctctcggctagactggattgttcctcaatcatcgaactattgcttcctagactggtctttcctctgagttttccaccagaaacagttcttgctttcccagccggcgcaaaatggctcggtcctccaatatttgacgtcgttgatgccgttgtattattaaatattgagcgttgtccggtggcgattgacattcgaggaatactcttcataggtctgatcggtaatggaagaacagtggaggatgaagatgatggatttgaggcatcggctccagatccggttcggaggggaacgaaagtggacgtcttggttatcgccgcgaaatgagctggaggtggagggggtttgttatctttttggagattgaatggatcagggtaagtgggatgacttgcaattgtatacagagaggaaaaggaagtctacctctctcgttgatcacaactcgactttcgacttgtttcgatcgttgcgcgaaactgtattgtacaaacacaataattcaaacatgagcaaaaggaggggagagggttgtatacagagaatacaaacagatttgaatggaaaaagatgatacaaatctgactttaaggtattgatagtgtcttgtctaaaggcggatcctggggcgagtgcacagattaggagacctatcgagtttcctcccagtgtgtctacgatgacagttgtttccataagtaaagcagcattctcaacacgatcagatattgactaggagaagacatattaaaacaaagaggctcgtggtacgaaccttgtagaattcgagtaagtttggagtttcggtagggaacacgagttccagggcctcccgtatttaaggcgtcgatcacgtttccgagcgttgtcagagactaaggtatattggttgatggacaatgtgaatcagcgcgcaaacatggaagggggggggacttgcagaacgatttgtcgctttacctgattgatctttgcgctctcaatcattcgctctttatcatttccggtcagctgttagaacgagataagaaaaagggaaacatacttggatgagtgcaggtctctccctctgcgagatgactttttcgatataaggactcactttattgttttctgatcctgccaagtcaactagattgatctttcccgtgatgactatttgtatcaagtttaaacgaagagcatgttaacattgaagtgccaaattcatgatgttctctgtgaggcccttaaacttactcttgtcgccctccaagattctcaccacgagcgttaggacggcatgcgatcttgagctttctgcgttaagctttgtcgaggcagtcactcgtcttgatgccgctcttgaataaagcgcgttaaagtcagctggggaggagacagggacttgagacaggccggctacgacgttttgtccttggtcgtccgttcggatatcgagtttcttccgttggtcacgctttgaaggttttcaaatgcaagtagactgtcaacgccttttcgaaaagatcgatttgatgagagatgataggacgtacagtgacccaaggttcaaacaggtcataacattcctcctctattttcaaaacaagcgtggttgcaggttgtctcagctgatttagagaatacgtcaggatagaaaagagaaagaaacaaggagaacgaactgtaaatctctagatactccacacagacctccattgcgcccctgaggttttccttatcactcttttcaaaaatggccttgacaactctgaggatgatacccatgtcttttgttgaggtgggatcaccttgcatggtgtgagtcttgccggaaccggtaacaccataggagaagatcgtacatgacaccccgctgtaaatcttctccaaaagtggaaagacatcttggttgaaaacttcgagttgtgtagatcctggaccatgtacggatgtaaagctgagcagagccaagaaaatggacgaatcaccaagtgtggggtcaattctcgttctttcaggtaccgttcgactcgagcagcataacaatctgagtcgtgcttgtacgttggactgaccgagggaagggagggattgatagatgggagaaactcacttgtagacatgcctgcctgtcttgtggttgatagccacgacgccatcgccgacttctatttcttcttcttgggaagagatcaagtttctcgcctgactctcgtgaggaaggtatggtctgatccgacaagagaccaggatgggttgtgtatgctgttgtttgaatgaggacgacatgtcgagagaagaagatgtatgtgtcggtaagtggaaccagacgtgattgtcgagggacaaacccttctcagtgatctaccctttatgaaaaggcgcgtatgtaatgaagagcgagaatgtagaatggcgatttaaagtatcttgatagccgttagtaggagtagaggccaaagtaaagaaggagataacaggatgaagaaaaaaaaaggcaagaggagaaaacaggagaaaatcaaacgcgtccagatccgttgttacgcgagagggtgacgcgtcaatgttacgcatctgtaaccctgcatgtattcatattccaatacatacattcgactgcctacacaaagcttacgttaggtaataccatcccgctttttcttccatgtattcacttgcattgacgcttatgagacagcatgaacgagaccagtttgaggatatggaatacatggagcgggatgatcctcgtcctatcgggccacatggattcagtcgtccatgaagatagcatctttctgcctggaagaaactgatactatcattcgtttaaaactcacatcaacctcaactccctgatctctagctctcaatgtccattcttcaatacatcatggttccaaaacgtagaaaatacctcttggtcgtatcattcgttcttggatggttgaccctaatgcatagatccattaatacggtgtcttcagatggactgttgcgaccggtatcggagaccggcccctcaaccgggggatctccacaaccacgtcgtaacctcgaccttcagtttaacatcgacgatggtacgggtgtctcatcagacaagcttcctcttgtgttctgcgctctgaagggatacagtacgctgataactgatgaattttctgaatgactctctcggctcgcccggtcttcacctcttgattgctcatagatcctctatcagtaaagccatatcgaccgctggttccgaatctaaccggacgacatccaatcgtcaacggcatgcttgctgtagatctgagtctgcccgcttcccagcatccgatatatcagctcatagactccgccaagaaagaatgggactctaagctgaagaggcaaagtaagaccctcggagaggcagtcagagaatacagggtacgttttgttccagtgattaaccctcagtagatgtttagatgcatatattttttactcaatcgactttcgaaatcttttagcgccgatatgggagacctccacctaagggatttgataagtggtgggactatgtccagtaagtcgttcttcctttctgctacggctatgtgaacatgttttactcattgtatcaaaccttgcgcttctcttcagagagcacgatgtgatccttccagacgagtacaacctcataatgcatgatctaaaaccatattttgcatactctccccgaggccttagacttctcgtcaaggagatgaccagttggaaagatatgtacactttgtccgttcgaaatggaaaagtgcacactaaatcgtacgcgtttaccattaataagatgatcttatggttaaccctagccctgattgatcactgcccgtttgtctgtttattattcttatcttatctaaagtaataatatcgactttgaaatctctggcgcaggagaccggattaacggtcaggtatctcacattcaggacgtcgctcagtggatccctgatttcgatgccgtgctcaatatccatgagtgagttttgatagctagcctttctctcctttgtctcatacctcatctgagatcgaatttggctctcctccgttcgtaaattcttgttgtcgcagtacaccgttgagctttgtaagtgatgcccacaaggcgtacatgcaagacttggtagatgatagagaatgtacgtatctccttccgccctcgaagatagaacaaactcgtgcctaactcatgtttcccttcgttccgatcagatttggatctgaatgaagaagccgatagggcattcacaacgtggggtgcggcctgtccggggtcgtcacctcttcacaaatatcggccgaggttgcacgccgatcttgagagtctggaccataaccttacattgctcaacgcgcctttcacgccttccactctgtttaccgatccgatgacaaagtcgttcatctcctcacatgttcacacgatgaatctgtgcctccacccggataccatccggatccatgcatcgacgagcggaacgagacccattccacaatcaaggctctacccaatctttagcttgagccgaacagggttacacagcgatgtgttggtcatcccgaccgagcagtggaaagaaaagcttgacgttgaagtcgtcaggtggaaggacaagaagcttgatcatttgctctgggtgagtcaaatcgaaaacaaaaactgaagagtgaagaacaaattcttcgcctttttcttgggcttcttactaacctttgacattgacttgtctcttgaatattcaaatagcgaggtcgaaatacgggtgcaatctactcgaaatcgacaccgtggcgatcgtttcagcgatctcgactggttgctttggcttcatcggatatcaaggaagaggtcgcggtcctatcgccgccttcaggacgttcgagatcgaccaaagaggatgggaatccgacgttagaggacctagtgaagatgctaccggagggtgagttgaacgaccggttgatggacattggtctggcctatcaacctgtgcaatgctccgtcgagggtaggtctttcaacctctttccctttgtctttggagagacatgaagatcaatgctgatgagggtcaagaacatcttcctttctctttcaaagacggaacatgtcaagaaatagccgacgagctcatgttccgacctgtactaacgaacgaggaggaaaacttctctcggttggctctctctctttctctccttttctgctttggcaagaagcttagactgatccagagtcgcaatatgcacgtacggaactacaggtacattctggacgtcgatgggaacgcttggtctgctcgattcaaacggttgctttccactgaatcactcatccttaagtcgacgatctaccccgaattctggaacgatcggatccagccctggttacactgtatgtggaggatgaatcatgaaacgtgaaatgacgaatcctccgaactgactagtttattcttatgatgcatatctagacgttcctgttaaagttgattattctgatctgtatgacatcatgacattcgtacgttcccttctttgcccttttttttcaccttcccttgattggccaggaaattttatgtatatacttcttttttcgccgtggatctgtggctcgtctcatctcggcttagttccgaggaaacgatgattaccccggggaagacttattggctcaagagatcgctcagaacgggagacgttggtcgaccgataattggcgaagggaagacatggtgagtggaaggatgtcatttgctccggactaattccttttcatcatcgacagaaagggtaaacaaaggttacccttgctcactcctgagatctccttcttctttcctcttctttctttcatcctctctcgctcgcttgggatcgaacgttcccagaccgcatatatgttccggctttggttagagtgggctcggctaacatctctgaatcgggcatcaatggattttgtttacgacgaagagtgattccggttttcgattccctatccttgttccgaactcttgtctccttttctcttagtttcatctatcttgcctgttctttgcttttttgcctttttctttttctttcttttagcaattcaacaaatctacctaatctctgctgtgtatttatcgctagactccaggcatcttgttctcgttgacttcaagggtctcgatgatatcatgttcttggctcgatgtttcgaagggaaggagaagaaagaaaacatttgactcgaagaaccctccggagcaacgatactctatgtatttgataggttagactgactcggtcgatctctccgggtcctcatccatcgctgaatttctcgttcttagtatctcatttacaatgatatttgttacataatatgaatatcactttctcctgatgagctgtttttctttttcctgattttgcccctgactaatggaaaaagagtccgtctattgtatatgttgtgtgtacttgtgtacaacaggaggcgcataatttcactattttatgttttctgcattctcccatcaagttctttttttattctttccttaagtctatttatagcagctatgggacccagaggaactaagagaacatcaatcacaaagaataacgataggccagcagtagccgagctgattggcgataagttatagcgctccaacgaccccctccccctttttattaagggaagaacgcagcataatctagcaatgatcccaaaagatccttttagtcctggtattctgtcgtttatttcggagaattaggctaagagttcaatattagaggaaacagtacgtattttttattttttatttttattattattcagatatgattaatgacgatggatcgtctgggacggacaaacatatggtacaccttgggggcaagcaccttgacagggtagaacgctggtcgaaagaagatccgagcgacgggacaaacagaagttgggagtgatcgacggcatatttccaaatatcagcagaaagatctcggatgcctgtcatccgacacggccagattggctatctctgtggtgcttgtgcctaatcgatcggacctttttcgctcagtcgtgcgtccaatcggtctttgtttatccaccgaacaatcgctctattgtctgcatcttgcagtcgctaatcgcctgcgcactgacatcaggagttcccgaagtgaatgatcgacgtaatcaggcacatcagaaaatgtatgcaaagaccggagtgccgatttttgccgagttttatgaattgtcccggtgaattcaatcaattccggcgaatacctaaattgactaattttcctcttcctctctcctctgacgtgtctcttctcctttcaacagcctcgccttctttattattcttttcatggtccattcaccatttttttcttcctttcttttttccttgtagagctcacccggggggttcaagaagagaaggaaaagaaaactgattcattccaattcaaaagaaatcttctcttttctcttcgagagaatggtggatacaattccgtgaacagatattaatactagttctttcgattgagttttctctcccttcctcttcttcttccatccccatcgtttgtcgtttgcccttctcctttgtgcttccttctcttcctctctttctttgtgctttccaactgctttcttgttgctttcctattgcttcccttcgtctccatcacactgtcattgtcactctcatcctcatcctcaccctcactctgcttatagcaaatcactatcattctcgcttcatcatcactatccattccttgtatcgctcgcttcaacagcacgtccaacgtttgcttcaagggaaaccccattcttttccgcccgccatctctaacattcgctcccctcatttcgtcagactgcttcactttcttctcttcaaatgtcgttctgtcagtcctatccaacgccctatacgttctctccttcggccgcatccttcgggtcttctaccgagtcctcttcgccaggtggctcatctcagaaagtcttcacctctgtatcccaccctccgttgacgaaaggaagcaggatcaacatggcctgcacctactgtcgaaaaaggttcgttaacaatctgtgtattcacttgcccttccgatcgggacagagcaatagattccctgtgatttgggggcggatatgcgcatgaatacatcaagtcggacatgcacgtattgaatttcgtacatcacgctgactgaatacatccatctgtgtatccatacttcgcacccttttgtatccttttctttttctttattcatcaccaaacagaaaaatcaaatgctccggcgaggcaacctgcactaattgtatgcgcactaagcgttgttgtggtaagaccttgttgcccttctcttcgtcacatttcaaactgacgctagcttctccttttctttgcatcgaccgccagtgttcgaggagatatcggatgaacaaaaccgaatgaacaaagcacgcaaggctagaaataaagcactccgagaggccggtctcaagccaggcagtctcgctgcgtctgcaaagatgccggctgacgctctcggagagtccgccgttcccgatgttccccttgtagacaaccataacaggcgactctctgcgcctcgacttcaaggctggactcctcctctggtacgtgtctctgtcttgtatccatcgcatctcacctcttaactcacgtgttttctctctctctgcagaatggatcgactatctctcactcgtcctacccttctgtcttgttgcccatgccagcttctcaacattcccttcaactgttgacttcgccagatccgtggagtgcgttcgctccgagaccccaatccccctcattctcctgtagtccgtcatctgttcagtcatctccttcgaccgaatctcccccgcctactcccggcctatatgaagtcgatcctttcctcgccgctcagaagcaacaccagcggttcctctcgaccgctcagttctctaaagcttctacctttgccttcgctggcttgctagctactccggccacttcgtactcccacctgtacgcccacgaagccgacagtcagacttcttcgcccgtttacccggcacaacaaaggcctctttatcccggctcagcctcttcgccctcgtttcccttcaatactgttgccgggccgctagagaggcgagcgacctaccctcttcaacagcgccctgatcaggtgactatgccagcctgcaagactttctcggaatcaaagaacactgggctaggaatcaaattcccggaaggatatgctcctcattacccagaacttgaacatacggagtggtcaaccagttggtgcatttaagattcatttgctcttctatcgggttgtcagccttttccttcttctgcttttcatgtatctctgtttgtttcatcttttctatcttctcactctgtccatcccatgcaatatcttttgtcctatttatttttctaaatcatagagaaagaacagttccttcttcttgtgctttttcattctgttcagtctatatactcttgctactcacatcctctccgtgtggttcaatctatagacttggcatcttcatatttatatttgtcttccatctcttgttcttccctctttgctttcttctgcatgttttttttttcttctcttccttttatccttgatacttttcagcctctcgaacactgttcttttaccatctctcccgtatacgcgttctatctgcttgtctcttttaaaagcgaccttgtccatagtttatctttttcaaaagatccccttcggtctgcgttccttttgtcttatatcaccttgtccattccctttacctttcgtttctttgattttcgttatcttctttgatttttttgatcgtatttccctcgcctttctatactatccagacatcacgtcgcccatcttgatctagatagaagacatctatcttctcgtttcatcctaatctatccagtttggctcgttccagtaaactcgaaaagattttccgaacaggaagagaggcagaaagtaaacagatgcaccaatgtattcaattctggcacctccgacgtgcacataacgtaatgtcgcgtagatatacatatatcaaagctgactcaatccatgctctatatattctgaatcatctattcagttaagagagagagacaaatcagcgaattaattcatcgtccaaatgtatagataggcatgaaagcaagacatcgtttatattcgagtgagaatgaacgaacgaacgggaaagatgaaaaggagatttctttccatctgtcttttccttatcggccccggggaaaaaaacgctgatccagctaaccgagaagggaccaattggatcagtcaaaattgaagaaacatgtccgtacttaccctaaaggcaatgaacaagaaaaaacattgatcagacaaatgaatccaccatgcatccgacaagaaagagaaaaaaaaaagacgacgggacctatacaataagcagatgacatgtttctggttagtcccctgtcctacgtgaaacaaccaaaagcgtgcagctagcaaaagaaaaaggatccgggagccacatgcaatccgaattggcatcaagtcagaaaggattcaagtgtcagaatgtgttcctttctctccctttgatctctttggtctcattcttccttggtcctctcagtcttctttttcttcttgatcgtgttagacgaatgcaattcgatcagcaaatcggatgatcgaacacagaatacatcagaaggaaagatttcatagtaggctcggagcttgatggacaagatcatactataaacgtcaaccatcgagtaaacaaaaatagagcaaggaaagaaaagaaggggagagggacggttacagacaaagaagaagcaagggtgaagaattgtttcgaaaaaagcggaaggaaaaggaatcgattgtagaaacagtgaaaccatggagatcgaaagaagtcccaacttatgtgctcccagtcgtcgatgatccaaaaaccgctcgagtttagctagatgcgttgacctgttcaaaaagttcggatattcccatcaagctcagtaagtacacccggatcgaagataagagaaaagaagaagaaaacaaaccttgtctctgagcgagctcacgaactggtggtagctgggtgtcttgtccgatcgatcctctatcaatgcactcagtgcccaggctcgaagtgccggctcaccatcctctttgacaacatacaggtggggtcggtaaggcgaccgacgcatctcccttgtcgtgttaataatggcgttgacacgttgagagaactggttctccagaagagggagtgtcgtctgcggtgaatagcatacgaaccagatcttcagtccaacggcacatgcatgcacatcgtagaaagggaaagtatacgtacctttcctcctcggagttcctgataagtcggtgcgtcaaacacatcctggaccagctggggcacagcatcccgaccaatgtataagaaaatgttctggccgtcctcgatgaggaacagaccgtgccgttcgagtcgctcgctcgtcaagttcaaagtttcgggcaagatcactccgttctcacccaccgtcccagcctagatcacaaaggtaggcaggcaatccaatgaaaaaggaagatgacgagaaaaacttgactgtcaacatcttacttgatcgatgattaaaaaacactgtagaatcgagcgaactgacctcatcagacatggtgtgaagtgcgtagaatttcggatgcagatacggaatgagcaactgcgtaggcatagtagagagcagagcctgggcgtaacttcgcatatccggaggaatctgattgctctctcggataccgacctaattcatataaccagataacgtcaattatgttcaacgaaagcagtacacgctctgactggaccttttcaaacgagacggtagagagcagcatagacatacgttcttaagaagtccaagaaggatcagaggcaggaaccgaagatttgccggaagcatgagcgatgtactcgctgtacttcctccagcctgagtggccgccttgaaggcaacaagaaagtcgaagagctgtttgttgatgtaatcccttgcatcttgcagagaagacacgaccgtcttctccactgctttgttggcgagaagagtagcaatggccgcttggtcggccgaagcaaagatattggagacgttgtcggtggtgggaaggcaaagggtgatgactcgaattcgacgttcgcctatgaaatgtaatggaaaaatcttgtcagcccaccatgatacgtgtcagttctacgtggccccaaggacgacgtgacgcaccgtagcaggtggtgtgtagaacagcggtttgcatgcagacagtaggagtggatacgttgtcctccaattcgacctcgatagcataagactgatcgacaggaacagcaggaagggaaagaagatcggtcgaccggacaaagaagttcccgtggaaagccttcattcgaagacctgaaccgtatttgagagtacaacacagaattcgggtcaactcaattcagacaggttctgcagcagcattttacactgagttgaaaggaaacgcacctcgagaggctcgaacccgaatcacggcctccaagcagatctgactagcgaggacctcgccaagctcatatgaaaacttaatcgcatcctccgacttggcagcgttgaatgccgggtagaagtaagtctgaccaccggtatacttaggaaggcagcctgacgaaacgttcaaaaatctctcagcatgttatcagatccggagaggatgagtctagcaaatgaaatgaatcacgtactaagagaagcaatgtcggtatacgtcgcgctgaacaagaacatgtcgactgatacctgggctcgggaacaatcgatcgcaaacgtcttgtaccatgaccctgcagactggagcaaagtagactccttggacgttcccagaagctttggatcttctcggtgtttgagcgctccagggccaagagtaggaagggtagatgtcaaggtaacgatctttcctccgatggaagactgggaagttgttaccaagtcgacgaaccatgtaggattgttacttgcatcagtattgataacagacacacaaatgagaagaaatagaagacatacgatcagcttgtaagcagcctgcaaaccagctccaacggcattggcaggctccatagtgtccttgaaaatatcgtttagtccaccaagcacattctccagcgcctttctagactccttcacgttgacgagaagatcagaaggtttgggaaggaatacatcctcgagatccgacataacaagcatagcgggatcgctttctccggcctgtgaatgtgacagagtatgtatcgttagacttcttgtctgatcacgcaagaaggcaaatttccgactcctcaagagccgtcaagagtcaacaaaaaggacgaacaggcagactgaaaaagtgcagagagctatcgacagcgatgattccagcgcgggttcgtccgtcctcgttagggagtcgatctagcgattcaaggattgttcgggcagccgtggcgaccattcctatggaagccatcgcagaaaagagaaggcgagttgccattccgttccttctgagtgagtaacactgatacaaggcatataggctgcaaaaagaattgacgcgcaccagatttaacagcgttggcagaaacgtcgattaagaagacgtaacaaggaggttgaggcgctcggacctgtattcattcctgaaattcagtaattggatttggattgatagagttggccattaagtgaccatgaattcaaacttaccatgtactccgttggagccacgaagtcgaccacgctgtagttaagctccttcctcgcccatcgatcgacgttctcattcttcttctcgtcatagtcaaactgctgaggtacttcattagacaggttgcaaagcgggcacttccatcggtgtccaccctcgatataagtcacatatggatgaatataagctcggcatcgtcgacaccgggcaatcaccgtatccttcacgacgggaattcgaggctagatttatccgtaaacaaagaatatgtacgtgagtagcttgtcctagccagaaagacctgatagatcggccgcggatgagatggaagagaccttcaaaacagaggagaaaatgaactcacatcgtgttccttcaagcttcgatgcggggagatgacgagagcgaatggaagtttgctcttattgagcaagctgttagttgtagggaccgcgttcaaggtagatcgcatgtatgaatagtcagggattgcatcagggctaggagtcaaactggctcctggaggcaatcgaatagcagggggagcttcttcgatattagtcacatcgggcctgaggccaaccaaattgactgtttcaagagggtactatagatgatccagagaacacgataacacaatgtcagcactctcatgataaatcagaagtatttataccaacatagtctcctgtacccctgcagagagataggaggaagggaacaagcaagaaaagaaaagatgtagaagaggagagcgagaccgaccttcaattctgaagcaatccccatatttccaaactgatttgccagttgccctacacctggtcctgcacctccctgtgcccatcctgcacccgactgaccggctccctgttgaccatagccctgtccccctcctgctgctgccggatcatagtacgcctgccctgctgccgctccagtcgctgactcaaccccgaatccaggggtgtaaagctggtctcctcccgccgacccagaaacaggtcccagagacggatctcctccagtcggttgaatgtacgcctgggcctgctccgaagcatactgtcgtcgtttggtgtttgtgttctgcgcaggggcttgagggtatttctgttgctgaaagccgggttgaatgaccgcaggctcgaaagcgggaggatcccattgagattggccttggggacctaaggaaagaaaaggaagagaaaagaagacggaagatgcatcgacagaaaggtaagtatactggttagagagaagaccaatagaaagataaaagctgactgatgtaataaggtgtcccatcgtcggtcctgtagacatcacaccaagacagacatcagtttcttgttgaattactgatggaacccaagaggaaaaaaatccctagcagatgttgctgtgattaaggtttggacccgaacgaaagcagaacacaaggaagggcggaacagatacaatctagaagatttggagaacaacaggaagagaaagcgaagatacgaaagaaaacaaaaaagacctaggagaaaaaagggacgaaggcgacacgtatcatacaaacgaacgagacagagatgggaatatttaggacttgcctctcttcagaccatccagcaggaagtgcaacagcggacattttagctacagatcactgagctgtgagttcgagcggatatacgaggtgacaacaaaggaagaggaaagtattaaggagatagagagaaggaatggaaagagatccaaagatgggaaaggtctatgaagagaaagatcggaagagacagaggtgggtgttgtgttcacgcaccctgggttacgacatgcgtaaccacgtgactagtttggcatgtaaccctaaccattgaacggggatccttgtacgatacctacagacactcatgaattctgggaaaggagaggatcatttcggggcacagagatatgcactgtgggcacgtctgaacacatacacataacaatcccatctcaaatccgggcttgatcaagttctggacgttgtataggaagaaggcaagcaaaagttctttgagagaaccagtccaacccaatgaattaacttgacgaaccatcgacagcaggagactatcgtacagaggaacctcgaaaccagtaccctcaacgttgaatcgagatcgttgttttcctttttgtcactttctcttcgacatttttcagatgcggttttctgctacgcgtcatatgcatgtgtcggacagataggatataaggagttttcaggcataaacataaccatcccacagccacctaatacccaaaccatcattctagaatacccagccatccaatttcccaattctgcctatcaatctaaatcacacaacgaatccacatgagtttcaaaaggtcgttctgaaaggcgttgcggcgggtgtgctcaaaggacgaagggtggaagaggtagatggatagaaaagaagaccgaagagagtgcaggaagaagaaagccgaaggggaaaagagaagctcgacatttactacgatttgaaagaaaagcagaggaaagaagcaggttagtggattgatcagaccaagttgatggatgccggttatctttgaacgaacgatgttgagcttggtctttcgccaatgctataaaacgaaaaaagaagcggagacacgttcagcaaactgacgtgttcgtaacaggcatattcaaagagggtacgtactcgtctcttcttgttgtactgcaccttggtgtcagccttaagtcggaaccactggggaatgggtcggttctgtcggccggccttggcaagagcaaccttggttcggaaagtcttttgggaaggctaaatggacggacacagacaaaagaagaggaaaatgttaatatctctcagcgagtagagaaaatttagcaggcagagggagagggatatgtctttggctggcgttggtcgataagaatgaatctgtggattggcgtggtgtctgttgttgtcgaagcgagccgtagttcttcaagatgaatgctggacgcaaggggtcaaggttctgccgtcgttttcgtttcctacgcttctcgcctaaaaatgaacaaactatcaagttcattcaccgaacgttgtccaaacccgcctcctgctcctctcacaaactatctttttcttctcccaagaatctcactggacacgatttcatttctctgtaaaactccagaaccaaattctccatccagatcgaaccagatcggattgattctacgagcaaaactggaggtcgagttgttggaatcttcttgtcgaggagaaaaagttttttcttccttgtttcaggcgagaatcggcgtgtggaaaatggagcgggtggccgaaaagctgaagaatcgttccaagccgtcgtatgtcgtgccagccaaagacatatcgataggaaaggaagtggcactagacgatatctaggaatggcaaggaatgatataggacactattcccatgtttttctacgaaccattggtggagattcttgccgtgaggataagctacaaggagagaaatcttggagaggccaaaaaggagaaattcgaacgtctctctcgcgcctgcacccccattcttctctgagccaccccgaatttacccaatattacccaaattctcccgggtttgccacgcgaactgtgcactttttgacatcacgtgatatcttcggaaaaaaatcagccttctctctgacttttaatcctcctcgtctgactttttctcatctggcttcacagagcgacaatccaagatgcgatgaacagagagagagagacacacacagcgccgttcgtggggcagaaagaatatgctgaaagcagaaaatagaatttcatcaactctctattgtgtctgtgaaagtcgcaatctcatgaaacagcgataagatgtttggtatcgatccctcaaactactgccatgtatgggcgtgttgtctcgcggatttttgaccgtgatgtgattgcgctgtctttctaagtgtatgtgagtgaattgtagaaccaccactgatggcatatcctcagcatagtgtgtcgagtgcgctctgcttgccctgctctgtctggttgctcttagatttaatggaacaaggatgtcaacgcatcgcgcagcatactccatctagcccttcaccaggagaagaaccaggaggcaaggatgctgggccttgacgctgtcgctagtgaggctgatgttgagactgtcatgactgctgaggctggcagaaactaaacccatgacccataaggatcttggcgattcgtggtctgagggcacccaagtccaaaaggaccatgtatcgaccactatcggatgaggtcactctcaccgtacttaaagcatacttaggtatcatataatcattttcatatagaaaggagcgtggtatggccaggtacaaatgaagatctttacaaagagcgaaaccgagcaaaagaaagcgacaccgtgaaatctagaaccaaacacaagaaagaatacggcaggcacatctagtactttcgatcatgctcgatggattcgtcctggttggcgatcatagcggcatgttgctgccgactgtgacgcgtaagggaatgtacagaggcggatcagcaatgagcgtgtcaacggaatcactatgaaagaataattgaaacaacatacccttccattcgatcgatgctgctagggtcggcaaatgtgttgagctccttgaagtaggtgggaagagcgatggcgcaaaggaaacaagcgacagcctagagaagagagagagcaaggataaaggaagagaagtaagggtctatgtccaatttgcgccctactagtaaacctgcgcatcaaaaacttaccaaagcgacgtaaggccagaccaggtatgggtcgtcgaccactttggagcaagcaagagcgagagcggaagagatagcactggtgaacagagcacaagcaaagacaagcccctgtttatatttagaacgaagtccaaaattcgtcagtcttttctatctaagcttactttgccacgcatatagagagaagataataacacttaccttcattcgggcaggcgctcgggtgtaagccaactcataactagtgacatttacgaagagctctccgatagcaggcagggagtacaacgggatctgcgcccagaggttcacggtcgacaattcgtcacaagttgaggccaggttgccgcagggactggtggcatagactctccattgaaggatagccccctgttggtggcggtcaaatcagaaacaagcagccaggcgcaaaaagtggaatcagccatggtggcacaccggggagataaatgaaagatgtggtccatcagacagagtcggacatacgatgatcatgttgatagagccgagcatgaaaccgatagacattcgggtcatcggctgcaggacgatgtttcgcttagcgaggtaagggtaaatcccccagttcaagataggagtgaagataacctggaaacaagccaaaagaagacagtaagctaacatggcttaacacagaaggaggtgcgcaacatacaatagtgagagcgttgaagttcgagatcaagtcgttcggaactccgttgttcaccatcgaggcagacatatcattctcggaattaccgaacccgctaagaaggtggttccaggagtacaaccagatccaaagaagtttcagtgtctagattcttgagagtagacagagaaggaacaagaccaactaacccatcagcaaggttgaagatgggaattagaaggaagaccttgcaagcagcaacggtctgtctcagttcatccacaaatttgtcgtcccagagaactcgacttcgatcgatggttccttctcgctgctcgatttcagacggcttggcctgaacagagaacgtagcaaaaaatcaagtgattgagtcaaaaccatgcaaggaagagaaggggaaagaggggagcaggatatgaagatggaagcaagagagaaagaaacgaacgaaattccagaacgtgtcggagtttcccctgagtcgcgcaaggaatccccgagaccaaagaacttttacaactcgggaagcctcaacaagaacggatccttggggaggtgcatggctagaggttgaacaagagaaatcagccgagagattctatgtacatatagattcgggtaacaaggggtggcatgaggatacttactaaagccttttgctgtaagtttcagaccagagggaaagatacagtagataaagaccgattcatcagcaaaagggagtgggaagcgccgaagggcaacaagttggacgtactagacaatgacaaggacaacgggcaccatcctaagagagttaagagttgataaaataaatacatcagacaagatcgaacagagaggatacgggcagcttgagatatgtgacatacaaatagagaattccaggaataaggaaggccagccaaaagccaacatagtaggcggagtaggaagtcgccaaactaagtgtgatagaggaggaatccgagacggattaacaccagagttcacaaagttgttctttttcggatggtgaaagacagcacgtacgagaagaaagatccaatgttgatggcccagtagaagataagtagatatcgctgaatggtcgtctggggatcaagaatagcaagggatccatccttctgagtgatcacgacttgtttggtaacaggggactgatcgcagagcaaaggctatgggcgtcaaacaaatataaacagtgagaagagtcagtcttctgtagttctctttgacttgttgaggaaagaggttagaaatcgacaaagaacggaaatgacgtacgcccaagcagggcttaatgaaactgcaggtataaagtaaagtgtgattacaagggttagcaaaactattatcggagatacgcgacaaccgcgcgagaatattggtgactaacccagatgcgactgcaagagataaagaaatggatcaatcaggcgtctagttgaacactaagattagatctagggagagagcagctcacaagcaagaatcaagatagaaatgatgaacggagccatggcattgccagaagcgataacgctgggggcagcagggatgatgagcaaaaagtggctgacaacaccaatgaccgttccgacagcgatcgtcttgaatcgaccccacttggtatctgcgatgatggctccgaggataggaacagtgtacgcaaggaaggtgaaagtttgagtaagagcagtagctgtcacagatccttttctgtatggtccagcaaacacgagaggatatgagttgattgatccgagtgaagagtgcttttacatataaaacatgaggaactacgtacccaagtgctccagcagtttcatcagttcgagagggatcaaccgctcccgcaccattaccaccgattggcaaagctcctctcacgaagtttccgaaaacacccgtgcagcctaattagagagcgcggcggataggttacagagaatgaatcaaaccatgagtctctccacactagaggtacgaatcagaaggataaagagaagacagtgaactgaccgtagtatgctgcaaaggataccaaagcgaagttaaatggattttatgtgttgttatcagatacagggtgtcgcgtgagcagaagagagagaaaagaggcgggagagacgtacaagctcgctccgcaaactccaccatgcaaatcgcaaaagcggcccaaggaagcgcggcaggaactttcggaagtgtcctgagttcctcctcggtaggaatcctctccgtctcttctgcttccaaagcggcaacaacagagaccggatgtgctaccacatccttctcgctcttagaagccgagtaggaaggcaatccattctgggccacaggagcagactcgtagtcaaccacagtattctgaccggcgcctgcacacgagaacaaatatataggttgtactaaatacgtcgatacaactgtgggtgattctggtatggatgggctacttactcatcgcttgtatatgtaagtgatgttagtatgtgattatggatgatatgctatcaggttcactgctcgacggagatttgtatagtcctgacgatgacctatgccgatgtaaaagaagggaagagaaaagtatacatggcatcgatcttcttctatctattataatcgttcaccgcaaccgatcctctaacaaagatagctgaacaagagaaagaaaatcgggaagcccgctgggagcaaatgaaataaaggtctacaaatcaaaaggcaatagagccagatggcaacatatcagctgggatagaacgacagcgaccaagctactgagataaacgatcaacgctgagcgaatcgaccacatggggcagcagaacttcatttcatatcgagcttgatatgataacaagcggaggagtcggcaatataccagcctatacggccagagggcggaaaaaagaaagaattggggcactttccatacggagagagtcttgttgaaagcagacctctatcgtctttactggatacgacttcacgtgcggaaagaatataatctaaaaaaagaagagcaaatgagcccatgcgattactgggaatctgtgctgcgtaagcttctccggcgtttgaagacacgtcagattagagcgtcggctgtcggataggctctgccgcattgagtacttgggctgatcgtcagtgagatactctgaattcatgttatagccggtgatttcctctttaaaaaacacactagtccgttgcctccatcacaccatcgcttttaaaaagagagtcaaagaggctgaaattcttcaatttccaaactctcttgaacacagatgatcagggatctgttctggacgggcgagcaaatagccatacggtatttgatattccttcaccctacggctacgtcctcaaagatatatacgggaggacagatataaggtaggaaggaaagaaagaaagaaaaaagaaaagctccgagttcggtgggcctggacacactgtgcaacaagctcaatcagaccattcctcatccctgtccgttcggagaagacaagagaagaaaataccatcgacggcgttgcaaaggttcagtctgagccacagattaaaatagtatacacaaatcatccggagaaaatagaaggacgcaccctctagtagacttctcatcgttctcttcatcctccagtctgatcatacaaagggaaaacatcgaacaaatcagcctctaaattcaaggacgaacagagttaaagcttcgagagcgctcacttcgcacgtgcaaacatggcgtccatcgaggctttagctagagagacaaccaaaaatgcgtaagagtgagttctgactgtcttcgtagggcccaaaatccaccctcgatagatctcgggtcgacaacaaacctttctcggcggtcgtaggttccctcttgccaaactagtcaatgaaaaagcaagagacacaacgttaaaccaggctaagaaataggggtaacatgcacaagtagaaaacctacctggggttttcctcggctcacagcttggacgaccggcgcttccgatgctgatcaagttcaaaggagatgctttcgttagtcaggatgggtatgataagatatcagggaggaaacgaaccaagtttcatcccctctggtctaaggtcaaccagcggaacagcatcgcccgccctgttcatccaagcagatagctcagatcctttcgtccagtctctagttggagggtaaacatcatcctggaacgcatccatgtttttcctagggatcttaaacgtgaactcttcaatcgttcgtggggtcaaccgatatcctttggcaacctcaaccttcctaacatcaagtgtcgatttaggaaggaaggagatagcattttgcataggaccggcaaatgtcggcaatcgagtcaaggctggcttcgggccatcgagcttgatgtcgaacgcagagatcctaacgagacgggaagaagagcgagaaaaattaatgataggtgagcctctatcacaagcaatgcataagagaaggaaaagacgaacgaggtttctccctttccccataaataaaggattgacgtatcggcgtctggatttcatcatatacgaacaattcaacatgaatacttcttgattgatagtgccatcttattggaccgcaagattcgatgatgagacgagagtgaaacgcaccaaactttgggaacaagacggaaggtgagacgtccaacatgaaagaagtcaccacctcgatctcgcttcccagctcgcccttcagggaatggaccaatatcttgcgttgagatccttgtgcaaatccaacgctcacaaacattctgtccgtcaaccaggctagttggaaccctcttgcgctgtcgtgcgcaggcccagtccatcctgattcggatgcagacagtctcctgggatcgaacacacggacctttcgatctttgcacgcgacagcgattaaagaaccttgatcattccatgcacctgtccagacctgatcaaaataccatcagccatcatattcacaaacacacatgacaaatgatactcactccactgccagaaacggtatgatccattagaatgtttcctgcagatgtaccaaacacatgcagacgacctgctccagaatcgtttgagaggacggccagcacattttttactaaaggattccagaccagctttgcgaccttgtcaatcgtcttgcctatcagatgccgaatgcagttcgacgaaaagaaggacagcgccatatggggccagaaaggagatagaacatcagttcagaagtctcattgagttgcttcgaatgaatcgttttctgatatcatgtagcacgtacagtctaaaacggtttctggttgagttacgatcgtacccagctcgacgcctccctgtggtacttcccaaatcttgattcccccatctactcctgctactgcaactctactctcattaccaatcggatctaccgcaaagtctacgatatcactcccattagcgaaatgaggaaaatcccctacaagcgggagccgtcctctcttttccattggttgaatggcgagtctgcctccggagccggcaatggggaagaacaaataggacgaggttacttggaggaggtaagaatctgcaggatgggcagttgagaggcaagacaggttgtcgaatgtaggaatgagatgcgaggatccttgcaagaagtttcgggaccagcgaggtgtagattgcgctgaaccactggctggtttaatgctggtcgaggagttggatggaagctggacaggtgaagcaacagtcagtttggtttggagctggataggggtagaagaaataggtggagacggagcggaactgacggtgggggcgatggtgtatatagcggcaggtgcagcagcaggatttttggatcccacagagggaggagtcgggatagagagctttgataaaggctctgccgaagtagggctactcgctctagattctcttggtttcggttctgatagcgtatcttctagcttggaagggatctgggctcgattcttaggctgggaagagtttgattcggcaccggtctgactggacataccgacaacagaggctgcggctgacctgattgtcgatactaaagcctcaacaggcttcaaggcctccgatacaattttttcactcgcaatagttgccttgctcaatacatccgaggtggtggggacagacgttggaatgaatgtctgggcaggtcgttcgtgtttgaccgctgggtccagagagattgggagaggaagagcatcttgtccagaaaaccaggcttcagatgattgggcggcatagtcaggtcgaactggggggaagatgtccgtatggaattcgatgtaatgctgtacgaggatgcatgtcagtgaacatggcttggctttgagcgcggaaggtcttggtcagaagcaatacttactcgtttaggaattttgatagcaactgggacgatctctttgttcctatcaacgatcatcaacctgaaaggattgaaccggcagttaggaatcgtatacgtatcaagttttgtcaaaagcggtcacctacctattaatctcaccatccatgacgttcagtcgacctgcgggtgcaagggccatggtgattaccgagctgggaatcccgaccgcacctaagaccaaaaccgacgtgccatagtcatatcaagctgttagtgagccagatatctcttctacgcgaaatgaaacagaagaaaactcaccccaagtgaaggagaagttctttgaaatttcagcatatcgaatggtgttctctgatcggccagctaggtagacagttcgtcgctcctgatcgactatcggcacgagtggcgcggtctcataatcgatcgtcgtttgaccaacaggagaagatatatctgaaggatcaaacaacaggatctgtcgctctcgagactagaaatcgcgacatgtagagttatgacatatgatcaacaggaggaaaggatgccacgcgatcttaccttagagaatcctgagatgagaaactgatcaccaaaggcgacgattgacgcctgcttaagaacgttgagataaggtgccgaaatctgtaataggaagaaacatgtgtacgagagcgttggcgtcatcacaaacagaaaatgaagcaatgaaaactcactttaggaggtcctccagctcgcggatcatacactcctacagtcccgtctttagctacaacgcctatgagcttaccatcccagctgaagcacacacccaaaattcccttaggagaggatgcttcgaattggattcggggctcagccttggttgaagagagatcaaatacggagatggtcgagttggttgagacaagcaggatagccggattggcagggtgaaagaggaccttgatgattgaggaagggagagagaacgactgaagaagagaaggctctccatttgggtcagggggaagtacccaaacattgacctgcgttcgtgcagtaatggtcagaaacacgcggtcaacgaatgagtaaggacgagaaagggagacgaacccctccctgacctccgacagcgactgtcccatctttcgcatcgagacagctgatctttcctcctagggcactccagctgagcagaggtcttggggcttgtccggccacaggctttcctaaatgtttctcccagtcggcaagaaagaggccaccgagagaagccgaggttgcgatgattccgagttgagtcggtctgatcagagtaggagaaatcccatcagaaggaagagggagatctggataaaaaactgatctatctggcacaatgggaagggcgttcttatacggagacactgcgaagcgcgagggtggcatggcaatggtaagatggagagtgagagagtcaatctgagcaggagataatccagatgtaaggagtcgacccgagtggtttacatcaaatctcgatcatacagtgttgattcaactggtctttcatctacccgcttctgctgtctatatacaatctcatcatctggctcctagccatgcgcgacagagtgatacagctgctttttcgccttgcccttcttcgtcgtt

SEQ ID NO: 2313 - DNA, 1473 bp, Xanthophyllomyces dendrorhous
cgactcgactactctgaggttcatgttgtatacctgacgccggatgtctacatgaacatcgctgagactcgctgcatgcagttcgattcaatatatcttctctgtctcttcgcctgtctttgtctctgtctttgtttctttgtctctttgtctgtggacggtagagtgttcaccaggtcgttcatcatgaccgacagccagtcgaaccggtcaaaggagatttcctgcaaacaagcagacatcaatcccaacagcttataagacacaacgaactcgagacgatcagagcgctcttctatatcagaacatctcttcatatcagaacacttctccataccagaacactcatcagttgctttgaggagtgccgctcctcttgtgttcgacatgaagcgcaagaggacggttcaggcctcgacaaagtcttcccttgcggctaacactaccgctactactaccgctactactaccgctactactaccgctactactaccgctactactaccgctactactaccgctactactaccgctactactaccgctactactactactactactactgccacatgctcagcctgcggtcaggttgggcactcaaggcgatccaaccacctctgcccattttacatccctcgtcagagagtggaaatccgcgccaagtcagcggtccctatggtgtcagggacagtaaagataggctttggttccttactcgcctttgggccactggctggcccgatcgagtcggccgttgcccggctaggaaagataacattcgacgcgtctcgccttctcaatatccacatgtcgaaggtctgcgcggatggaggggagataccgaatctccctaatacaatgcggctctattttcaagctgttggttttaacacgcgtggaggaaatctgcaccaaggggcgccgacactgaacgaagggatcaaccacatccgggacgcctctttccctgctgagcaccagttcacagactcaaagtgagtgatctctttggcaatgacaatggtaatggtgattcagctggccgtaaacggggactgactgattggccattgctgtagaatcctgagcagcatgatcggcgccaaagccaggtcgtggaccatggcctgccagaaccatgtcgtcctgaacatgccgcgccgggcttctcggctcatctcttggtggctggagacaaacgttggagaagcgatccagagtcggatcagtatcagtcaggtaaggaagacgagtcacctgaggagatgtctgaataaaggctgcagcgatgactgacctatctgacctatccgatacatctgttcgttcttagcgcactgccctctcccatcaactctaggagcaactgtcccctcctgtccgagaggaaggaggaagagaagagggagaagaggatagagaggaggaaccaccacaagctgccacatccttggtggccccgccctagct

SEQ ID NO: 2314 - DNA, 535 bp, Xanthophyllomyces dendrorhous
ctcctccttcctgaccagcgcacggtgatggaggctcatctccgagtgttgttcgacttcctcacagatgacatcttcggaggtttgcctctgacgggtgaggccatcaaggcttcgtggtggtcctatctgcgccctctgtaccgggtactgaccatcttcgaggaacatggcccccaagatgcggctgcaagacggaccactcgtcgccggggttatggcctccgcctgttctcgcttctgccgctctcgtcccaccggtcatcttatgtctttgtagacaccatggctctctacgaactttggtgccagctcaaatcggcaggtgaagatctgggatatatgcgtggggtaatatgggactccttccgggctgactctgacacttagtggaggccgtcgttccatatatccaaggtcgagaccgatcggcgacagttcgcccggtcgctcagtacggacggcatcggcgtgtctgccggaatgctgagacccatgtcgtcttcatctggcatcgacgcctacggatggagat

SEQ ID NO: 2315 - DNA, 598 bp, Xanthophyllomyces dendrorhous
ttcttcgctgctcgaaggtggagacgtcttcgctggggcgcacacatcagccgcgaacaagcataccacaaggtggcgctccgtctgtcggcaggacgtccacgcaccttcttggccttcggcgacggcgccttctcatcgtcttctcgtgggcatgcacctggtcctatcaagatgatgtatgccaagctgagggcctctccgctacttcaggtccgcaaagtctgggagtttcggacatcgagggtgtgctcaaagtgccatggcgagttctctggaagacacaaagcgtgggcgatcaaggaatgtcggagcgtctgtcgagtaagtgctgtgtgtctgttacatatcttatgatagtgtctcgatgactgattattctctatgcttgttcacggtgttttctctctcagacttggtggaatagagatatcaatgcgtcacgcaacatgctgcacctagctctgcaccaggaaatgaacgaaggggcgagaatgctagggttcgacatcactgctactacgctggtcgctgaggctgaggctggcacagactaaacccatgacccatgggaaccttggtgatctgtgatctgagg

SEQ ID NO: 2316 - DNA, 714 bp, Xanthophyllomyces dendrorhous
cacccaagtccaaaagggccatgcatcgaccaccatcggttgcggttactttctagtagccaaagccatatattgtaaaaaatatagacatcggtcttccaagtgcggtaacttggttacttcctagggttagaattagagccgaaacatacttatgtaaaccaaacagaaaatcaattattcattcatctataaatctgtctcaaaagtcattatagtctgagattgttgaactatagtgaacttacaaatgtgatcaaccaaatccatcgaccatcatcacctcactctcttcctctctctttgactatagtaggttcgaacaatgcgcctccactttcctctcaactatcgagcaatcctttgccagtgctgatggtagatgggcgactaagattaaagtaaactgttgagatgaagtgtccggctaaagaccagagaagttgacccgttgtgccagactagacccgaatgtcgattccacctcaaatatagtccaacctcatcgagttcatcacaacctcgccttgatattctaacagacgattaagtctttcggcgtcttctggacgacagcctgttctcgcttcaacccaacttacatcggactctcgatttgagcttctgcttcccctgacccaaaacgctcggctggatgtctcgttatccctgaaacatatcatgactgactcgattcttgctgatcccagtctg

SEQ ID NO: 2317 - DNA, 325 bp, Xanthophyllomyces dendrorhous
ttcttgctgatcccagtctgcctcgttcatagactctatcactcatcgaatcaaatctctggcatactttacaattcaggctcaagacgttccgctgtggacttctgtcgtagagatcgccaccaaggagactcacgcagttgctcatccaacctacgtaggaagagtaaggaaaagacagccgtcaagtcagtagaaggaatgaagcgatctggacgtaatcttctctctgccgtttctccctagtccgtttctcttcttcctccctatacttgatcgacatcaagtgcagctctcgccctttctctttcagcatcacattggc

SEQ ID NO: 2318 - DNA, 38560 bp, Xanthophyllomyces dendrorhous
  misc_feature (15755)..(15764): n is a, c, g, or t
tgtcgtgcttcggcttctttcttcggcgtctttcttcagatcttccttcgttcagatctgccagtgtcgatcgtctccgcgctgctctcgtctcgcactctcagtcctactcttcgctcgcgacgttcttcgctgctcgaaggtggagacgtcttcgctggggcgcacacatcagccgcgaacaagcataccacaaggtgacgctccgtctgtcagcagaacgtccacgcaccttcctggccttcggcgacggcgccttctcgtcgacttctcgtgggcatgcttctggtcctttcaagatgatgtatgccaagctgagggtctctccgctgctccaggttcgcaaagtgcgggagtatcggacgtcgacggtatgctcatagtgccatggcgagttctcagggaggaacaaatcgtgggcgatcagggagtgtcggagcgtctgtcgagtaagtgctgtgtgtctgttacatatcttattatagcgtctcgatgactgatcgttctctatgcttgttcacggtgttctctctttcagacttggtggaataaagatgtcaatgcgtcacgcaacatgttgcacctagcccttcaccaggagaagaaccagggggcaaggatgccgggctttgacgctgtcgctagtgaggctgaggctggcagaaactaaacccatgacccacggaaactttgggagtctgtggtctgaggtcaccccggtccaaaaggaccatatatcgaccactatcggttgcggttgctttctagtagccaaagccatatattataaatagtataaccctaacataactttccatcaaccacgctcctgtttcaagtattaaggatttttctttttttcttcataatatatttttctagaaaatctgagtatctggaaggaaagtgtatggtatgtagtctggaggactatctatgcgaagtggatgcctcgttcattgaatgctgtcaacaatctggatgaatttaaatagaaatggatgatgagaaatctggtcaacaaggtcaaggtgatagataacgtacttcaagaggtcatcgatatccatcttagctgcacgttggtcagcgaatccagtctccaccaaaatctcctcgaccgtttgggaaaactcctggctaggagccatctattaagataagagaatctcggcgtaagtcacccaacgcccgtttctacctggtgacactcgtagatgaggacgaataagagaccaacctcttctttctgcgccaaccaggtcttccaattgctctctaacatctcacacacaccctttgctccaaaactagctctgacggtcttgttccttctcgagaacacgactctgccaagtccatcgaactcttcgaaccgaaccggtgggggaggattcttgggctccatcctgatcaccgaactctcgacgttcggcgccggtcggaagttgttctttccaactttcaatagatgagtcaccttggcgaaaagctgaacgttcgcgctcaaacgagaccacatcggcgaaccagggggagcgcaaagacggagggcaaactctcgttggaacatgagaacacacgtccgcggaagaggtcgagtggagagtagcttaaagactaaaggcgaagagatctgtttgcaagaaacattttcaagaaatcagtcttgcgcagaacgttcgagtagacaatgagctgaagaaagacagtcttacttggtagggagtgttggagatgcatacatcaaagtaaggaagttcggctttcacaaagtcgccaaccatgatctctaacttcctctgctcaggtcttcagatgcgccaaagagaagaagggcatgtatcgtcagtccactttctatattttcctgcgtgaaatcccctctctatcgttccccttcctgcctcgatctgcggatcaagcgagaacggcactcactttcccatgactcgcttcgtcaactcggccgccattcgagggtccatttctacagcaacgaccttcttacacttttctaatattcggaccgtcaagtttcccgttccgggtccaacctcaagaacgacgtcggtaggcttgaggaaagactgcgcagcaaaaccggaagacatgattgtcaggcgaaagacgtcaacaagaaagagagacagccgatatagagcatactttatcaacgatactgaagaaagagaattgtacatagacgaacagatcgattagcttgatgaacttctgacgcggttaaaatgctctgtaataggagcgttctctacctacctttgggcaacatcagggttctttggagataacgcagttttcacgagcaccagtcaaagaagtatgtatcagcctcaagcactggcaacagagtatcaaccagacagaagctttttggttccaactgactttaagaatgtgctgtccgaaccgctcagtgttgaatagcggattctttgagccatccccaccgctcgcctttggctctttagtcgtccgggcggctgccgagtggttctggttgaatttttgagaggtcgcacggggcatttcaatcgatgagcgttctgtgaccgggagcgggagaagacgaagcgacggacacaggaggggtgtgtgtatgtatgatggccgggtgtaagtggaggggatttgtttagtggtgaatattttatcagaattcacatcagccttgcgttagtctcgacactttatcaaacaaatcgcttcttcctatgttcttacagcaaagagcagagtcgggtcgtcgtattcgtcttcatcaccatcgataaacacatggaaagcctgcccaaacgtccgttgtctccacaggcgagcttggccagaacgaaacatcttaaagttgaaagtataacatcaaccgcgcctcgagatgtccccgtatccgcccccaccttcacacatcatcttccccctccctcgttgagctcacctcctccggctccccctccgtttcaacaaccatcgcctttgttcacctattcgatggcaggcccatccgatccctctggacacaggattttgctgttcgataattctgcagcagcctcgttcgcgcctcctccgatgaatgctaacttggatgaagggttcgagaggtgtgtttggagagacgagatcaagtctgttaaagagggagtcgacggattggttagagggctagaaaggcttgaaggtcgaacgggaggaaacaaagtactaggaaagggcaaagaaggttcgctcactattctgtgcctatatatctattctcacaagagagtcaaggctgacattcgaggacttcaggtttcgttacatggcggggagttttgaccaaactgatcaccgctccgtacgaggaccgaaactcatgggagtaagccttcttcttcattagatcccttggatccatacaacgtgttgttagctctcgagatttcttcccttggttgcgtatcaagacgcttatggttgctacttgacggccttgtttcaatatcgtgtccggcaaacgtattctaggctgaatgcgatgctcgcgccggatggaaatatctatgtcgagaaccacaagacaccagataaatcccccagcttgtgagatttagaccctttgttctctttctcttctcacaaagctacagataccaatgcatacataacaactttgacggatagatatggcgagaatcctcgccaaaaacgcatgacttattatgggtaagccaacattttcccatctgttccgcgcttcacactcttctctcatttctctccgtcattactctcgcccctacgctatgctaggtattcttttgagtcctactgtactattcctccggcttcctcctctcagtcgcacgtgcgcagaccagactcatcaaacaaagcaaagggatggggctcggacgtagacacgaactcagagtggtgcgtagttgtcaagacggctttggcaggtgttagattggtgcttggtggagaggtagattgtgtagagggtccgttcgttaagcctatccatcaggccaacaaggaaacgatgacaaatcggttgattcaatttcgttgcaggtacctacaatgggacactccggaacgcgatcgaactcaagacaaacagattgatccgctcggatcgcgacgaggttttctttgagaaaaaactgttagttctttcttcttccgctcagcttggctcgccttgattaagtctgtcctactttccgtccgtactctgccaacaaacacaagtcttaaacactgggcccaatcattccttctctcgattcccaccattatgattggcttccgaagcgaccggccacctaccatccagtctgttcaaacgttccgaacgatggatatccctcggctcgttagagacaaaccaggtggatggcaacccggagtttgtttgaactttggaaagcaagccttggagttcatccgaggtgttgtaagagatggagaaggagatggtcgagatacagggaagaccgtttggttcgttcttttcgtccacgagctgagaaagtttagtcctcagtgatctcgccgagtaactcacaagcagactctgtttcaaactgttcgtgtctcgctgaacacccaggcggattaaatttgctcctcttaaaggcctggaaatgcgcccgcttgacgcttctgagatacccgagctcgaatctggccgaccgccaattgataattggattcccgcccgatggggattcctaccaggttggatggcaccgaacgcttcacgtgtggacactaatcttgaagccgacgctcaagaggaccaccagccgccgagtccgtgatatgttctcatgtatatgtgcatatgtaaaacagactgaagggccttccttaacgccttggctttgaagagaggcaaaagaaaagaacatagagcatagcaaagcaagcaacatggcagaataacagtaatcatagccttgccttcttcggatgcgagaaagccgtcatcgccgtcgaatcaaagagataaatgggaccattaagccttgacagcagcctgtttgtttgatcatcggatcgttcattccaaatcagaaagataaaaagtggtcagctcaccttcgcttcctccgtaggggtagcgcctgtactcacatcaaaccttcgctgagcctcagcaaagttgcagacgttccagaaagcggctgtttttcaaagttacaaacgaaaacattttgaagagtgagtcaaagatcaaaccggggcaaacgaatagagaattacgtaccaaggtaatcaggcttgacattcttgtactggaggtagaaagcgtgctcccagatctaccaaaagaaattgattcattcgtttgagatcaaggcaagttcagaactcgactccaatcactagatagaattactaacgtcaagaccaatgatgggagtcaaagctacgaagtcgagagacagcgaacgaaatgtgtcagcaactggcttatggtgaccacacgagagaagtcacatactgataaggggatcctggttggcggtggtggcgatctcgaggtgcttggtagcggtgttgtatccctatattccaattcacagttgttaggtatcactatcgctaatgttcaaagtggaaaaaggtcaaacgcacgagccatccccatccctacaagtacatgtccgaaaaactattcgtcagtttacggaaggaaagctgagagtatgtcgaagcaaacgagatactgacagatccctggacaccgagagtagcagtgttgaacttcttcttgaactcctcgaaggatccaaagtccttgtcgatggcagtcttgagcgatccctcggtgagcttggcatcagcagagtcggcaggagccatgttcttccagaagagggagtctacagggtgagatatcccggggttgcatgcgtgttagtgacaagcaacacatatgataagccagaagagggagaatgatcgtacggttgatgtgtcctcctccgttgaacttgagagcgctctgaagagcgatctgggccttgatgtcattggtctgggagaaagcctggatagcggcgttgaggttggtctacgtagcgccgaacagaaggaagatctatgagcaagttgatccggccatgtagacggagatgacctttagattacgtacgacgtaagtctgatggtgcttggagtggtgaaggatcatgatttctgcatgttcatattgaggaacgagagacgattagctatcgtgtcgaaccggaacaacagtctgactaagaatctcacccttagagatgtaaggctccaaggcatcgtaagcgtaaggaagctgaaacggatgacaaagatgcatgggaaacgccgattgatgagcaaatcatatgcgaccacgaggggaaaaaaaggagggatgccgataaaaaaaccaggaagcaaaaacaaaaaacggtgagttcaactccaagattgagataagcacacacagctcaaactttaagcttacgtcgggaagagtgtaaggagccatgatgattgatagatggatatagtaaaaagccggggaagaaggttcaagggtgggttgtggtagtaaaggaaaaagatgagatggagttagctgaaggcgaaataccgtcagggcatggttacaggcacgtccaagccggtaacttccggattgggccgaacgtaaccagcatcggcgcgtcccacctttaatgacgagggcgtgtggttctgtggtgtggaccgtatcggcgtgttgctcggttggtacttggttccaaggttcaagggttcaagggttcaagaggattctgggatcattccgttcgaagttcggtatacatcagattgctctcgttaagtatgtatctgccatcccaagaagagatagaacgcgtggtgaaggcatcgctgggtagagagaacgatccaatatcggtaggtacctgcttactcgtctctccttcatttcctggtctctttcttgtagacgaaggatgcacttgcccagacttgctcgctcttcactatcatactacagagctttcctccagagatcgtctctactataggcagttttttagaaaagttcccatacgatgataacttcgtcgtacgtattcctctcttctcttctctttctttctttcgtcttctcaaactgtaaacattcattccacctctcaacgagacattcagattgagagacaagaaggtagaggctacggagttctcacatgtgagtgatatatgctgtgggtttgatgtacatccatccaacatggcgaccaacaatgtgtctcgatctgcttttaggtatggaggatcgatgttggtgtgacgtcgaagcagtgagaaattctgcgttgcctgacggcggtgtgtcaatcgatttggggagcatggacagcttcatagttcgtcctttcatctgtcaacagaaagaagctcttgtcttgcttaatactgtcagctttgctctgcgctacctttcgtataggaacatatccaaaaccatcccacacactcgacagacagagaccagcggcagaaggataaggtccgtagcatacaagttctctctcttgatttcgtccattctggactgacatcccaatgcttgaacagatctctcaataccagccaaactattcgcaaagctccagcatgtttgctaccagacccaatctcaaacggcatgtgtcttccgaagcgggtccttcgacgttagtatctttctctgtcgtctacgtacatttcgagcatgtactgagtcaacagtttctcccctctattatcaaaccgaacggaaaatacaatatagaacactcaacagactcgaatcagaccagagcttttttactcctaacaagaaacggatcaaactcgaagactctcgaattgactcggccacacccatcctcgttgattcatcctcgcccatcctggtagattcatcctcgcccatcctcatagattcgtctaccgaaagttcgcccaggtcgtcatctccaatcctgattttttcgccagtcgatcagaaacctcaatttgagcatgttcagcaagaaagaaggagactgttaggggcagagctggactatctcaaggagatcatcgctcagtgagtagaatctccccttccttccgtcttctccgacagttacgtcgaccatctttttcctaatgcctttcagatttcttatccctaaactgtaccgcttgtcgttatcatcagaacatccatgtcagctcgctcagctattatgggtcgaataaaccatctccttgatagcatgcgaaataatcctgtcacaacacctcccgaacggacaaatgctctcaatacaaaccttcctgaagtccgtagacttttcgggtcaatcacggaacctcctccgagcttcgacacacaattttcactacgtccgtcggctacttattctcagccacacgcctctggatccagctcgtattatgatagattcgggattggaagatatgatgatagtagtgacgaagaaagaacgcagcgggactctcaggagaacagacttgcgagagacgtcaagtacgtcccaccccatccgcaccacatattaaataagctctaatcaactggtcttttccatcatgtacagcatgcgcgagttcttctcggacgcgcttagcgagttctcaagttcgatgacagtcaaagatagcctacacaaactaggactcgaaaatatgacggacaagatgccaggaatgaaagtgtgagtatcgatatgtatgcatgagaacgtagggtcgtttcacaggagaggagtatgcagaggactaacttcactaggtttcacattcaacaggtgtctcatgtgggtaatctctctttccgttgatatgcgatcaaatacgcccgagtgtatagaggtatcgatcctgatgcgcgttgcgctacaaacttcaattggattgaaatgtgatatccaggccccatcaaatcatcggagttgcttggatggtcgatcaggaggctaagcctagttatgccggagggattctagcgtaagtgtgctttttagtctatcaagaatgctcctcatctgaagctctgcttgacacactgctttctcgtttggctattttcttcatccccttaacagagactgttagttcttcttctcaatcccctggaccaatgtgtctatttgttaaagaactgacgcacagagtattcactttagcgatgggactgggaaagactattcagactgttgcgttgatgaccaaaaatatcagcgataatcccagaaagaaaggaaacctgatcattgcgtaagatctgagtttccttcctagtcaattttctaacgctctggcgcttactgagcttttttgttctctcacaacagcccattggctctattggatcagtggaagaccgaaattgagacccggacaaatgcttccttcagtgtgctcatctaccatggcacagcaaagaagatctcaaagaaaggtttgtacctcttcagaaacgaaacaattcttgaaataaagttatcctctgtctgggctgacatcatgttttccagaaataagaaagtacgatgttgtcttgactacatatgggactatcatcaccgagtttcctaagccaaagaaacgccgtgcacgcgttgcctttgacgggtctgatcccggcaacgttgatgatgaggaagagcagacagagcccgctccgaagaaatacggaccattagctaggatcgaatggttcagaatcatcctagacgaggcccagatgatcagaaataaggtacgtttcacatcagcgacacaggttgttcggtttctgggactgacgtctgcaaagatgctttcatttgatgaaatactgtagtcaaccagagcaagcacattaatagctgagctggagggtgattgtgcgttctttccttgccgttatgttgatcaagtgtgatgctctccgaggcgtatactacgcacgctgatggatacatatcctccgaactaatagacagatggtgtttgacgggaaccccagtttgttcagactgtcaaatctttctttttgtgtatcggtttgtgctgacgtgttctaaatccgtcgaatctcgttcagatcaccaatggcgtggatgacttgtacggtctgttccgcttccttcgaacgccaaagtatcacgagtggtccgaatttcgagaccgtatccatagtgtcgcaaaacgaagcccaaatcttgccgctaaaagagcccagataattctccgcgcgacctcgctcagacgaacaaaggacagtcagattgatggtaaagcacttttgacgctaccagaaaaagagattataatagacgaattagtcttttcacctatagagagagagatctatacagctgtggaaactcaggcaagggttcgattcaataagttcttgaaggcagggacggtcatgaaaaattatgtgagtgacgacatgctgagaagtacttgccttgcgatattcataattgtttcgcgtacccgtttgtcgtcggtttctaatcatgccggttgtttctatctggttgatgaatcctaaaagtcccatgtccttagtatgttccctgttctaatgactctttcatgcagcccaagaacttttttctaaagtttgtcaactttcttttcactacagctatgttgctacgactccgacagctgtgtaatcaccctcgtttagtcgttaaagccaaaggagatccattgggatttgatgacttggttcttgaagacggagatggctcaggaattcatacagaggcagtcgacgaggatgagtacaagcgggcagtggctgtggcaggacaagagtcagtacaggtcttatcgtaatctgtgtttggactgtacactgtaattaacaaaaatctggtatggcttgttgaattgttccataaatattgctagatgggttgacgaagctgttctgaaactcaagaatcggatgctcgagtcccaaaaaaaagagtcggagggagatggagagcttggtaacgactacgagtgtcctgtctgtaagtagatccttcggcttgacgcatactaggtcgtcactgtgatctgtctatctgtagtggtaaccttccaatttctttatcaacacaggtatggacatcctgactcaacctctcatcacaagatgttgcttgcaagcgagtcctctttgaaaacgtacaattacgatatcatgtctaagctgacctcatctcacgatttggttctgtcacttctgatcatcagctgtactgcacaggctgtattgagtctctccgcgtagctagtcctcaatacggcgaaaaccctgatgccaactgtgttgaaagaaaatgtcccacttgccgaggagtcttggaccgtgagttctctttgcttgttctgtattattgtgatacaccgagggcgccccactgaaaacaaggccatctatatcattttggtttgaacagaaaatagcctctttagagcttcagtgtatgtctgaatacatctcatatgttgtcgtggagtgacttctaagcttcattttctttgtttgttttccctcaaaccttcagctttgaacctcctacagatgactcgagcgatgtatccatcccagacatcaaagatgaagaagatgatttagatctacagatcggaagtgggagacggattaagcaggataccgaggatgatgacgcttctgtatgtccattggtgtatgattgtgcttctcttaattagctgcattgaggacgaaacctgacgacttcttagttgaaccagatcgacgataagaagagcttgttcaagccgtccatcaaagggaaagagagagcgcaatcgattcctcttcctccatccattgtagacgaagagtaagtttctttatttcttcatctcaatgggcatttagattgttcgatatatgtgctaagcatgtttgggcgtcttttgggagcagtgatgagaacatcgagcctagcatcaagatggagcatatgatgaatctgatcaaacagtggcaggaagcagattctgatgacaaagtacgtgcttcatattcttggcgtagatagcatactgtgtctgatcagttctttgtcgactgtctagatcatcatcttctctcaatatgtcaagtatatcgaactcctccaaattattctcagcagagccggacacaagttcttgctgtgagtctacctttgccttttaacgaagttgatttgatgttggttccaaagtcttgtctttttcaataaggtaccatggcgggatgaatatcaaagatcggtaattctttttctttacatcttgatccatggacaggccaaatttgagttactgatctcagcctattctcttctctacagcgacgccactgtcaaacaatttcaattagatgaagatgcgaagattcttattgtttctctcaaatgcggaggtgttggcttggttagtttgttctcatcgtgtcctagatcctggtgatcttttgatctgattaattttcgttcttcaactattgtagaatttaactcgcgccaaccgtgtcatcaactgcgatttagtacgtacattagattggtctaatttctcggacctgacttgtagaggctgaccaaataatgctatccaggcatggaataccgctaccgagtctcaggttagttttctcttcaatactgcccagaactggtcgcgactatatgagtgctgacgctctgatcaaaaaggcgcttgatcgagtccatcgaatcggtatgtttactctttatgcaatcatacataacccctctcttgtgattgactatatagaaattcttctgggtttttatcaggtcaatcgaaagatgtatctatcaggcgtctagttgtgaaagatacagtcgagcagagttcgtgaaattttattcgcaatttccatctccttcacttctggaaatgcatactttgtagacagccctaactctacttcttatatcctactctttgtcctacctctaaaactacctctatggaataggaattcttgacctccaggcacggaaacaacagatggcagatggcgccttaggcgaagggaccggtcagaagattggtcggatgacggttggtgatttggctgatttatttggggttcccgtcgatcggtgaagctttcaggtgtctttgggagtttgtctctttgcattttcttcttctcttcttttcagtgtagaagcgtccagtttcgctttaattcgtagtcgatgatttttaaatcccctggatcgaaatgttagacaaacgattcttcataccttcttgtatattttcttttgaccatggtttgtagaccagacaacgttagctgtcatctgtaactccctttccttccgcttttcttcacctcttcccatttcccatttcgctcctcaaatcttgatgatccagtagaatacccaacttctttgattctttgcatataataacattcgtcttatactctaaaaagataactcttgaaaaggtcctcaaccacgttctcatgctccatcatctgtcttcttctcaacctcttccttcttttatcgttcacctcttcctgggtctatgctctttctccttctttttacatcctatccaaaggagtcaacgtcaagagtcgcattccggatcccaagacgtccctggcgcagaggaagaggtagagtctggccttggcaacttcggggtctacaccggtcgaactctgaactcgaactggttaagaacacagtggtcaaaaataaataaatagaggaagacaggtcgtttagtgtcggtcaaggaaattcttgatcaattgaagacaaaagaagaaaaaaaggaagagggaaaacgaaccggaatcccaagcggcggagatggcatgcgccaacctgaagatataggtgacgatcgtgctaggctcactaagcttgtaggccaacttgacagtatcggggtaaagagagagcaggtagatgatatcgtgtgctttatcttcagtgaggagatcagtgttgattagggatagatcagagggaaggaccacattcgggttctttcgctcgagagaagcaagtcgaacgtgggcgtattggatatacactctacaaagcaaggatagttgtaagcgagttgatcgagtgaaagatagaacttgaccgaacgtagacgcttacccggtatcaccctcgaaagcagtcatctttttcaagttgaacgtgtaatccaaatgtctaagacaacgttcaataaatcgatcagttcatctgacaactccaattcacaattagggagtgaaggaaagaaaaaagagaaaagctcaccgcttggcagacatgtcctggatcttgacggcactcattcccaaaacgtccgcacacttgaccgggtctacgatctgctcgtacttcgcctggtttcgctgcatctgctccatcatggtgctagcggcctcttcaagaatatcgttcaagaacttgactgttccctttcgggtggacataccaaggactgagagacgagagagattcaatcagcttttatctttcgctcgacattatagaaagacggaacgcagaaacgtctatctccgagacgacgacatacccattccgaagttaatgtgctgcaacgttccgttctgggcccaactgtaacccatgagttccaacactttgaagaactgggcgaggtggagattttgctgggaggcgacgacgtagatcatcttgtcgaatttgtactcttcgtatcgttccttggctgcaccgatatctcgagtgatgtagattgtggttccgtctgcagtttcatggttccaggttttgatgaatcgtcaaaaagcacgagaaatgcgagagaaaggaacaagtgtataggaaggataaaagtgtgtaagaagaacagctagataaggcgagcaagagtaaatgaataaaaaccaacccttctttcggacgacagccgactccaacttgtactttgtcaaatcagcgatcaaagccttgtccttttcaaccacgattcccatttcttggagtttgtcgacggcgtgaaccatgttctcggtcttaacctgagactctccagagtatacgtcaaagtgaatgttcaatcggccgtaagtcgacttgtacttctcgatcgaatagtccctgaatcgagcccaaagagcgagcgcagtctcgtcacctaattcacaagcgaaggattgtaccacgtttagtgccttgctaacaaagtatatctaagctaagaagcaaagtacgaaccatcctccatagccttgaagaaagctcgggcctcatcctccgtggcttcgcttccctcgagcttctcggcttccatatccttgttgatttgaacgtatacctaagaagagcgtcccatcgttgagaagcatgtttcgaaaatgagccacgaagctttgtttagtccttcatctcctctgttcgaaaggacgaataaaaagaaggcctcacgtcgaacaagtgcttgatggcatcatcctgcaaagcctgctcgttaccgtgcttcttaaatccaatagcaagcaaaccaaactgctttccccaatctcctaagctgagagaattgaaaaaagacacaatgcgtaattacccagaatgagaaccatcagtacagttgacaaggtacccacatgaaggaggaggagaagaagaagaagaagaagaagnnnnnnnnnnaagaaaaacgcactagttgatcctgaggacttcccatccacaggtctcgtacaagttactcaagaacgcaccgatgatggtcgatcgaagatgaccagcgtggaagggcttcgcgatgttgggcgaggagaactcgactgtgatttgcatccgatcagacaaacacgtcggccttttcgatcttataacaatatctctctgcttcgcgcgcgagaaaatgaaggactgggtgggacataccgacgaccttcttgccctcaccaaagcttggccaagatccatacgagttcttctcaaacgtcgggtcatcaggtgccttgttggggaacgacctgatctggtcgagacaaactcgagcgagcgatgctcggcttttttgtgcgaagaccgatcacgtggcagtggacaagcggtgaatcgagtcagacgtttttcagggcaacgattgcagataggagaggaatgactcacttgatgtagtagctcaaagttccccccttgccgagagtgaccttgctaacatactcgttgggcgcaaactaaccgtattcaaagagattcgagtatgtgaacgagattatgagtccagatagttcttcgctcgagagaatgaaagagagtggagataatgaggagacgcggggaaacgtacagcgtcaacaatcttttgagcccaatcatcaggcttcccaccgagtcggaatcgagcgacagcgacctggaagtcggcagccctcttgtctgttagaattcaatcaatgaagaagaaacggaaagacgcagaggcaaatttcttcaatggctgatggcgagtttatctgtatgaacaggtaggcaggcaggtgaacaaaacgtactaggcacatctacaccgacgtagacctcgtcgggggtcttgccgatgacaggagcgatctgggcagcgatagcgaccctgtgttgaggggtagtttgagagaagggacgaaaagatgaatataagaaagaatcggtcagtatagttgttgagggcagaaggaagagaggattcaaggcaaggaagaaaaaaaaaaggtcgagaaagaaagatcaggcgaaagaaccaagatgagagaaacacagaagaaaaaagacaagacacgttgcacacaactcaagcagtacaaacacagacaaaggacttgcctgaagttgtcgatgatcgatcgttcgggagcgataccctcgacagcagggagctctggaaagttaatcttggggaagggctttggagcctcagaggaagaagaagccatggttgaaaacttgacggctggattgatgggcgaacggtttgagataagaggaagtttaaaagtcctgctagtaagagcacgagatcctctgaggaacggacggaacacgatggacgtgatggttatgagtcgagaggaagagtatgctgtatgagaggtgctcaagagcagagtagaaagcggagtgagaagagaaagaattgagaggaaggtctgttggctggaagagtcattggggatgtttgtagtcgctgtactaggatcgacgacggaaaagtgtagtcttccagcctcggtgggataactacaaatctggactagagaaagcggacagccagactagagaaaggcccgaggaaccggagactacagaacgagactacaaaagttggacgaatgactagcgaaaaagtaggaatctgtttcactacaaaacccaactacaaatgaatgtgaaacatactaggccgtgtgtaatggaaagtcatcgcttacataatcagatccatccgacgaatgggaaagcggccaagtgaaggaaaaaaaaaagacgagggagaaaaatgttttgcttgctctccttcaacttgtggccttccgttctcttctcttctttgtcgtcctatccttcatctcagcatctctctagatccccaacatgagtgacaagttgactcgaatcgccattgtcagtaccgacaagtgcaagcccaaaaagtgcggacgagtttcgttgtctggtttatactcttccttgacctctcacttgtcatagctaaactttttcttgcttcttgaaaacactcttctttgtcttttcttctgtttcgttcctcttctctttccttcgtgtacttggctcaccagatgtcgtcaggttagtctctctggttcttgtatctctttctctttatcgtttcatctcactcaactcattgctttctgatcgtaacaggagtgcaaaaagtgagcttagaaaatatactcgcagtgtccctcttctcctttctgttacccatgtccttatccccttcctcgttctttctcttcctcgtctaggtcatgtcccgttgtcaagatgggtaagctttgtatcgaagtcaagacatccgacaaggtcgcgttcatctcggaagacttgtgcatcggttgtggtatctgtgcccgaaagtacgtcgtcatattttttctttcttcgtgtcaatgttcctacgtcacgacctgtccaatctgatccttttgttacactctctttctgatctcctcgttcttgctcgtttccttcgccactcaattctcacattgaattgtctctcctcgccttctctcccgacctcttctcgaattcataggtgcccgttcgaggcaatcacgatcatcaacttgccgacaaatcttgaatctcaggtgacccaccgatacactgccaactcgttcaaacttcatcgacttcctactccccgaccaggtcaggttctcggtcttgtcggaacaaacggtattggaaagagtaccgctctcaagattcttgccggaaagcttaaacccaacttgggcaagtacgacgtaagttttaatcatcttcccattctcttcctcttctcccaagtttgtcaaaacccaccgtttctcttccttctttgtctgcctcgactaggaccctccggattggacggacatcctgaaatacttccgaggatccgagctgcagaactacttcaccaaggtactagaagataaccttaaggcgctcatcaaaccccaatatgttgaccacatcccccgagccgtcaagggagaccggaaggtggaagacatgctgaacggaaagaaggagttggacaacatgcagtacttgttggacaacttggatcttactcaggtgttagaacgtgatatcaagcagctctctggaggagagcttcagcgattcgccattgccctcaccgccatccagaaagcggacgtgtacatgtttgacgagccgtcgtcgtacttggatgtcaagcaacgtctcaacgccgccagagttatccgttctgtcctcactcccacttcctacgtcatcacggtcgagcacgatttgtccgtgttggactacctttcagattacgtctgtgtgctctacggaaaaccttcggcctatggtgttgttaccatgcctttctccgttcgagaaggtcagtgccttcttctgcctcctttcatacagttgttgaaaacagatactaatttcttcctccctccaaactatataggtatcaacattttcctcgacggaatgattccgacggaaaatcttcggttccgagacgagtcgctcactttcaaaatctcagagaccgcagacgactcgtcgatcgaaaagtctcgaaagttctcatacccggcgatgagcaagacccttggtggtttcaagctcaacgtcgatgccggaaggttcactgattccgagatcatcgtcatgctcggtgagaatggaacaggaaagaccacattggtcaagttattggccggaaaggatatgccggatgacccgtcgcatgagatgaagttgaaggtctctttgaagcctcagatgctctctccgaagttcgagggatccgttcgaatgttactcatcaagcgaatcaaaggagccttccttctacctcaattccagagtgatgtcatcaagccgatgcagctcgatgccatcatcgaccaggacgtcaagacgctctccggaggagagttgcagagggttgcgctctgcttgtgtttgggaaccccggctgatatctacttgatcgacgagccgtctgcctacttggactctgagcagcgtatcatcgcttcccgagtcatcaagcgtttcatccttcacgccaagaagacggcgtttgtggtcgagcacgatttcatcatgtcgacctaccttgccgacagagtcatcgtatacaccggtcagccttccgttgaagcgaccgctggtgagccagagaacttgtacagtggcatgaacaagttcttggccgctcttgaggtcactttcaggcgagatcctaccaacttccgaccgagaatcaacaaggccgactcgctcaaggataaggaacagaagagcaagggccattacttcttccttggagattaagcaataccttgcagtctcccgatctctttttgtccttttcctccttctctctttccgacagctcagcgtgtgtgttcgcgtatgcgcaaggaggacgctgaatggtcgcttcatctatcaaccgtcttccgtcccatcgttctcttctcatgtctcgtgcttggcttctcttttctgttttcgcctgagggatagggtcttgatttcagtcttattccaagggtgccaaatgaaactatggaaacaaccacaggctcaattcttttctttcttcttcggcttgccctgtgtcttgcttctcttgttcatgttcgctctacgttattctactcccctttctcccctcatccatattctaaaaaagacgagatctggtttagattcagatcatgtttcatccttttgccttccctaccccacttttaacttctctcatcacatcacactccattttgtttcaccaaactcgttcgctacttccatcctatacctgtttatttaagccctcatcttatcctcttcctacaaccttttaaatttctcttctcattgtcttctctctgtgctttttttttcttttccttagagatatgtaagaccaaactcaaaaaagatcaagatgaaacacattctcttcgtaaacgagatttaggggaaagtcgttagtgagagtaaggaactaacgcgatccagggaaacatcgcatagaagtttgtattgtcatgaccgccgaatgtcaccctcattgacaccctgcaccatcaccatcatcatcaccaccaccactaccatttattaattaccaacaacgacggctcgctgactccctcctaagtctaaggatggaccatcctccttcttcactactgccaccaccgccgccgccgccgccgccaccatcatcacttcctgccgccaacccccggcgtcgtccgactccgaattttgaaggaggacatcccggcggaccaggaggtgctcaacaatcattctcgtcactattcgtctttctgttgttcttgtatattataaattctggtgggtcggatattgaaggaccgattggcgtcggcgggggcatcacaggaggaggagggggcgacgagttaagtcctggtcgtatgtcccttctattctcttacctcttcactttggtcgttagatgagctcttgatgtgaaaccagctcttgggtttgcatgtgacagaggtcagactgaacagagcacttcataggaatgaaagtttcgcaggttatctatctgggaacagctcttctgggtttgtgattgtatgtgctctttcttctttgctttgggtctcctttgattcttggcatccatgcttgatcatatgttgatgactgatatgagcttgttaccttctaaaccgatgagtagccctcgccagcaccacatgagctatttgagacccttcttccttcatttggatctctcaaatcaacatctaaactctaccctcgtaatataaccgggtacctacatcacgccaccagttggactctgaatatgtctgatccaacgaatattccaccttcaaatacgaatcggtctcggacattcttcgatttgcttgcaggagtgaatgtttcttcaaaagtgttccatccgatcgacacatcgttcatcaaggtcggaaaccaaactgctgtgcggaatgatacggagattggtatcaacaccaccgagtttgcttctttgattgataaaccggtctcggcgggcgacgcggacggagtccataatgtgcttgcacggtcgctcgccaaacgactttcatcgccaggtgcattcgaaaggaatgagaccgatgtggaagcacttctgggtactttcccatggtggggaactaatccagacttttacttttccgaaccggttgtgaccaaaagagaacccacagggattggaaagctgtcatttatgttcaaagaaggttggtggggtagggagagaaacttgaggtcaaagacgataccatcaagtcaaacagaagaatggagcgccatcaaagttcgttcgatgacttctttcttttctttctctgcttgattaaactcaatggatgacgttcctttgatctttacagggctcggtagacttcaatctgaatggagacacacagacatttcaactccaagggatccatcatattcctaacggcacagtctaccttcttggcgctcataacaagtctgtctatccacgttcatcgaaccgagtacttggagtctgacggtctttaccttgttcgtctggctgggtatcgaactatagatctgcgatagatcttcgagcacttcctttcttttttgatccaattgatcaaccaggagcattcaaccaaacagccagatttgtttcgagagcactaaacgaaagtgctgaaatagccaaggctgagtttgagcgcggttcatttggagatgtggacggttcgtttcttctttcatccccctttttaaaagcgattatcccatcttcatcggcagccagcttaccctgattacttggaatgtctccataagactatcttgcttcgtccccatctactacttgtaaccttcaattcgtgctacaacttaaacctctctgtaaatcttcgatgaattcttgccctcactctcagcagattcattggctaactgttgatatctttattgaatctaaaatcatggacgcttctcaattcagccgatgaaattacttccttggatcttgaccgagtcgagcaagaactcttcgagccaaccggacttcctacgaagatgataccaattgagttggttcaggctgcttgggtgagttgggaatgtgcgattggagggttcgttgaaggtggaagaggcatcagggcagaagatttctggaggagtggtacgatctgttcgtattctgttctcttattgttacgtatatattcaagcagattagaacgctgtaccgagttgacggtttagaggtactgaacaaacgtttcccttttgtttctttccccctccaaaactgtatgtacttcacagatgctttcatcagcttcttaattcagctcgggctggtctggctgctagttaagcagatggaacgatcgaggacaccctcagcgctttctaatgtagcgctttggaccattgttgctcaagttatccttgacagttggtcgtgtgtcggtgtatgtcccttcttctctttctttttctttcctttttcctccgatttctttcacttattagaaacctagtgggtctttccgctatgtatgcacatgcaaacagcatgtcctggtgggtatcggtctagacaatcaaacgtccttaccactcatcgcagcaggtcttgtctctggacttggtttctttatgtttggagttgttcgtccttggcttctcgtgcttgtgaacgttcgagtactcactccgtgcctctatgaatttctgtcggaaaacgtgtgatatgtttggtagggatattgcgtgtcaatcagtttatcacaatctcctgaagcacctcgaccgacaccaattccaaatccacctcgacctcctgtacctgtaccagcatctacagccacaactacagctgctcttacttcaaccgacaatactgatgaggtcatgcctggggctttgccgctcccagaatccacagcagaagagacaacgacagcagtgaccacggtgccaactagaccgacagctacaacgcctcctcgacctatagtgatgagaccaatgtataatgagccagctcctaatcgtacgttcctaagtatctaatcagatagttgattcatttgagactgacaaaacacggtcacgtctgttcttttcccaatcagccatcatgtttttcactcttcttatcattcttctacttcaaaccaatctccttcccaacgtctttccgcacattctctttgtgttgtatcttttctggattcctcaaattatccgcaatgtcaagcgaggtactcgatatgcattcggatgggactatctcattggagtctcggttggacgaatgtggttcctaggatatcactggggagaccttttaggggaggataatatcttctttttcgagaaaaatggtccgtccatcttcttttccgtatatgtatatgggaacgcgcaaagacagatctttctcagcaaaccaatcctttttttgggatcgtagatatgttccattacattgcgatttcccagatcatccagatcgcattccttatgggtcaggatgtgtacgtacatcatcttttgattgtagacagattcttcgtgtttacttacttgtcctcgttttcaattcgatcaggtttgggcccacgttcttcttacccgtatgttccgcttcttgcccggttttcccttctaacgttatcaaagccgagaatagaaacttactgtgttctatgcgtatgaaccacccaggcgagctatgcccctcctccgccatacgactatcatcctctgctgccctcagcagcagatatcgagtcgggcttactcgacacggtatcagattgggcaaagacggattgtgcgatctgtatggagcctatcatcggttcggaggatgaaatcagagctgctagatctatggctggtaaatcaacagtctgggcggtcgcaccttgccatcacgtctttgtaagttgtcctcctttccctctatctctctatgcaagataggattttctcatcaattccggtggaccttgttttattatgtgcttttgatcttgtgcagcacacgtcatgtttgcaaacttggatggctataagaacggtctgcccacaatgcagaggaccgcttcctccgttttagtgcagaatcagatcacactaacgttgtatattctacggttttagaaacccaatccaagccaatcaaatcaaatcaaatcaaattaaaccagttcggccatgtttgcttagatcattctatctctccgtctatccttaataaaggaacgctttgccgataaatgaagggcagaattttgttctagtgtacaatctagacacctaatgctaaatctagataacgggctaacaaaaaaaaagagaaagaataagccaaaaacgacaagaagaaacgtctacctctaggctatttttttcccctccatgataagaataattaattcaacgacaacacaacccgagatggaggggaaaataagaacgccgaaagaagaggagtaagaggcaatagcggggaagggctgcgaaatgaagcgagatacagtagtttggattgattcatgctgagagttacactgattggatctcttttctgtcttgttaagatcctgacgcacagcgagagagagcaagtactatatgggaagcaggagaacaaagcatgagagcggaagaaggcaagttgacaagagaagtgaaccggaagggatgagacgaggaccttaacgcatgtctggtgttcctatatctgggtcaggccgtcgctttaaatttgtagaagctaatgtctgttccgtcgcaaatgaatactgagaagattccctgggacgatctctcgaccaagctgaatcaagctcgaataattgtctttgatccattgagccgtggtctaccgtcattcttctctgaccttctctaagcggcggaagttctagtctgaaagtttctcccgaaggatgaaacgattgtccaaaccgaaggtattgattgatggtatttgtcgaagaaggctcattcgacaagcgtggaggaggggtatgttgagactgatgatcgatgtaattcggggagcttgaagatgatgatgttgtgagtggggtggtgaatggatgagcaaaaggagaagatgtcatggaaggaaatgccaatgtgaattttgaatgatacgaggaccctttggagtttgtccgactgtcttcatctgggtatgactcgagacttcctcggtgggttgactgttgactaaacgtctggttcgaccgcatcccgaacgggacttgttcggcgtagttcgagtcacaatccgtgatttcatgatgactttcccaagtgggcttgttgaagctagaccgactggaggcgcctgacccggagaatgaataagaccggtctgccgtcgtcggcgccgttgatagaggttggttatattgataaattggaggttttcctgaaggggaagacgaagcactggcatgggcagaaactggagcggaagcagagttgggccatctctgtgtatgagtcgattgagaactaggtgatggctttcgccgacttgttgaattccccgtagagtttttggaggctgctgactgccgccagcgggatcgttgggttgagcctggaggagccaaggtgagttctccgtatcctggtgcgccaggtagaagacagcttgaagcaaatgttggcctgaaaattgggtagcaagacgccggttgcacaaagaagagaagagagttagaacgaggttgaacggatcaacttgtacgatattaaatctgggtacaagtgaaatacacatacccgaatagggattctagatcgttgcgaatttcgtacgctactcttcgagctagaattaatgtgacctattgtgagccaacacgaacagttgttgtagatacacaacccggacaaggataaagagtaagagctatgttgaaatagtatgagccgactccaaacgttattctccactcgcctcataagggatccacgttccttgaagctatcaacaaaaggagaagagaggcgcagtttgaagaagaagacaacatcatcagcagtgacgaaagagcgagaggtttctcagcccgcagaaagatcacctcaccttcaacagcccacctctcacttttcggatagcggccgccagttctggtcggtcttctactagtttagtcacgtcggctatcaaataagaacggaacgatgccaagaaaatctcgagatcagctcaagatccgagtaagaatctttattgaaatgaacagctatagctaaagcgtcaggaagggattttagaacctttattgtgacccaaacatttccaaatgggcgtccataggacaaggccattttctgtgtcaatcatgatgaacctgaagggtgcgatgtgtgggaaaccagcagaaatagagaccaagggtgatgtagcgttcagctttgttggaaaagaaaaagggaaaagaaagaaagagggtaaggagggcagaaggattgtgaacgaactgttcattgattggatattctaacactggaatgtatcctctgggatcggcggagattgagtatctagcggaagacactctgatcttagagatcccgggctggtatgatgcttccaaagcccggagtcgatcgatctgcatgttgtcaacaaaagcgacgcgcaaatgtataccaatcaagaaatccggcgatacgacacgatcagaggaagattattccaagatttggttgatgtcagtgagagaaatccaaactagatctgcccataggacggatcttgtgccagatattgaaaggaaatgatgaaagagtggaagaataggctgaccgcttcgggagccccgtttcctggttcttgtagacccgggatgtgagccgctatttgaggacgtaactccatcgcagacgactggaaagctggatccatgacgtgtaagatcactgttgagaagatctttttctagcacggagggagcggttgaagatgaccgtttccggaatgacgtgaatagaggagtcggaaggagagagggtgaagggacaaaagtgagagcggacaaagaaccgaaggaaagaagaaaggaagtctagaggactctagagaacgaggctaaggaaggtgaaggtaagaaaaggaagagaaagaaaacggggatactgaacagacaacagggttgaccaaaagtacaagtattcatacaaagcaaagaaggagacgagagcgcaggggggaagacggggagcggattaaaagaaaattcaccggtatggacatcatttcagtcaactgggctcaatcattgaagggacggaagcattataaactcttggggaaggtagtgatttcggctcacccgggaggaaagatggataattctcaattttgatgctcaagggtactctacaggttggtcccagagaaagaagagagaaaagggaagactagatggcggatcgaacagaagtagagagaacaagccagagtgaaaaaagagagaaaaaagggagtgaaaatggaaaagaaaaatctaagaactttggctgaatgagccgtttcaatttggccttctgatttgtttttttctttcgttactccagcggccttctcttcctcctttcttattcctactcttcgatgacgatttatctccgtatgctgtttctgcctatagctctcttttctttttcgaatagtttcaagggaagaaactagaggtaacaaaaacagcccatcgggcgaataaaggaggagcgacaggactgatgcgtgagcaggccgagggggcgggcaggcgggcgatcgctttttcaaggcaatcccggtacgtcacggtgttttagacagaagaccccgatattgccgagccggctccaaactttgaggattcgatcgtttatctttttctcattctttctactctctgctgaatgatcgcaaccaagcagactgagagctaatcgtgaggagaactgagagaagtgaaaagaattgggttccgagcgtagaacaacacctgcccgaaacaatggagggatgatcgagaataaaggtagcaaaaagaagaaggagagaataaaaaatccgtacaaggttttcaaccggctccaactagctcggctaattcgggccgcccactccttagccggaataccgaccgcacgtgtagccttccgttcttattggttcacccttactgtgagcgtagaatcaacaagctagatcagaacaggacggtatcatcgaacagaacgatagataggttaaatctttttcaatcggatacattcaaaatggatgatctcagtcacaacgtcagcttccgaaggcgacccgttcacagataggtagcatatacctgagccgctgataaacacgattggtttgtttattgttcaatcttctactcctttccctttttcgtaggttgtgtacatgtacttgtgaggagcaaagacaacttgcacgatgtatgtatactaacaagaagaagatattgtctttcgattttttttttctgagatcgttcgatctgcggtaatcaggaggagaggaaagaatctgaaaccatgggctgacgacgcctatagtttacacgtagccttgagttctggatcttttggttatacgactgatcgagcgtaaacttagattacgtagtgttctttctctttttttctttctcgtttcttttacggtagctataattgaaaagcgatctcggcgaggtctagacagttttttcgttgtgttttgtttgacagagatcatccttcgttagagctctcaaaggagaaggagaagactgcttcgatcgagatatccatactaagaaccttcttttacttgtcataccttgtacaacctttattaaatccgcaaaaggaccacatatcttgtcttccggcgagctttaccggtttgtgcttccgtcggaaccgtccaacaacgccgtgaccatcggacaaagatattctgcggcctgcgtattctacgatcttgaacttgttatgactttcttcgttatctttgatgaccgtggtccagtcattctggatatgaaaataaattatcccgaaaacaagaagaaagctccggacttatgagtgaaactcagtatagatcgtgatgcaacgttggaccttgactcatgattctaaaatatttcagctcgaagattgaatgtggagagatctagatagacacgtctgaaggaaaaataggtgattcaagattgatgaatgatagggggaaaaaaaacgaaccagaaaacgaaccagtaaacgttaattcggggtttcttcgtgcttgaccaccggatgtttccatggcatggagcagaagcattgtgaataagcaggtgtgataactcgagatagagtcaggttttggatgtctcactagacacccctgacgaagataggacatagtgtcttgggagggaaggaatataaactagcaggagacaacgaggccaggagggcagccattccaggcgagaaaggagaaacggcgctccgatatgattctgcatatagcatgcgatcgtgcgccgatctttgatcggtactatggctgacgacacactcataaggggacattgtagcgaacatcagacggaatagaattgtacatatctcaattatggtaaggatcggtgcaagaacacatgttgatgaagacaccggtagttccgccccgaattaacaccatctctgaggaaccgccacatgaatccagatcgacctatgtgtagagagatagataagagacaatcgtctctgttgggagcgatgcgttcgtgaaattgatacagcgaagaaaaatgcgggagggcatgaaacatctagctgggtgagcgtcgttgaaaatcaagacatacagtgcacctctgtagatgaaacctgatggattcttacaagtaacagaatggcctatctgtatcgtagcacaaacattttttcaattctcaaagcgttcacacggactaactttcgcatgacatcggtcctccctgtggtttgttctagattcgtttgcatgacaaccatgttcgtaaaccttgtctttcacaactattttcaaagactttcatctctcaagctctcagagagtcgcgcaaaaaaacctgcaacaaatcgcctgcttcgctcatcgaacttcaatggtcgtgtttgaaaggcggccagaaggatacctgacatgaaaacaaggagaagatcagcgtccgacaaccgtagaggctcaatccatgatcatgcgatgtttccataattctggctagcttggtaaacaaggtggcggccgaccacagtcagtctgaggtcaggacaactctgggaaggacaaggcttggtacaatcaagccgtgagtcagatgaatgcgcgcataggaagccaatctccatgaaggaaaacaatgaaacggaattaaaatcatttatacaacgcggcggatgctatctggagaacaaattgggaggagtgcgtagagatgtcgcattaattgtcaattagtatattcctgatagatcactccaaagagatatgagagaggaagtcgcctaccggattggcatgcaccgtcacactctcgagcttgatttcttgcagtggccggctttttgggttcacagggacacgctccattccgtctaacgtcgagtctgcaccgtctatcacccggccaaagatcgtgtactttccgtcaagcgaaggttgtttggcatacgtgatgaagaactgcaaaaaatagatagtcgtgaaaacgcaagaccagttcccatcagttcagagcggaggcactacagtctactaggtctgagagtaaggagatcgtccgaacctgcgatttgttggtgtccggaccagagttagccatcgcgaccacacctcttgagttgaactagagtgacgcgtttcggaagtataagtgataagaacaacaagagcaatacagtcagaccatatttaggagcaagagcagaatgacgacacgtatgtatatatacctttaatgtcgaccggacttcatccgcaaagggtcggttccatatcgactgacctcccttccctgtgcccgtcggatctcccgtctggaccatgaaatttttgatgttactgagggacacgtcataacgtacggattagcatcctaatggattgaaaggcgagaaagacgtgctaagacgtgtgacagagtggatgaatataaggtaacacaagatcgacgaaccggtggaagagacaaccgtcatactggcctgccgcacagagtcctaaaaagttctcagccgccttaggaaccgcctcacagaacacctcgatcttgatgtcgccgtgattggtatggagggtgacggacatggtctatagtcgagtgtattgaaagccgatacggttgtggtcgttgtcaaaagtcaaagtaatgactatgtccatcgcaagttttctctattaaatttccaggtttctattatatccctataaatctgtattacagtcctgtagtcttgtcttgcgcgaggaacattaggctttctgtattcaacgtattctaagctgctatgaaaattgatcgctttttctaatgagccggttgatttgtttccatctcgtttccatctcgccttcttcgactttcgtttgcaccctcacgcccacactcacattcagccctcctttttttcactcattgtttctcttctgtataagcatctgaaactgacaagttcttttattctctcttgatatccactatgtttgtttattcttgtttctatctctgtttgtttggcactatcgatcctgtcggctgacccgcctccaccctcctcataacacgcacagggcgcctcctccggacctcaaaacaccatcactcgcagataggcttgccaaactcaacattgctcagtcagcttcatccacaaatgcatcttcttcggctgctcctcgaattccaagcggttcgggctcttctcttcgggacaaaattgcaaaatatgaagtcaagggagcaaatccgcttgttcccaagggctccttcgggctctctgcaggaactggctctactggacttggcggttcccgagaactgattgggaacaggattcccaggtaagtgcctccattagaatgtcagcatgtgtgacaaacaactaaactcaaccacctgatttattcatatgcagtgctggtagaggtggctttggagttacccccaatggagttcagccgtccaagacatcgtatacacccaaaggagtcagcattctgaactcttctagctccagtggccaagaagctctttcaagcggtcgctcatcatcgtccattggtgataattattctcatgtctctcgatcgtcttcaggaacgtcttctcccgtaccagaagcagaatcggttgttcctgcccccctttccagctctaccccttcactcgcagcggtattgaaatctgaacccgagtccgagttggattcgatagttcctcctgccatagaccctcctatgatcactacaaactccttgcctcagtcgtatctcgcctcaacagactcggattacgtctcagagaacggccccggctcgctctctcggtcggcttccatcattgctcagccatcctcgacaacctcactttcttcacttgcttctggtttctcagctgtccatagcgttgcctcgtcgtatatgacggacctgcagggagcgcctcccgacattcagacgcccaagatatcttcaccagtttcatctgcaggtgaactggatgtcaagacgtcgtctcagggaagcatgatcggtgaagaagacgataaaggactcatgctcaatattcgatcgagctctcctgtgggaagcatgatcgtcgacatcacagactcggtcgcgccttccatggtcggtgatgatgaagacatcgataatcgagatgacgcattttccgtgtcaccagtagaacggtcccgcgaacatgctctcttctcagagagtcctgatcaaccgagtactccaaaagcgtccaacacacccgatgtaactctaaacgaattaccagagcttacttctactggctctcccatcagagcgaaagaagttccttcaatctctgttacctcacatcagttaactgctcagccgcctatttctagctcagatcctctaaagtcgatcgttcaggaaattcatttggaaccagaagaggagcctgagattgagaacgctgatgaggtgcctgtgcttgaagctcaagagcatgcgcatgaacgcgaacatgacatctctgaggataaattactggagattagcgcaactgagcaacctgaggagcgggttggccaatgggctgaggaagtttcagaggtagagagagttgagaagcaggatgcgccagtgcccaagatggagatcatgcttgagaatgagactgaagtggaagacaaggaaaccccgaacatcgacaactcgacgacaactttaccatccgcccttgaagacgaaacgctggttgatgagcctagcgctgagcacctagccttgaccgaagagaaagtcaatctctccaagatcgagtctagcgcagagaaagataacctcagctcggagattgtcactctggatctggcgcagtccagttcggaggatacgaaagcgcaagtcttgactgcagaggaggatgaagaggaggaggcggataagacggtagaaactgttgctcgagatgacgtaaagctgagagatgagcctgaagagacagacagtatcgatgctaatgatggtgagtctgaatttacgtttctttctgacaaatcagaaggtggatcctgatatctatccttctggatttatgatcgccattggaggcagatccctcacttctgcccagttctgagaagctcattgatccccaagcctcggagacgaatgaagtcggtgagctttccatggcagtcctctggacgagctatccatgttatataccgaactctgattcatttgtttcgtctggttgtttcatttctctttccggtagactctaatctgaacggtctagggataaaacgcctctcgatcgagtcagggagcaccactcagtcttcatcaccaacggatctttcctctatttctgatttcccccctgtaccaacaaccatctctacttcttctaccattgatttgcctagctaccaaaccccatcgatatcgccagccggctcgaccgttatatctcctacgttttctagccctcaaaccacccagtcctcttcgacgccacttccttctagaccattcgctcgctctcctgtaccttttacgacttccgaacttcaccaacgatctgttagtaactccaatccgcactcgacctcctcctctgcctccacctcacccatgaagatcagaggaagcacatcgcctaaacttgggactgcacggtcgacatctttaaaccttggtaggtcgtacgcctggggatcgacatcatcaatcgccagacatcgatcgaagagcccgtttgagattgacagtgatgatgaagaatcggctggagggcccagagttgtcgcgctcagtcgggagaggtattcgtaatcgtcgtcgttgtatttttcgttcaaatctcttctctttgcgcatcataccatcgtttaatccgttctttttcccatgtttctgcctataggtttcttttcttctaacttcatacacctcatctcattcactgatagcaaccccccattgttcttatttcctcgtttccatcaatcagtcattctcttcattcgtacctagtttttatcgaatctcaacccgtcgttcatgccccgtcccgtatcagttttgcactgtctgctttattgttttcctcgcgattcttttcatgatcaaagcgattttaccgacatctttttcgccattccttgtacaacatatctgactgtaaggggtgtttctgacttacccacctacctatctatccattcacgcgtcttcctctctcttttcccagagaaatccacgtactttttctttttctttacatatccattcttcccgtccctgatttttcgttgtcgtaccgtccttatcagcacgttctctctttcttgtcttctctctctcttggtttgagttttttcttctcatttaatcaagagcaaaagcgaatctcatgatatgaaacgactctgagcatgcaccccatgtaggaagatggaaagataagatggataaaaataggtacacgtgtataaacatcttgtaggtgaaacaagtgaaatgaaacaatgatcaaaaggaaaaggaaggggttaaataaggaaatatacactctagaaagtaccaacaaggataaagatgatggaatccaaacgagagaatgaaagagaaccccgacagacgtgaataaatagagtatgaaggggaaaaggaaaagacttaaagttgaaaagagaagagtacgtcttgctttagatataataaataacaaagagattgaatctccgaataggaagagaaagcaataagctcagaaagaaaatgtccggatagaagaaaccttgataaaagaggagctagatgattgataagagcgagacaagaagagagagaagataacattccagtggactatgtattgcaagacaagaaaaaaggagataggttggacaatagggagaacgaagatgaggcaagatgattgtgaattatgaagatcaagaacagttgtgaatcatgataaaagagaaagatgctgggtggagaaggaaaaggaagagaggaggggaaagtattcactgtgcccaaacaccagattcgatcgttatctcagttccttctgatccttcgagtgtggaggtagacaagctcgtcttcatctgtcccttctgaatctgctcgtatcctaggaattcgacctgatcaaatccctgatcgtcagtgtcggctccggcttcggggcccagaagcaatgacgaatgcgtgaacgagtccaaaccgaatttaaccggcgagtccatcgagtaggaatgagccatccctaccgatgactggtaggatcgaagtggggattcagagttgtacgacggcggaggtggatacacgtgcgaacaagtagacaggatctcgttctggattgggggcgggctgtcgaacaacaagttcggatgctgagagtgatgcgagtgagacgtcaaaggctggcgggctgcgaccagcgaggacgccggcatgtgaccatccaacgtcgagtactctgatgacgaaggcagagcgtatggtaccgtgcctgcgtcagtcgtcaattcgccagagttcaagccgagcccccacgatggctgatagagctgatttgattgatgatggaacgccggtgggtccgagtagaagagtggagggtcgaccggggaaaagggagaatccgaaggtaacgtcgttcctactgatatcgacgacaaagacggacaggtgctctgccgtcgatactcggtctccccttgggacgagaatagggggccaataccgttttgctgctgccagtgctgatgctgttgaccgaaagaggccggcccattgaccaacgatggaggttcaaacagaaacgcggattcatcggtatttccaggcaagattggtagtggataggttgtcgaaagtgcagccggtggggcaacagtagaggcgtgctggtagttatgatggtgatactggtggagggaagactcctggtaggtctgcggttcagaaacgctctgcccctttgcagatactgattctctctttgtgatccagattggttcgttctgtacggaggacgagtgaatagcgctatattcctggagggggccttctgcaaaaaccgcaggttcgaccgtcatctcagggtatccggatcgtttcttgaccccgggatggacggccggactagaccgaccggagctaaagctgaggtggccgccattgtcgagcgtagtcggcgaggaaggtgcatacgggtgatggtggatctttgccgcctgactcgatcgatgcttccaattgccgtccggactcgatggcaaccgaacgctggaccgtcggtgtcctgccgatactatagcgtctccgggcagagacctgaccggccaggagtttggcgtatctcggtgtgatcggtacgggtttgggtttgggttcgggttcgagtttgaattgagttgagtttcggaaagaatcttggagatggaccctcgacggagcgagtcgccttcgggcagagatgatgaccaggctgcgatgttgggctcctgcgcgctccgggatggtcttggaaccggatatgattggtaagagaccggtgggagtggcatgaaaccgacttgtcggttcttcggaagttggtccttgggatttgtcgaagagaccttggacaaatgactaggcgcagagaatgataagccggatgttggtgatgtcatatctgcctcggcactaccagaatgatgaaaagaaaaatcaaatcaacaactggcgacgtgtgagatatgattgtagcactcacacataacgcaatgttccgtctagaccaagttccgtttgaggagcaaatcttaactgttccttcgccagctgtgttgcaggtatgtgtgtgtgtgtgtgt

SEQ ID NO: 2319 - DNA, 4612 bp, Xanthophyllomyces dendrorhous
gtgtgtgtgtgtgagagagacaaagagaggaagggagaaatggcgagagaataaatgctgttagcaattaaattcattgttgatgaaccaagtgatgttgctgttcacgtcacttaccagatcaggactgagtcctaatgccaagatctccggtacgcttgatggagtcctaaatttctgagccattccatcagagacagaataatacgagatcagatgatgtgtccggccatcaatgttcagggccatagtctatgggaaagaggatagagttggtacatcagtttccgaaaaatcggcagtcaattagcaatagagacaactgataaaagagacggaccttcttgactaaacctccgggtttagcacaatagctgttgcttagactaccaatgagctgtttctcctttgctctggcaagttcgatccctcccaacatgtcggcgtacatcccgacctcttcactttcgccgtccttgtgggcgttgctgctggaggaggatggcctccttgtcttatcggccttggtgatttgagaatatcgactttgaggacgggaggttgggttagcagatgcatgggccgaggacagggattcgttcattgggaaatctactgctgggaaaaggtttgtctttgatgcttcggcagaagttcctttggtacgtgctgaacgtgcttctcggacgtccgtctgtcgatagataagatagtttcctacatacggcaagattatgacggaagatgttagtgccggacggaagatgacgagcgaaacgttatgggaaaagagacctaccagagattcgagatggcgaccagatcagtccgtccgtccagcgtttgataccactctcttgctcctcaaagatctgcatgttggacaggacatccgactgagacaacgaatcgacagaacatgacagaaagtctacagcagacttacgaaaatcgagccactcttgataacggatcgttcgtcctccgccagcctgcgacacaccctagggacgacgcctcttcttgcggcttcgaataagatgagagcatcgagagtcgtctctagaataccggtgaatgtaggttcggtctgaacgttctcgcccgagattgttgacgggggtgacgttttggaacttgtagtcatgaggtgtggatgtgtgttggaagtggatgtgtaggcacgtgcgagtgcgggtgggtgggtgtgtaagtgtgggtgaatgcttcaatagatcgtgaggcgtgtggtgatgggctgccaagacagatggttggagggtgatagtctaatcaattgtatccttgaggatatacagcccgtgctaggataatctatcccggccaaatagaggaaggaaaggaaagggaaagaaaagaaaagaaaaggaggaaaaaaaggaacgtgagttgataaatcaaccgaaaaggaggaacgtggaaagaacgggaaaggaatgacgacggagatgggcaaccgaattcttaacgattcttaacgaaagaaagaaaagaaagaaaagaaaccgaacgaacgaaggaccgtccgaggaagagagaacgaggggaacaagagagagaacgaggaaagagctttgaattttaagcggcgatcgcggtagtaggctgaccggaacggaaaccctgatcggctgcattggacatatgccggtgggtggggtgtaggtggggaaccgagtgtgttggaccgataggtgagtaggtgagtggggagaaggggatgggagaacagggccagggccagggcaacggcaagggcaagggggagaggaaggatttggaacaggggaaggacgagaaaacacaaaacaaatgacagtcgcaagaaggcggagaatttagttagtaagcgctgagggagagccttaggcaagacacacacagagactgaaacgatacgacagttggccgcgccggccaagaacgacattatgccgctcggtcggtcgacgagagagtcttttagatcacagaacattcgtcggcacgattcggcagggagaagtagaacctggtggtccgatctgtgcgaaccgagtcaggtatgtttcccatgcaccacactcatactgacgaagactcgagaacttgacgggcgctcgatctggccggactactgtccttccccttgatgatgtgcaatcaaccagcgaggcatgctcgacagacaggcactcgtgcacgaacgcacccatagacacgcagagcgagagatcgggccgggatcaaggaaaacgggggaattgaatgcaatgaagaaaacgaatgatgatggataatgatagaagaggtacacaggcgtaacgccacagaggagttgatatatttcggaggccgacgtcgtataagctatcgtcgtcatttaccttcccgcgccacatatcgagagacaggcaggcaggcaggcaagaatcatttgagagttatccacccctttctttcatccgagtcgggaagtatcaggaatattctcaaacagaaccagtcgagctccaaactttatttcacgatctttgagcccatcagtcataaccctagcccagaaaaatatttgatccagccccacacacccatgcatatccacgcccatgtttatgcccttatttgagacacaaaaacgctcgctgtttgtgcgtgaccatatcggcctcatccttcatatatggacgcaacagccaatggcagcagacaaacccaaacaagatagaaaacaaaaaaacagaccgaaccgaagccaaattactcacacaaagagaacgtgtagaactctggagatggagtcgaatatcgatctctgggagaaatggcttcgtatatgtgtgtgaagatgggagaccgaacaggaggcgggaaacaaaaagataggacaggtgaacagagaaagagaagaagcgaatggacaaagaaagggagggaacagaaaagaggattagataaaacggaaagaaagaagtcgcttccgaagatttactctgtatatatcttaaagaaacccgcacgctctttcccggttgagatctgcatacaagaaaaacccggggaccgatggatcctcttcccggaaagggaacggacccactattcatgaccatccttccttctggtcccttggctcctcaaatgtgtcttctttttggtggcgctcgtctcatcttgcaggaagctgtgggctgaataaatgtcccaatctttcacttgctttcatttcttcctgtttcttcgattccaattgccttacagagatagaaaaagcagatcacgttgggcagtctgttcagtcttgttccgttgtttccaaacgcaagaaatatgactgtgtgacaagtcatgagacatcgattgtagcatcattccctccccttttgatccctatgacagatatctcagacaacagatctccttcttcttgagctatcatagacatctcgcacggacgcacggatctcttcatgaaagaataaaccaaacgctcgccctgtctctatcgacttgcctcctgattcatccagttgcttaagtttactcgagttattctcgaacagaaatcgatagagtaaccggcttttatttcccgcttctacctgcccttccgtcaattggagcgggagagatgaacgaacggagaaaacaaaatggaagaagggagatgattaaaaaaaaaaccccatatggcaataaagattgcatgaaaagataacacatgctgatctctcgatcggatcgtaaagcagctcgtttggaagaggaattccctcgcatacctcgcatccatccatggttcatgatcactctcacatgtacaagcgggtcattatccaattcttcttcctttctagaacttggaccacaccaaaaagtccatgcgagttttcaccgatagagaatgattctgaacctataattccagtgttgaagccaaacaaactcaaccgctccagccagaagagatagaaaatggtggcggaaataggaaacttgtgcttgaggttttatctttatttttcataccaaaaaaagaaaaagagaaaaaggacagacagacgccagtgaaaccagaatataatagaggaacgagaagatagaacagaagagaggttactcatctgccatgtgttgactctagtttctagtcttcctgatcaatggtcggcgagcgagattgcgcaagattatgttttcaggtcactcccagaccagtaccgatgggagaaggaaggtcacaacatagagtaaaactaaactgaacctcaacgaagcaataaagagaaagaaaaataagtccaagttcttcttgttgaagttgtcaagaaggaaagaaagaacaaacacggagtttctcgtacagcaaacgttaaagtttctcatactctaatttcaaacggaatacattcctacatgcgatccttccacctgttcactttctgaccactcctatacacgcacaaattgttcaagatactcgccaagatcattcaagttcagcctcttttctgttgcttcttttcctcggaaattgtatcagatcgacattgagagaaaccttgttttgaacgacccagctgtaacaagactctacttcctttcatacttg

SEQ ID NO: 2320 - DNA, 27637 bp, Xanthophyllomyces dendrorhous
  misc_feature (6631)..(6640): n is a, c, g, or t
catcctttcattcttgttcatcctttcatttattaatacttgcagagtatttactctttatttgcactcaatcgtttctctttcctttgatttcggtgttctcatatgcacgctatcaaaagtcagggcagggtgatcaaacggaaacgcattagcgttgatcggtcagttgaatgagagaatctcgttctactcggttgactaacttttttttccctttcattttattatctcttctgtctctattttcgtgttttgtttacgcctcatctcggcttttcttctcattgtatctatcttttctgggataagaacgtgagtaatgaccggtaagcgatgcccttaccgattcacgatttgagtacagctgactttaacaaacggttgaccctcgtctatcatccaggtggcttggtttgcaatctaagcgtgtaagcgcccgagcgcgcatgcggctgccactacgaacacacttgacagatagagatcggactgatccgataggacaagaggagaaattagccgacggttataagacagatctagactgaccgaccgaccaatcaatcatactgctcgcagagtgaaggtcaaaaatagcgacagagacagatttgaactcggtcttggaacagtcggccgaccggacgcccagacatgaaagatcagagagagagagggggagcgaattaatgaatagatgaagaagttgatgaatgaacaaatgactgaatggaagaactgtaaatgtgaacgccccaaccatcaagtgccaatctatcctcatcctacccacccatttggacggatctggaagggagtagacgaaagagaaaagtaaagagaaagaagaatcacatcgatagaattctactgtttgatctacattgccatgtctcatctcccagaaacctcactcaaggaagccgctcagaagagtcctagaaggtcatccgttcctgcttgcgtactcgtcgacggcggtggctgggaagccgaagagctagacgcgaacgaggtttgctgaggttgtgattgcggttgatgttgttggggttgggtcgattcgttcaagggctgaccaaacccggagagggagttcgaaatagtgttcggaaactgagacccatgggtattcgtcgatgtcggcggaagagaagtctgactgaagagatccaacatgtcatccaaagcgttcctcacaggagcagcagccatgccggtagggttcgggttgatgatcgtagtagagcttgatgggaaatccggagcgatcgaagatgggatcgggtcatcatcaaagtcaaggctgttttatcgtgaaagcagaggaagagtaagaacaaccgatcattaattaaggagataaacctgagaaaagacgacaagacgaggcgcacaggttctcagatttttggccttgttcaacgacatggagtgctttctcacgcgtcgtcgaaagatcctcttcttgtcttttccactcagaaaaagaaagtcaacaatcggtgttcatgatcaacagacgagatcacagagtagaacttactcagtctctcgctttcgcatagcgtcgattcccatccgtcccttaccgacgaacgtctgaacggcacgaaaacaagaacaaacatattaactcggaactcggtttgaagtccatagagtaggaaagatgaagaaaaaggaagaaaaagcgaacctcggccggtttatggtatacactcgctaacgtagaaatttcttccaacagtccttctaggatcgccggtgggacggtcgtctgtggaagtgatatcggtggtcggtcggccagaacgacgctctatttggtcgggtaaacaaaagatgaagtcaaacacacaaatacaaatcattttagaaacctctgagaaatgagaagagcaaagacaaaaacatcatgtacaaagaaaacgaaagaaaaccccaccttagcagcagcaggatcagttgagagcaacctccaatagatgtatgcccgatcacgaacgtccgggctatcacagtctttcgtagctgtctgtaggactttctgaacgattgcctgtgattcgtctggctttttaaggaacagcttgacgattgccgtcaacgtctggagttggacctggtaagattcctctttgaaagtctttaagaaaatccctaggaggtcatctgcgttctcgatcttttcggcgtattctccaataatccagataagcgacgctttggcttccggttcatccagttcgtccaatgcagcacacaaggtggggatgatgccttcgtacgaacgagggtactttcgaaagatatcctgttgaggtagagaaaatgagacaacacagacatactgttaaggataggcccgatatgcaggttgcggaagaagaagagaggaaaactcccttgccttcatcacgacgatggcctcttggacgacgtagctgactctggtggcaatcaactcgagcaacacattcacacatctgtccgtcgcctcagggatcttaatcgcagtttgaccgatcgccttgatagactttcggacaaagtcgacgtcgacctctgatgcatactctttgagttcgctcaacaacgtgtctacgttcttttcccctgctaatcggaccataatctcgagtttctctaccttgacatagggcggatcgttatatttgcaaaagaacacacgcatctcgttctgcaagatatcaggccgtttctgaaggagaaggttgatgttccggagcgcaacccattgaatttccggcgcggaggacactagggtgactgtggtataagaaagagaaactgattagatccatcacaaagagaaaccgataaatgaggcaacgggtgtacctaacgggggagccatctttcgcacaagctgttttatcagatcctcccgctctacattcttcatgtgaatcatgacaacctacaaagtgagccaggaagacagggcgagcagagataacacgaatttgaatgagcattgggacaaaaaaaagaggaggaagacaatagatggaaccaacccggacagcactaaggaggacggaaccgttggcgtgttggaattgaggcatgactcgttcgcaaatgtgctcgctctcttccacgtcagcggccttgtatctggcaagggcggagaggatggcgattctgccccattcagagcattcattcagtgcgacgagcaacttgttgagtacatgagcgtcgatgataaagattccttcggacgtttgctcagccgaggtaggtgaacctggcggggaagccgacgacgcggaggcttggttggagagcgcgatgtcgtggatatcagtcagtgcagcaacggcattagcgacaacctggattgaaaaggaacgatgaacggtaggtttaggttgatatgtcgttgtgacgcagaaaggttggaacagttagaatgattcgaacgaagcgaagaacaagaaacgaggctacaaagatttcaccatagggttgctatctccgaccatgtctttgagctgctcgacaaaaccgttatcgaccgccagttctggttttaggtcgtacaacttggcaactgcaagagcggccgtctttctaacgtatgggtcgtcatcccggaggcacttttgcaacggatccgagaggtaatcgatgattttctccgctcggaggcagcccatagtacgtatggcaagtgcgcggacaagagggttaggatccgcagtgtcctagaagaagaagaagaagaagaagaagaagaacatatggaaaccgtatgagttctgatgaaccggcgatgaagaggaaagagtaactgaaaagagcccagatggaaacacactttgacaaacgtattgacggcgagaataacaagttcaggctgagtgctagcataattcatcaggtataggtaaacgagctgtaggtgtgggtgtggatgtagggaaagggtcaggaataagctatgagggtcgatcgaatctatcggtcgtgaagatacgcgtctgaaaatgaagacgaacctttttttgttccaagtcatccgtttgcttgattgggatgaaaagcgagaggtctattggtcaggaaaggatgcggagagataaagagagagaaaagggggaggaaggaaagagcacaccatgttctgtacgacaggcccattcaacaaaacgaaatagatatcagcacgagcgagaagcgggatcaaccgctgaacacaaacgaaacagaccttgaggacgtcagggaataacccagaaacgtctttgccgacagtcatgttggcaatgacccgcttgatggcatcggcccgtttgtccttgtactctgagttgaggtcggaccgtagttcatagttttcgcctgtttggttcgtatgtttgtggggtggataacgtaagaggtcgaatgacaggaagctgaccaaagatgtatgaggcaagaagaagaaggagaaaaggacttcagctctctatgcttacctttcttgggtacgaccattggatgagcgatggacagagtgcgtgtgtgagtgtgtgtggacgaggagagaatgtacaagacagagacaacaatgtacagagagatgggaaagagtgagggcgagtatgtgggttgatgggtgatgttacatatcacgtgatgtatgatctatcgccaggaatgtaccttgtccgcaacgaagcctgagttacacttgattggtaagccgtaacccataaacctctcatactaccagcgcatcgtactacaacgttcatagggtctgagaaccatgtataagacggacgttctcggccacttggtagatgaaatttcaagtttaaatccttttttactgctcattctctacttgctctcttgtcctcgtccttagtgatcctatcaatcctgttttccggttccaagagcctgaacttctttcctgaaacgtaagagcctttgtgtagttactacttcataattcccctgttatcagttcagcccccttccctaacatctactcgtagcacagcttctatgaagatacacgatcaggtaacacatgcacgcactttgtagccacttcttatgacctattatccatcatgctttctcattccatcatgctccttctcttcatcctatgtgcttgataatcttcaggttgataatcctgttgtctagtaatggagtgccaaccagcttgctgtttcttcctgggtggaacgacacaaagggaacgcttgcgcgctcctctagatatggttctccaagctaagatcctcagtagatcacctcctatccgtcatccctgccattccatttcatttagccttgttccctaagatctggaagccgaaatgctcgcgcctagacttctctcggaaattctcatagctccttatagcctccgtagcatgggccattatagctctattcagaacggcacgtggacgcgttactcgcctgtcttgttcggcctagtctctgctcgggacaaaatcacgaccgaactcaaacgcggtccgaagtctaattatcatttttatttgattatcataaattatatgatataaggtttgtcctccgggggggtcttagatgttaatacttgaatgatctacacgtatgtgtgaggtatttgaaattatccgattgataatcctacttaacacaaccttatgtaacactcacaactctatatgacctcttagccctacgcctccgatatttcttgtgctccttctctctgatatcttcttgctcacatcgaatctctcactctctctcatcctcgatctatttcagccctgtagttatcatcgtcgttgtcgtcgtcgtctgacttcttcttgttttcttctaggtttctttctttcttccttccttcttgttcaccatcgcatagtcttgcccaacatggtccttagcagaaagaacatcaggctggcctcaattctctctatcgttttcatagcctactactttctctcacagccgaacggtccttccttctctcaatcgttcccctcgaccctccctgatccagtccaatcaggctcgaaaccagaaccaccaaccgtggtcaagttttcgagtggtccacctcgccagccgttcccagcaaagcacggtcatcaccgaatacccatccctccgccgcccacagagtccctcacgtcaacgttccgtccgacctggcagcttggcaacattgagggctacaacgtcttcgagaacctctacctgtacggtggtcagctcgtagcagctaccgaattggatgctgagccgatcgacgatgatagagtcgctacttctcaagagggcaaacctaaaacatttgtccatgccaaggacggtcatacttggtggaaaaagacggtggctgctatgagtgattcggccattcacccggcggaggctagggtacttgaaggtgtcgctgtgcgtaatcctctcggcagctttctctcttccttccttcgttctctcttctgatctatccacttgatctcttgacatctttcacccttatcgctctcactatctatcaggtcatctatcacgacgatgcagggccagccggtcttatggttcattacgtgtgagcatgtttttttttttttttttnnnnnnnnnncttcacgttctttcttttacgttcaaatcgtcatctcaccatggatctgcgtgtttctctaataggcactttgcaccagaggtttacattcctagtctccgagcactttccctcgcgggcatcaaagatgtgccatccagattgatcttccctcattgcgaagtatcaccaaatgaggaatcttggaaggatggctctggattaagtatgtttctatgccttcctaactttcgttctgtcccgcttgcatcaggacttgactgtgcctgcctttctgcctattctgtcctttcctctcttctcccattccttcctagattcatggctcgtcaacgtcaccttgcccggagcacaactcattcattctccagactgggaagcttaccaagaatccggagacatcatcatgtttgacaaggtcgttgttgtcgatcgatgtgcgtctccttttctacttgctttcttactcttactctttctctttcccctttcttcctcttctttcaatgggctcatacccactcattcatccacgcaggggccgcacacaaagcgatcgaaacccaccattggagcaaaatgatgtccaagatggccactcttccgctcgacactcacaaggccgctggtccgctcacctggttcgaaccataccggaccactgcactagacatgttgggcgccgaggtcgaaatcacaaacgagcgcccagtcgtagtttatctcaccagagagagctctgtgcgttgttctatttcatctgtctccttggcctttctttccttccgcactaaagccaattctcttcgtcatcgccctcctcttcttttcctcatccggtacctctcggggcaactctagcacctggctccctcgctttctcgagatgcctaccaagaccttgtcaagtctctccgtcgccttgctaatcatgctgagtacgtcttcctttggttcttcactatcccacgaactctgccctcctgtgctgtcgcttactatttttttatcgatatttaaacagagttcatcttaccatcgtaggaaacgtcgaaaaagaagatctgatacccttgcttgctaaaaccaacgttagtcgaaattattagctcgtctcatctgttgctcctcattcctttgaagagaagcggccgaccgtctgattttggatacacttgcccattctcgaaaataggtgttgatctcgcataagggtgatgatctgatgactacatcgttctggctcccaccaggagctactgtcatcgagatcttcgacgagaatagctttgtccgtacgtatcatgtctatctccatctgtctcttcttcgatttgacctggcgcgctgatcaatacgactttttttttcttcttcttttttcaaatgtcccccaccttccttttcctttctcccatttcttctttttgtgctcgatgatcatggctggacgagtacaggtgtgaacgagatgatgtcgggcctcctcggattcaaacacgtcatcgttcggaacgatcaggtctacgagaaaagcaactggttggtcgatggtcagacccagagtgaagactgggattcaaccgaattgccgttgaagggatccgtcgtggaaagggtggtgagagacgccttggagctttctcctgcctgagagctcggatctagcctatcttgttcattcttctttttcctcgaatttttcttgtcactcttttctctctattctatatttcttgggttcttcttcgtttcatcattatcgctcttcaaatcgaactttcaaggtcggcggaaaagcttagtgtctggtcataaattcttttctgaaaatatctcttttggacccctccactggtagatatcatctcttccatctcgaggacacatctcttctagacccgacgcgtttagttcacgtctatactcaatcctaacatcttcatctactctcttctttctttcttctcttctttctcgtactgactatatctagctagatctgtgttcccttgctcattatcaacatatcgcgtcactagaattgtccaccaatgaatgggttgcctagtgtttgtccgaggacgtaaactctttctttttcctttcccctcccctttctttcttcttttatttacatatctctttgtatatcgatccttcccctttctattctttttgaggtgttgtctccgggatgaccatggatgtggttagaattagtttttcttgcgttccctccgttgcctggtccactctctgttttctctaggcaagttgaacggcgtgacgactcacaaacagacaaaagctatgtatcgcgactgttcatttgttcatcatttttatatcatcacccagacattgcccttcgccctccggcataattccttcttttccttctctcctctctctctctctgtggtctgtcccgaatgggtgaaaaacccttgaccgagaagaaagaaggagaaggaagaattgataagaagtcgtcctcaggtttatttcctgaccgggcttttgaatctcgatctcgaaggagacctagaccttgaaggagaccgcgatcgggacattgacctggatccggatctggacctagacctggactttgatcgcgatcgggacatggatcgagaaccaatggatgaacgcgagcgcgaacgagagcgagaatgaatcctagacctggacctggatcttgatcgactaggcgagcgggacctcgacctggagagcgaacgggagcgggagcgagatcttgatctagagaacgaacgggaatatgatcggtttcgtggtcgagcaagagatctggatctggagcgggatctggatctggacctcgaagagctgaacgatcgggagcgagatcgtctgatggcattaccaagtaggtcgatgaagagacatggtcggaaaacacggagagcacaacaaatgtttagtcttatgatctaacggcgcatccatagaggtgcgctctacagaaaggaaactcaggtaagaagaaacgaaccgtctggctcccaacactggacttcgactcctccttcttccgccccgctcgtaactcggactccttctcccgcctctatatcccggtcgagctcgtcctcctcgttcgtagcttggactccttctccttgcggttccgcctgctcctctgacaggacttcggtccctcaatcctcctgcacctccccatctcccacctctagcacctcgagctcctctgatggaacctcggaaaccatccctgtttctctggtatggtgatcgagatcgcgatctcgaccgagttcgggagtctgatctccttggctttcgaacaggcgaaggcgaaggcgaaggtgagggctccgccggagggagagggaatgcagaaatctccaccgagaggatctgtccgtcgagcaaggcctggtgcatgtgggacacagccatcagagcagagcttgagaggctatattcaatcgcagctttcgatctgttgagtccagcttgaggcaaaggagaaccgaggtgatgtttggttgagtatacgcaccgtcaaaagaaagcatatgcgacaaaagaaggagagaatacaaagatgtaggacgtacttgctcgatagagtggaagatcaatcctggagatgcttccatactgcccgaagatctcttctagatgaccttttttgacgtcttaaggccgggaatgaaacgatacagcagaaaaagccacggtcaacgatctgacgtgtatatgttcccagaggacactgcaacggtccgacttactggttgtgaggtgttggatgacgactacgttaggctcagttgaagctactggcctagaaggcgaggcagtaagacgtttaggagacgtcgatcgtccacgagacatctcttgatccatagctgtacgtataaggacggtaaccgacggatgggaagagtgttgaacgagctgatggtcaaacgagttgatggtcaagggaaacaagatgaaaaaaagaaagaattaaaaatcgaacgaatttcattacaagtcacaccgtccagtccaatcccatctctcccatcgtcatccttgttgtgagccaacattgtgcacgtctgtctgtcaaagaggcaacccatctggtgctactggctattgaacagataggaacaataggaaggactcgtctgtggaacaaacatgcctcttcctcctccgcttgtcccaacaaggacgcctactccaaccgctcggtcagccttatcgtcaactccttcaagtacatctcgcacggtcgaggcctcgttattcgactcgcctcccacccgcaaaacagatcattctccttcaacctcgattgcatctccagcatcttctgatttcggcgcgtttgtctcttctgacccattgcattcgtcccgtttggataatcagaaacaacattccatggatccttgggatctagcagctgccgggagcgacttcttagaccaagctcggcagagagatgcacagagaagagaaagcctgctcggcgttctggacgtaggaaaagatggcctggacgggctaagtcttattgataatgacaagacccatgtttcggagcaaggcaagaaagccggaggaggatatatgagaaggaatagcagcagctttgttggtggtggtggaggagctgggaaactgtgtgttccacctgttttcttcatctgatgagagatctttctcgtatggttggttcccttcgtgtggccatcatcaccactgaccacagactccttctttctcttgtttgtcttatcttgtctattgcgcttccttctactgctggacattggcaagtgctatgagtccaccacgtcgtctatcccacgtgatgtcagtctcccctccgaagccgattgattatacccactcgatagcgtctcgacaagccgacgagcccactccactcgtttcaccatcgaacgcagatctctatcatccatctctccaaagaagggcgaattcggaagactttttttctcctttggtccgacagcaaagtcttgatgcctctaggtcaggtcatacgttctcggatgccgctgcacggcccttacctggcaaggagaagctccgaaagatgagcgaacggttcccgtcgaacaagtcatcaagtctacctgcggatacctcaccttcggtacgaaattcgtcaaacgcaagccaaccaatatctttgttgcccaatcttataaaacagacgtccaaatggaaatcgatgctctcttcgcctacgtctcactcaggaacaccccatcaatcgtcgatctcttcatccatagctgcaaatgtaccgtcctaccagtccgctcatatcactcactccaatccgttctacacaaacccatcatcagtttacgttcctccctctggcgcacccgggttcgttccgcatacaaatttgcttcctcaaggaggcttcccaagcgctgcccagggagggctgggtgaggctcgaggggtccagctaaccgggcgtcgacaagaaactgtcgggatcttgactgaggaaggcgcggagtgtctccggccgcatcttcctccgagattgaggctcgcaggtagctggtcgcttctgtattcattggatcaacatggaagctcgctcggcacactctacggaaactgtggaaagttcgaggatgagagaagacggaaagacggaagcggagccgccgtgggaaacgtcctcttgatgaggtccactcgaggagagatctttggcgggtatgtaggagaggcaatcaagaagaatgtagggtacttcggaggcggagattggtgggttgttcggttcttttaacgttcctagtagcaacagaaatgcgctttatcggtcaacttctgtaagactgacgatgacacctgtgtgaaatctgcttgatagctttctcttcaagttccatccgttcccaaacaccgttccgggtaaggagtctcatctgggcggtctcgagatcttcaagtggacgggcaaaaatcagtacatgtgtctttgcgagtcgacattcatgtccttgggtggcgggtacgtttccatactttatatctctttactccaaagctgtgatctgagagttgatagaacttgatctgttgccaactcccatgttaacgctcccactgtgttctcaatctttttgcgatatgcacgtcttgccattctcggtaaccttgtaatcacagagacggcaaatatggactatatctggactcgcagatgtacgatgggatctcgcaaacgtgtcctgcatttgataacgaggtactctgttcaggaccggatggcaagttcgagtgtgttggagtggaggtctggggtgtaggagattgaacgatttttttctcttccttgcatcgtctcggctttccttctgagttgtcttcgtctctgtctttcctccctctactgtgcgcatttcttcgcctttgaaaggcctcttgaaatgtgatccgatgtgacatttggctttcaccaaaccgtcgggaactagaccagattagtaacctaagttgtgtctttatcaggtcgtcatggttactgttcgctcatcttcctactcacgccataatctcaataaatgtcatccatctaaccatcatccacgtaccggaaagaagacacaagatgtttcctattcaatccatctttttcctcttcatctttctcttccagcttcctccacctccacacgcaccaggagagtttttcccggaaggaaatgtcttagtccttacctctcatccggacgatgaggtcatgtttttctcgaccgcattgtacaggttacacgaatacagtcgggacgtagtcggcgcttgtatgagcactggtatgccgtctttgtttaccgcttcaacttctttgccagaaacatggctacttgtctttttatcgtccaatttctctctttggggaaaccggaagggaaataactggctaatccttccttaacggggttgatgtaggtaacgcagaaggattgggagagacgagaaagctcgagctagagaagtcttacaatgtatatggatacaaggatgttgtctcattcgatcatccgtgagtccgtgtttcgtttgctcattacttgaacagaggaaatatatgaacaatcattgaatcggcctctcttcctgctcgctctttcttcttgttcggctcgatccttgacaattgctcattctatcgcagagaactacaggatggattgaacacaacatggtcaacagatgtgatcgtctcgctcatccagccgatcatcaacgagaaggaaatcagtgttgtccgtttattccttgtctgatttgttctttctctgtatcatgtcttgagagaagatcacgtgaattgcttacgtcaagcatcatatgcgcaatctcccttgatccacagatcatcacgtttgactcgaacggtgtttcccagcaccctaaccataaatccctttcggatgcctcgctccttctctctgctccttctggctcaaatctatcagtctaccacctatcgaccttgcctatcgccgtgaaatacttttcgttcctcccttccctctcgctcgctcttcctaatcggctcattcactttttcaaggtcctcactcaagcgatccccgagggagaggacgtttaccgacccgttccaggacagaaaccgatggaaagagtcgatgtcgccgtatcgaaggatggcttcttcaaaggtgtcgaggcgatgagggagcatagttctcagatggtttggttcagatggctttatctggcgggtagtaggtacatgtgggagggatcgtaccacctggtttctagcgatgcttagagcaaagggttgttgcaaaagtctctacaaactcgagagagttttgtaaatagagaagaaacgaggaaagagttgaatagcaaagttcacttaaagtcttcatttgttctaatagacgaatgaacagacgtaattgacttaataataagaaacttaagatcacaaaacttcagaagagaccgtgaaagcagacgaagaacaacaagacaggaagacaaaggccagggatgaaataacacagaggcatacacaagtgaagaccaccagtagctcgtggaaaaaaaaaagaagaggaagaaagataaactaagataggaagatttcctgattaggaatgaatacaagtaatttatattgagaaacaatatgcccgaaagaggagtgcccgaaagagaaaagcctagaaaaaagcccaaaaaggagaggaatggaattgaaaaaattggtgacggttcatgagctagccatggcatctgttactcatcgatatacaaagatatgaactcgaatttagtacgatctacaagggacaaaccgacagggaaatcaggcaaacattgagaaaagaccgaccttcaacatgtgtccagagttgtcgaagcgcgataggcttgaccaagaaacctgaaacccaaatcagattcagttaaacgcaggtgtatgtatggatcatactgagaaatcagctcggaagccaaagactacttgagagaaaggagaatatatgtacgaaccttgcatccccgcttccgaagcttttcgtttactctccagtgatgacgagccagtgagagcatatatctgtacagggttaactatcgggcccgatgggttttccttcgactggagttgtcttctggtttcttccgttttacggatctctgataaaatgaaggaaattggtacacaggaagaggggaacgcatcagaattggagcgtgcttcgtcatcatcgatcgaaaactgtggggaaaccatgatcagaataggaacgaagaagactcaccagaagcagacgcatagccgtccatcacaggcatttgtaaatccatgatgacgaagaagattgatcccggaggttgagatttgaaaatctctgcaccttcttttccgtcggctgcctcaaggtatttgacaccttttctactcagaaagacccgtaggacacttcggttgacgctgttcagcataaaggaaaagaagaaaaaaaaaatgttcagtcgtaaacataagataagacaaagttggaagagagtgcgcgctcacatattgtcttcaacgatcaaaacacacttatcgaccctgagtgtttgcggagggatctcagctaaggagtcgaggctcttcgatgatattgatgtttcgttgaatatcttggttatagctcggtacagttttctaaggaggatcacccaaatgtcaatatcgacacgaccaaaggagacaaaatgaggagagagatgtaagaaacgatcgcaatctgaagtcaattcaaaatatgagacctaccttggtccgcagggtttttccagaatctggtgtcgctcgctttctctaagcctattggagtccagccaattactagaaaattgaaggaccctgtaaaacctcaataagttgtccacctgctgtctagagaccgagtcatccaagagcaacacatctgatccacgctccgtcttgttgatcttgaatttccattctttgaggagagttctaaaaatccggcgggtgtcgggagagaatccgaggaggcagattgtttggtttaggccaatcggaggcaaccgaggtggatttggttcgaggatctcgagaggaacggtaatcttgaagctggatccttcaccttgaaccgagcatacatcgatttgaccgttcatgttttggacgattctgcaggtcaggagtagatgacaagacggcagaggtcagaataagcgcatcccattgattagggttccctctcgtttaggttctcgataactcactgttgcgtgatagccaaacctatcgtgtttcccgcaacagagatttgtaatcagtgaacgaccacacacatcatacacacaagacggtttaaaagcatacacacctagtccggcgccggcgacgaaactgttctcttgtgtaaactaacgaaagagaagcaaagagggaaaccccattataaatatttcaccaaggcttcaaaacttgatggtttacacttaccggagcaaacaaatggtcctggatgtttaaaccgaagataatgagttagtgtctcattctggcggtattctatgggaagaagaaacgaaccttgatgaaggaggcagacattccgatgccactatcgctcacagtgattatgaaaactctcgggtgatcatttacaggtgtcggagaggacactgaaattttgacgtatcctttctgaaacctccgatgaatgcagctctcatcagcgttgttgacaagaatatatcagggaacaatcccgcttacactggtatacttcaaagcgttcgtcaactgtcatatccaatcatgagattcgatgagcaattgataaaagacctcgaaatgattagaaagtgaacatcggaggaaaagcaaaggtagcgtaccagatttacgacagccctcctcacagcacctttgtcgatcttcacgttccatgtatcgaaatcctttgaaccaaagtccaaaagaacctctacaggtgtctcattcggatcaatgtttatatccgaggagagtttcctcgggcaatatagactgccaatcgcacctgccatttggtttcgctgagcttgagagaactgatggctggcgcagacggcaatcgcggtttcttctatgaagtccgcaagattgacgctgggaatgatggtatgaggccaacaaagaggagaagaaattattgtaagctggttggaaggtgaacgaatacagagaaaaccctccatacactgatagttccgttgaactctgcgaattctttggtgttgcgcccatagtacttgatgatgatttctgaagaaaccgcaaaaacggccgaacataataatgagcctggaacgaggtttaaagaacgagatgagataagagcaaaaatggacttacggtaaagtccaagactgaaagaatagtttccgacagattcgctccacagagcttgatagtgtttagatgagtttgctgcctagggtcaagtggtgtgtcagacaaaagctcagtggatgccaagattccatgaagaggggttcgaagctggtttaagtatcacgttgaaaaaaaaagaggaagaaggaggagaaagaaatagaaaggaacagcgtgagttagacggaaagtatcgataaaacccgtgcattaccatcactcacctcatgagacatctgttttcaagcaagaatatacacaagaatttctcaaccccgagaaaaaatcgattagatgaaagaaaaaggatcagtcagattagactatcaataacgaggacagagaaaattaaaaaaggacaagaccgcacatttgagataaatccaaactttgcatgatctgctccctgtatagatcttaggaccgaggcccagaggatcgcaccctcgacagccctgatgaattgacactcaacgtccaagaacgcttgtgcctcgttcgacgtcaaagttgcgatgagtgcgacggcggacttgttcatgtttaacactggctgaagttgaaggtaccgtgttttttccggcagccgatatcctaaccatgttgggatttctgtggacgagaagacgcggccagtgggatgagcgattaaaaattcacaaagctttgccggaagaaacgccgtcggaggtaagagagctgagtgtgctgaactgtgtggttgggtcgattgcgacatgataggaagagagtcaacatgtgaaggtgtaagcgagaaatgggcgttgttatctgggccgatgaaggaatatgaaccggcggaagacaaagaaaggttgggtttgaggtattggaatgcagagatatcaaagatgacagtctgatcgacgttgagggtttctctgaccgtccttgccgcaatgtcatacaccgtgaccaggttcgaagggtcggcaagatcacccgcggaggcaacctctctggtgagacgatcgacagctaagagtgttttgtaagccgacagtcagagttagttatacttaaggacgaggggaagaagaaacatgaagaaacatgaagaaacatgaaaatacatacatgctgttaagatggtcgtccttgccatatgcttctccagaagacaatgttcgagctcctggacaaggatcatcaacgtgaaacaaaccaaaagaatgtcaatctagataaaccgaaacgacatctttgccagtaaggaacgaccgacacgcatgaccatgtcactaagatcctgcagtagacctttatcttcatctgaaaattctgttcttggtttagtgtcaaggatacagaatgatccaaggtggaacccgtcggccgtcttgagttgggttccggcgtagaacctcaagggggccggcccagaagtttgaggctgaaaccgaacggatcccgatcgttggtgagtatagatgacgggcatcctggacaggcaaagtggatacttacatgattggtctgaaatcgccagtccgccatacagtcaagaattacgtgaggttcgttgaacagaatcgtatgcgcgcatgtcgagcctactcgatcatactttgtgttttcatatccggctatgaaacagcaaaaagagggaggggtgagtgtgagtatgatttgagcaacggggttcgaataagcatttaacaatctaatgcgaagacgttatatcgaactgaccagaagccaagatgggcatatcgacctcatcgatcaacaccgtcatggcggaagggacattgaatattttcctagccagcctaattgccttttccaacaccgggttctttcctctctgagccgggtcattcgggaaggattctctgttgatcaatccgaaccgatagagagcttttctcctttcggtctcgttgggcgggaacggagcgggtaaccaacctcgtttgacaaacgtcgattcttctacagtcgggtcttcatccacatctcttggttgaaggctgtaaggagggggaactgaatcttcgtgcactgtaggaagcaacttggatttcggtggaagaacacaagctagtttattcaggccgagtaaaattccatgcagttccgacacaagaacggagaacgtggaagaagatctgagcatatacgtctccagagaacgaacgatagaaatacttgttgcaacctcgcggaagcaagctagtaaagcgagacgcagacaagaactcaccaggaacttttccagctgcgtaagcgtttaaccagttggtaaagttctgatgtgctttctgatcatcggtcgaaccagtgttcaatcctgagagatcagatgatgaaacgtctgctcctttcgtcgatctcaccccaccaaccgagacggagggtgacacataatcacacgatatatccgagtctgaccgatcagaccggaacatctggagaaagttcgacgagatcgacgacaccgcagatgagcatggtgatgggccagagcaggtactggaagacagcggacatttgttgatgaccatacccgacagatgagaaaggcccgtggcagcgtccaacgggtcgggcactttatgcatctccccattgggcgtcatgggtagacaggacgacggactaggtggtgatgatgttgaagaggagcttgaaatcggagcaacctagatcgaatgagataatattcgtgttagaaatcgagaaactggcgagagagagatacaaagcaagcatagggtcgagaagaacaaagaaagagagagcgagtatgtgtgcataaacataatgggtgaccgactgactgaggtttgagtgaatgattcgtccaccataccgactacgaacagatggaacgaagaatgatgctccaacgacaatggctaaagcacaagtgacactcgacagatatggccagttgacccttgcaccaaacaaagctcggtatgccaattacttttttctttggacgagaagaagacgagaaagagaatggagtggagggagaggatgaacgcccggcaattctgattagtaacaacgcaggggcggatgttttaccattgcctattggatttaatacctcacgtgttttcgccgggtattctattttccatacaactgtggattcagcctcagtaatctgttcattgtcaatcgttacccgcacgtagcttgtctcgatcatgtcgacaaaacacacagacgcagaaatagagatagggatagagatagagagcatacatagaacgcaaacgatggttgcgactcacagtcggcaagacaagcaaagactgggagaaggaagaagcagatggataacgaagcacggacacagacacagacacagacatacacatatggttacagagaaatttcaaaaacgaaccaatagaaggaaacgggctctatacaaatatatgaatttctggtgaagctggtataggatgctctgatgatggtcccgccgatccgtttcctccaccttcatagttcgcgttcggcttaaccactcctctggcccgtccatctgtctcctcctcctcctcatcctcatcctcatcatctccaacactcgtctcgggcatcaatacgggactcgattcaacgatcaactctaggcctggggctgttagccgagccccctgctgtgaatgaagctgatgagcgtgttgaacggggaaacccagcggcattccagaccccatcaacggcgtttgagagggtgtcgtttgctgggaaatcgagccggcgaaaggattgtttgccgagaacgactgtggatgagccgtcggtcggacactttccgtaatctcatcaggtccgttcaagggtgaaacgggcagagccgagctagataccactcgcactccatccaactctgccgtcgatgccgggtcagccggtccgaaaatgaaaccgttctggaagacaggatccatttgggctgtttcttcaccgcctggccatctttctcgaccattctcatcgccctcttgctcgtcaccaccacgttcagccgagatggacgcacttacatccgttgacccaactccgatatttccagcgacctgacgatcgcccggatgacctccatctccaggctcgttctccgctgcagtcagtgcgtgctccagcgcttggtcaaacgcgagcttcacactcttcaagcttccttttctcgagatcagactctctcgcctggaagcgacttcccaagcatcttccgtctccacatcctcttccagatcggcgaaagaacgacagaggggacaggaaaaccctgggtaatgctgttgaagaagcggacggatgcatttgtagtgaaactgaaaagaccccaggtaagatagaaaattgattggttcagctgaatatgcaatcaaaaaaacatacgcttgctagaaagatggaaaaagagactaactacgtgggagcaaggactgtcaaagaacaaaaatggatcagttcagtcgatcgacacgatccgtgagattaaaattcagaggcaaaagtggcgtcctgcgtacgcgatgaagagactttggcagattgtgaccgagaataaacctagtattttgaaaataagcccaacgcaagtctcaatttcgagtgactcttgtcatggaagtctcacatttccgggggggtggaggcaagaatgataactcacagatacagcaatccgtcacactcgttttcgccgtctttttcgctttttccttgcttgtcgaagcagagaggctggatgtcgttccgcctcccagcgcgtttagctgtttcaatgcgttagtactgtacacacacaaaataaagccggttccagccatcggttagagagccttgtgtgttgataaaactgacgacagaaaacggttttagagcgatcgacctacttgaaactatttgccgcgttctgccaagcccgaccaatctcgatccgcatcttaacggaacggaagatttgttcggttccgccttgataatcgactcccagctgaaggacatctccgtcctgggtagagaggtgggtagaaaagaacagagatagagaggaaccccgttggctcatggttcaagaaaatacgcaatagctacaagacccttacagtgagcgcataaggcttggactctacaccaggaggcgagagcctctgatggttgagaaacgtgcccgacgacgactttgtatccttgacgaaaaactaagagaaggcgacgggaggagaaaagagcagtcccgtttgaaccaaacggccgacctggttagctttcatccctcctgcggaatagtaaacttgaattattctttagaaacacgcaccgacccgccggcaagcgcccaaatctcagcatgacaccgactgacaactttactcttgaacgcgaccttcgagcttgtcagcgcaccccctctgggtccaccgtccgatccgttttgcttgtcggtgaatcggccaatcttgatgggatggtagacctctccgttctcggccaccgagccaatggtcggagcgatcgaagtggactgtcggacgtctcggaggatgggatcaaaagataggctgtgcgatgtctcgagcatcggcacgaggcgtaatctatgggtaggggcagatgaagacgaagaaccgaccgtcgggaacggggctgacggtggattggctgaggaggaggaggctgaaggtgcttgacgagtcggcgtgttcgagactgcaccaaagaaacgacgttacccagggtgagccggcggtaaagatcaagagagatgtaaacaaggagagaagggaatgaagaagaagcgacaaaccaggttctgttcggctttctgagggggcggtacctgaagcacgcgcctcgccttcttccctctcactgacaggtccaccaggcggcgtactgttgcttttcgtcggacccgccgtggttggctgtctcgatccgacggacgatccatggttggagattcttctcatgagtcttgctccgagcgcaccaatcgggtcttccctgtgagagctcgagagagggggagagctgggtccggttcggttgggtgaaccacttccatgtgctctacttcgaagtgacgactgtggttgaggttgctgctgcagctgaggaatcgattgtgtcgtgcgccttctaatgatctgaggaggaacaggcgagccggcagaggtgcttgccagactatccgtggaccgggccgtcggagcttgttgggtcgaaggggaggcaagagaagacggagaagagatttgagcttgactgggtaaacttccgattgtcagtctggctggcggattagatagaccttctgctgtcaaattgggaatagcgagggaggatgatcctccagtggccgctcggggtcttctcactgtaaacggtgagcgatacattgtgaaagaaagaagaagagaagaagagaaaaaatcatgacgtcccagccaaggcagcgaggagaagcaggcacatgagatccagtcagctggagaacattgatatacgaaacgcaacatctgaaaagactttgaaagaaaagaaaagaacaacaagagaagcgtactgaaagaaggcaagaagctcgatctgcctgggctctgcggaggagttgctccagaaagtgtctgggccggcagccaaggactggatcccgaacctgctcccgaatctgcggcgggtggcatagcaatattcattggaagcggcatgcgatcctatttgtgatgaagagacaaaaaagacgggctggaccggcgaagagtattgcagagataggatgtgagactagagtggagaggagatgacgatgatagtccagacgatgacgagacctgatacgtatggccgaacggctgggtagaggagatggaccaagaggtacagagcgaaggatgacgacaatcaatcaatcaagcggtgagttcagatcttggagtcagacttgaatttatgcttggtaagaacaaccaaaagagtctgaagcaagctgctgaagtaatgtgcaaagaggaggatgagagagatatcagagaaacagaagaagtagatgggaattctcactttctgtgcaaaacacggccgatgacacaaccggcccgtctgtgtatgtgagtaaccatacataagtgagcgtgatcacgtttgagtgatgtaacgtgcgtaagagacaagaaatcaaaaacggaaatctaaaataaaataaaggaaaataagccattaatcgcagaaagccaatcgattggtacctcgatgagttacaaattactagagatcgagccgaccgacgtcatcgcaggttcgatcggaaccggttgattgaattcatactcctaatcgaaacgtccgcctcaaatctctcaagacgcgtccttccttttgtttaaatatctccttggcaaagcttggacattatatctcagatggccggcaggcagacagacagatcgatctatggttgcacttactcccttcaaatcgagaccttcaactagacagtaaagtagatgacaagcaaaggacccgattaaatctgatcgatttggaatggaaattaagagacggaacgggacgaggcggaacggaacggaacatatcatacaatgtagactctgtttctgcatgaatgaattcgaacagatccgaaatagaaagatgtgtctatgcggggttcgtaagcaaagggccgagcggtcttgcttccccaagcgcttttcgcggctttgttttttttgctctggattgttttaacattcgcaaattcttctttccctcgttttcttgttgaaacttgatgtatacacattacatacacggatgcaaaccaaactttgtttgattttctttctatccatttagtttcttctgatgaatttttttgcttcctttattgctcagttctactcagtctgagcccccttgaaagtggctggggaaattaaccagaacgatatagaccatgtcaagcctcgcttagactaaaaaatctcttgacctttcactctactcgattactttgcatcagcagtcacatgcgactagatacccgagcgaatatgatgcaaaacacgattgaataacagatcgagcggagggtgtcaaaatgcgataaactatatagataatagatagatgatatgcagataatagaatacactttatgagaggagagggaggaagaggaaagggggatataggttttttctttaaaggagaggatgactattttggagtgggaaaaaagaaaagaaaagccaaagtaagagactgaagacacactcgatgagcgttgagttatgaaagcgaacaatatggaaaacaaaacacgataaaacgaagccgaacgaaatttcgaaggaagcgaagagtcaaacaaatcgaagtggaaaataaccgaacactagaaaagagggaaaagaacgaaattgaaggcgaaggacacaatcaagtgtgacacccgagcaaccttataccacataaacgccatctgatggggccgtcaatgaatacattgtctttgaatccgcagcgactgtgatcggtacagactcatacgcgttgtttctcaacggtggtgttctgcatgatccgtagtgggatgatgtggcagacgaaggtgtggacgaagcggaccggctgtactcctgatcgggtgaagatggcggggacgggtacatcgtcaccgcggtcgacggatatgattgagcatacattgaggagtgaaccattgggacggatgctggagtgtattgggaatattgggaggaagacgaagacgagggtatggcatggtggtggtggttgtaggccgatgaagccgatgtctgtcctctaaaatcagttgatggcgagcttgtcgatgattcactctgttttacttcgtgagaactgaatttagcattcaagaggtgctgtagaaaggaggaaaaaaagcatcgccgtcagtcgatatgctatgaatattttattgcagctagacatagacttacgtcaagatcgatgacctgctgtggagtacacccaatgtcccactcgaggtaaccaagcatttctctctccatctgtttacgaaagagcaaccacgagtcaggccctgaggaggtggatgaaggatcaaggttgagaatgtacatacctggttgacctctttcaaagggaacatctcttgaccaacgatacaccaactctggtttgagtaggtgtcatcgcaaaccatctttgcagcgagcatgtagctactgagccagagtctttgaccagaggatcctctagcagatgggtatcgctttttcagtcggtagaggaaaagtagggcgatggtggccactgagggaggaagttgagtacggtaaagcgagtaggcgacaaagtttgccaacggtgatctcgcaccgcttgcggaagggtaaggaggcagatcgggacatgagaacaggtgcgaaatcttgtttaaacaaatcaattggacagatcgagaatgaacgagaaaaaaaaatgtcagcagatcgaaggaaggttacaggacagctctgattgaggaaagagaggtgagacatcctaaaaaggactcacatatcgagcggtggtggtagcaatagcctggtgtccataccacttggttgccggatcaacctgagcggactgttttgacgaggagcaagtggaggatgaagcagtattggaaggcatggctgtggggataagtgggttgtgaagggattggtcgattgtattggataaaataaacttttggccttgtattcgagtcttttgatcggacgacacagttgaagtttatgagtgagcgagcacgtggatagcaaaggtgttgtagaaggacaagtgacaaaagacagagggaagaagaatagagcgtcaaacgtggatggtgttttaaagattggatgggttggactgaaaatactgaaatatataataataataaagaagaaaacgagaaggagcgaatctttctatatgtt

SEQ ID NO: 2321 - DNA, 1917 bp, Xanthophyllomyces dendrorhous
gtgcccagcagatgagggagagggaggggaaaacagaagaaaaaaactagtgacaacgctctcccgcctaaatgtgaaaaagaaaaaaagaggcaacggccgggatcatccgccggcgatttcgatcgatcgatcagccgatttacattagcttcagtgcctgagtgaagatatcgcacttccggcttttaccatttctccgtccggatgcgagcaccgtcgatccttgaaaaaatttcgctagattgattttttttcccgagtattctctcccggcgcagcatttttcatttcggccaatctttggtctctcagttcttctgtctcacgcgcacaaccctgtttctttggggatgcatgtctagtttcccaataccctttgttttgttgttcttggaaaaagaagaaaaaaaaaccagctatcaacaagatactacgtttgactattttccttgctcaaaattggaaataaatcccgaggggaaggaaaacatacaagaagagaacgaagaaacacacacatagacgcaaacatggaaaatgaataagaaaacctcaaatctcaggcaactcattcaagcatctagggtgaggtgactaaatagataactttctcccgtcttggtgaagaaagcagtgggctctttctctttttctctttttttcttacactcctttctcttcttctggatcgatgtgcgcctctttaaaaggacagaatacatgtacatgcaatctcgcgcatcccagacgatgcgcgcgatcagcaggatactcaccagaccctgaaacggatatttagtttcctttctcttttttttttcttcttccgttgttcagtttaatttgaattctccagcatcacttctcttccaagcttccagtgggatgggaccaatcagtatatccatctattttctttccgcaggatatagagaatgtccgataagcctgctctccctgtaatttttcctctcctcgtgcaggaattttgacggaaactgattgggagaccccagcccggggccacaactagggaggggaatcttttcatctctttccataatagtttcaaaattcagcgagaggaagaaagacaggcaggcaaggccaaagtcgtcttccaagaatcatgcgctatatttttcgcctcgcgaagaaagacaggaaacagcggctatgcttgaatatggttgccgcagtgccaaagactaagcatgattagacacgagcgacatccctctccatgaagaaaagatagagaaagagaatgaaaccaagagcctataggaaaccccggacattgggctcattggggtttgtttcttggcactctggagaatatcttgggtggcataggttctcgcaaccatttactgtctctttttcagatggagttttgcattgctacaatgtattccccctaatgttcggttccgacacgctatcctacctctcgttttctacttacaatcattcctacctacctactctcattgtcttgaatcactttgtctcttgtctctttgttctgtcctcttgttatcttatcggaagtaatataagagctactacaatgataaccaagacgggaaagctatctagcacaacgacatagcataggccatagaaaggaaagggaaaaagaagaaaagaagaagagtgcagaaacaaggccatgtgaatctcgcaatcagttgatcaatcctttccgacccgactacacccgtcttcattcctcttgaaaatatgtactataggacacaaagcgtgaaacaacaagagaggataaaaaaatcacatgtctgccagagtagaaactcgccggtcgatctcgaccgccaatctcttgtcaacctatagattgcatgccatacatgattgacccaaaagatccacgaaaggagagggaaagag

SEQ ID NO: 2322 - DNA, 702 bp, Xanthophyllomyces dendrorhous
gaaagagattgaacgatagaatgacatttaatttcggcaacagttagacacgacgtcaagcccgggacggcatctaacgcacgagacagacgaatcgctaagttcaccgacgacgtcgtcgaagaggataaaaaaaaccgtcaagtttagatgcatgttaattaaccgaatgtaccgatctaaacaggaggagctctcgttttctcatcctttccaccggaaccggacccgaacggacgaaacggacaggcggcacaacgccagacgaatgttacaacaaagatggtatgaaaataattaaggatttagtgtaatatccgcgaaaccagtcggtgccgggcgacgcgttacgcctccttacgttaaattatcactctcccggtcctttcattcatcatccatcacctatcgcccacgtcctacatacatgttcatctcgaacggccggttcacgccgaacatctaagtgatatattgcctcaggaatcggtccacctctgaaagaattcaccatcgctcagtgactgatatgcacataaaatcacaagacaccgctaggtatctatctgactccgcgaaccgggtgcgatggtgcaagagactgccacctgaggacattacacgtaatatagaacagaatagtggctaaacacaagatatacgacattaagacgaaagacacacacacacacacacacacac

SEQ ID NO: 2323 - DNA, 39526 bp, Xanthophyllomyces dendrorhous
atagaaatagaaatagaaatattaaacgcgggctagaccgaacacgtcataaagtatagaggtatacacactaaggagcacgcaatactgatgaagggactatcgctgaaatccggtaaatcggcacaggatctaagggcggctgaaagtacgataaggaaagcaaagagatctcaaccgatcttgatatacaacaaggaagaaagaattgacaagtcgatgcagaaactaaagacaggtcccgtcgagcgcaaacggaacatgcagacgcgacaaggcctcctcacttatcgaagcaggaatgaggacagcaacgccagaccgcaaacactatagagaccaatcatttcattaacaagaaacaaaagtgagtataacagatcgaccagtctacgcgacgatcgtatcgagaaccacagatctcgatcgccacctccgacaaattatcgctcaacatccctcgaacctctccgcagatcctcgagttttgcccgagttactatcgcatcaagagccgcgcattcggtgttatctcttagaagcaactcggtccaacatctaaaatgcacccaagcctcacaccactctcccctcaagataaatggaaaaatgacaggagactaatagggcttacacagatactatttggaaccccatagcaggcgagccttccgtgatggagagcgaccagacatatcctccaactgtgtaggaaagaaaagacaagaggcttggtcagtttcttggtcgatccttcaaacgagtgacatgaacaaaacttttaaaaaactgcgaggccacgtaccgatgggaccgattacccgagccgcactaacagacgactgggccaacccgtttgcaaggttgacgacttcgggcgcgctcatcgcgttgacgcaaacctgtaccaagcgaaacgttgtgttagcttgtattcctctgaaagtgaccaatcgagcatcactggtcagataaaacaatctgaatgtgcaaggacaaatgagttcaccatgatagcagtgctaatgggaatttgaagcacactaaggttagtaaactcagacaagaaggtttgtcaaacaagagaaaatgactcactaagtcaacgttcctcctgcatatctgcaagccatgttcacggtaagcactgagaatgtagaaacgaggacaaagatgtgaccgggcggaagagacagacatccgtcaatgtatcgtcctcgacagaaaacaaacgtgaatcacacgggactgaccaaacattaagaagggactaccgtcctcagcgctgctcgcaaatgcgcgcagagcaggtgtggtgatgtaagatgggatgaacaacaaagaccccaatcggaacctgtatcataacaaagaaagagatgatagtgagcaactgacaagcatggtgacgatgtacgatacaaacaatattcacatctggatgtgagagcaagggccagtggggggaccaagtcgtggatacagataaaactgatagaagagctggaagaggcacatgatagcgacaagaatagaaaaatgagcaggatccagtccaagacctccttcggcataatcgctgaagtgaaacaaagggagagaacaaatcaatgcgaaggacttgacataactgaagaaggagaaagaggttcgaacgtgttgaggaagctgaggaaaagctgtccgttgatagcttgaaaacagacaaacaagagggcaagcgtgagaaggcaagagcaatataaacaacaaagcccaactagagactagactcactatcgtgagtagcaagcgcaaagtactgtaagaaaatattgtcccagtccgtatcagtcaggccaatgacagataaccgctgcgagtgataaatgtgagagccgaacctgaaagatcaagaacagaggcaacttccagaacaggctctctttcttttcatttgcaaccggggcaggcgttgctagaggagcgtcctccctaatgggttgcaagtcgtttcctgctgggagagagaccgccgcaaaaggatcttgctcaactccacttgtaacattgggtgagatgattaggctaggagaatgaagtccggtgtgagcaaagatagctactccagcattcgcgcgtaaatccaaaatagctaatcagaaatgtcatatcttgtaggggaatacatctagtagggataaacaagaaaccgagagaaagagcgataggaacgtacaagctggtcggacagacgctgcagaaaaccttctccctgtagtgtaagtccccgaaacggagaaccgatgattgccaggaaagtgagcgaccgaaggtgccaagggtgcgtctccgccaaaaggatttcgcgaatatcttcgttgtgaggacgttccgtgatgaggtgagctcagaggagagtactcccgatggtatccagtgccgggtgatcgcacagcggaggatgtggtatgagatgagcgggtatgagaggtagcgtcgaaagttacattgggatcgaggaactcggtgttgggcgtgtatgttcctgaaggagaaggagtgatctggttgtcctcgccagcctcatcgatatcgcttgtatcgttgccatcgtatcgatcatcatcgtcttcttcctcgaagacagactcttcctgagcaagggcttgagaaacccaaagatcgttgatggtatttcctcccattccctcattggctggaatcacaaaccaagagagattagcgaaatggcatgcatcttttccctgatgagagctgctgaagaaggaaagagtctaaaagacgaacccaaaagtaatctctcagcaaaagttccccttcttcccctttctcgcttcatgagctcctcctcatcaccctgttccatctcttcgccttctatcattcgggatgttcgaacggtagaatcactgccccttctcccgtatccgtatgcactagaacccgaaactgcccgcctcttacccttcgataaggccgaagttggtgaagcaaggtgcacttcagcttcgctatgcatagacgaagacaaaggcaagacattgcctgatcctgcaaatttaagtcaagacacatgagcaaaaatcaatgttgtatactaaagacatgatgttttgaatatatcggtcgatgtaccttgatttgaggaattcaactcgtcggtccctttttcgagaggtagagcaattccaccttctcggacgccaccattcttgttgagtaaaagagataggaaggcgccggtgaaaagaaggacggaggcaagtatacaagggaacagatatggcaggcgtttgaaaatttctatcaaatcaaggagggttcatcaattcgactgtgcactttccagtgtccagaaggacacttaccaatctttccaatgaatgaatccgggtagttcttcgctggagattcggcgagtccacccaagaccggtccaatcactgtgtggccgaggagattgacacagaagcatttgagcgaatgaagagatcaaagaaagaaagaacaaatgctgacctcccccaagtgcccagacaaatccaaggatcgcatatgccttagcctatcgtttacaagtagaatttagatcagatgcctgtgacgatggcatctgatcgaactaaaagacgagataactgatggcgcacctcatttgttggatcggtcacatctcgaatggctcctctagcaactcctacggctccgttgaagacaccctgacaggctcggatagcaactgcctcaggaagagtcgtagacgttccaaaaaggataacagctacacaacgaggcggtaataggctcaatgaggtcagtaaatcgaatgtatgggggaaatttatttatgacgcacttattgcacttcctaaaagagtcacaaagagaacgactcttcgaccgtactgctcggctatggttgcccataagatcgaagtgaaaaactagattatcaaaggtcaaatcaacaaggctagtgaatatagaagtgcgatgaacagaagtgctactagtaatcgctcacttgggtcacaaagaacgaggctaccaggtttccgcaccatactcccacgtctgtcgaatctagaccaaatgatcgaaccatgggtactaagaagggagccgagacattagcagagagaagctcggcgagaagtgcaattcccaaaacaaccatgggaagtctattttgagtaattgttagcttgattcagaatatatgtgatgccaattgaaagaaaggcggcgcacattggaagaggagtcacatcaggttccttcctgatgagccctttgctgaataaactaggcacgaccggcttgtattgactctcttcgttattggaatcgagcatgccatctgcaccaagttctcgaaagactcgagagccggtagagactcgcctggagtattgttgcatggaggaggcattagattgctgttcgatggggggaaagatgtcagaagatgagatcatgcgcagaaaatgaaggtaaacagatggacaatagcaattgaggaaagatagacatacccgatgggcccttttccctgctgtattttgagagaaggatattctggattgggagaatttatttttgagagcgggagaggtcgattcgggagtgatactgtcatctacagcagagtctgcaaggttaaaggctggagggagcgagatcgaggagggggcgggcgctctggacatgatgagctaatctacctaggaagaagagacgcaaattcctccagtatatgtgtatacaccagacaaagagaattaacaatacagaggaggattgaaagtctaaaaggtctagagaagagagacctggatgaggatgagttaagatctctatggggcgataagttgagattggttgaaacgacagggattaagaaggaggagcaaaagtaatcaatgtggcgttgaaattaactggctgtgtcggtcacacgtggctatctgaccgcttatgacgtaagacaaatctatggagggggacaccttcagaacatgatacagatgaacgaacgacgcatagtcttggcttgcaaagataaaactagagatttgggatgaaccccagtcggcgatgtcctatctattcgatcaaatccctagactttaggatatctgaccatttctatgtatggcttgaacttgacatgtgctgcttaaagcaaccgagagcgaaagaagccgagctctgtaggtatataatataggctttcttctgctctttatctctctctccgatccttctcttcatataaattcactctctcctttcgaaaatatgatgctgtctagtatccttctccgtgttcttccgttgatcacagcaactgtggcctttgccacgccgtttgtgtttgactccgatttgaaaccggtggacttgtctctatcctccgataacttcccaatatatctcctcgagatagacatttatggcctcaaccaagccctttcgaacggaagtatcacttcgttcagcctggtcaactcgtacatgtcttcgatcagccaggtttgttcaaaatttatttgtgtctcttcctctgttaatcgagactcatcgactatactatataagaacaaccatcaaggtctccttcttcgagctctcatcgagacggctcctataaactcagttctctcgatcgcccagaaactggacgatgaacgggctaatgggactgtccgtagctctctccatggaatccctattatcctcaaggacaatatcgcgaccgatatcgagcttgggatgaatacgaccgccggatcgtacgctcttcgtgagtatactcttccgcgtctgccttggcaatgtctcagaatctttatcgctatcacacaagcataatctcatatggtttactctttgcatgtgttctattcagttggaagccctgttccaagagattcgcatgtctctatgaagcttagagcagctggtgctatcagtaagctatgatttatctgaataatttacccttatcgtgataatctcactcattctctgcgctcctcttgccgggtagttcttggtaaagcaaatctgtctgagtaaggagaagcctttcactgtgtcactcaattccagagatatgatgcgactctgagccactaacttattcaagcatctgaactttgcaggtttgctaacttcaaaggaaatatcaccaacggttggagcgcgcggggagggcaaacacaatcggcctatgtagtaggagggttcgcaggttcgccgcataatttatcattcgtacgagcttgccttcttgtttgattgccgacgatattcgtctttcgttcaacagctggaggagatccttgtggctcaagttctggatctgctgttggggtgtaagttttattactgagaaatcttctctctatgaatctaattgttcgggagtgactaagtctcaccatcatttgcatctagttctgctggatgggccgcttcttctttaggctccgaaactgatgtaagtagttgacagtatcatacaaatcttgcgaatcaactgacaagcgactgcttttatttgatgctcgaattctttgtcacgattagggttccatcgtttgtccttctaaccgagccgccttgtttgggataaagccatccgtcggtctagtatctcgggccggtgtggtgcctatcagctcgacccaagataccaccggcccgatcgccaaatctacatacgacgccgcgctgttgctcgagaccatcgctggttttgacgagagagataacgctacgtatgctgcaatcaactacacgctcactaattacacccaatatgcctttgcaccctacaataatttttcggcctatcgaatcggtgttcctcgaaaagtgttcttcaatgaaactctatccggtaaccctcctgagattaacgaggttcttgaggccgcacttctcaagatgaccgatttgggagcattcattcaagatccggccgacttgccctccgccgatgagcttaccacaagcaggaacgagacaatcgtgcttcaaactgactttaaagttgatttggggacttacttgatgggtctcaacggaaccggaccaaagacattagaggatgtgatcaagtgggtgtcgttcccgatctgctatgtcctgccacgtgttttcattcattcacgcttttgtgtccttacgcatcctgatttctgtctcggcgtttctttttcacagctttaacgatgcgaacgccgatcttgaatttgcccctggagagtgttgtcaagtaacccttatagcctcggttcaaacgaccggtaaatccaacccagcttacatcgctgcgcttgctagtgatcaagagatcggaggtactcggggtatcgatgctgtattggacgagtatggtttggacgcattggtgttgccaacggagggatacgcttcatcgcctgctgctattgtcgggtatccgatcggaacggtccctttgggatatctgaattcaactggtcagccctttggaatggccatcattgtaaagaaggtatcatctccacctctcttttctgttggtcatattcttctactgactaaccgactctgcttttactcttatctgtgatagtggaacgagccgacgttgatcggaatcatggctgcttttgaagctgcctttgctaaaagacgagttcctgaacaacttcaatagatttctccttctctaccttctctttcctactcttttctactcttttttctcttactacgtctttcttctcgcctataaatgtgtctaaatgaggtaagatcgacgctcttttcttttatgtttgtctatctgtgcgcgtatacacgtactcgttttgtcaactgttcctgtatatatgatgcgagcttgtgccttcttgaacaaactcatccagtttcatcagttggttaatgagtcctactatggttttgaattaaaccccgttgccatctatcaaagttaaagataaatataaagctgagttcaaagacaagttcagactcagaggtacagggtccgatcgaacaagcaaaacaagctctgaagattaagatagacatccaatcgaaatccggataaccctaaccatatgatcacctttttttggtcttggtctttctttgtcatcccaatcggtggttgatcgtctactctctcaaacttttcttataggtattccccgaggaggccatcaattcaacttttgatcaactgcaagatttccgatcgataaatgatacattgaataacgagaagatgaaatgccccatgcaattcctgtagagggcattggtagccgataagaggaaaatcagaggaaggcagaagatcctttgatcaattgatcaaaaggatcagatctagtaagccgaaagcttgaagaccttattagccgcctgaacgagtactgtcagggaggagatgactccaaagaaataggttcccgatctgttcgcgtaacaatcgatgcacacgatcaatcatcgaagcagatgagcattcagttaggctttttggattccaaatctgttttaacaaattgttgagattgtaaatagagaagaaaagaaagatcacagttggacttaccgaatgttggcgattcgagcggtggtaccatagtagtaggccgcgatgaacgatgctcgggagaagatgatcaaaccagagaagatgttcaggtacttagccggaagtcgagcaaagtttccgatgatctgtattggagaaagaggagtgaaaggtggtgttatgaaaagtgatcagcaaagggttgaccgagagcagaagaagaataatcagggcacaaacaatagcagtagcaaaaagagggaagctctcaattccgttaacatgagcaccagccaatcggtcaagttgctgttgtttcggaacaaagtaccacatgtcagatatatagaaaagaatagcaccaatcagagaacacttcaagagagtgaaaataagagaggtcgcgtagagagaacggtgatgatggggaccaacatctttcttctgtgcgtcggccgtaggtcctcccttcaattcgcctctgggtttcgtgttatcgaattcaaatccgttcttggaggccctaaataaagtagaattcaaatcatggtactcagttgattgaccaagaagtaaagactgtccaggaagatctatcaaagactatgagcaagattttaaatacgcacatgatgagcttgacagtgtgaggagcgaaagccagagcccaaacggtgggaatagcatagagagaaaggttggagtgaacagtgataggcatggtaggtgtaggtttagtatataagctcagtgagatcgagagaataagacggcagatggatgaatggatggttgttagaagagaggaggaggggcaaaaaggaggaaaggaggctgaaagatagctgtgaaaggacgggcggaaaaaaggccacgcgtctatgtatactactgcgcttcccggtgacgtaatctctagcctttttcactcacactcttactagccatagttgttataggaaatctcatcgatccaacagctaacaggatgaaatgaggaataaagaaaagagagctgataggaagggacaagaaaatatttctgaaatgggggacttttaatttacactcatgcatgtctctacagaggacgagctttacctctaggcggtcgctccagctctagcagccgtttcggtgaatgtgtgggttcgaccagggttgtatttgacctccagaggtcgtcctccatagacgtatccagtaaactttgcgatagctgtggtagcctggtcgatcgcaacaaattcgcagatgccttgtcctcgggatcgaccggtgttgtagtcaagaagaatctcggcagcgacgacctcgccagtggtttcgaacaactcaactagatcctcgttcgaagtcgaccatggtagctgtttacaaaaccacaaacccatcaaaggatccacccgttaggttcaaaggacagaacggcaaaacaaaacatcaaagtagagaaatctcacattgttgaccaggatctgcttgctctcgggaatcgacgcaccagcaaatcctcctccgccgccagaaccccaacctgcagccggtccgctcggcttgtaatccgcgtacggatcctgtgggaattgcctacctccagcagggaagccgcctcccatcccacccatgtgacccatgtgacccatatggcccatgtaacccataccgcccataccgaatccaccgcgaccacctcggaaaccacctccgaagccgcctcggggcatgaacccaccacggaatcctccgccgaatcctcctcggaaccctccaccaccatgagcaaatcgatcctcccgaacctccaaccgacgaccataccagtcgaacccgttgaactgggctgatgcgccgaaaccatacgcacaagaaaagcattcagcaagcccatgctagacagctgttcataagaggttgaaagcctcgaagtataatgaaagggtacatacccatagcattggcggcgtcctcggcgttctcaaacactacggttcctcctccctttggccttccatcagggaacatctgtacatcagctcggatgattgctcccgcaggtcggaagagatccttgaggtcttgccaggttgcctgataaggcaactatatgttttacaacccccaaacaggcaagagattagtaatatataagacacttctgccgattatattgattcacatacgttaccgatatagagctggttgctaggcccgcccatgccgtggccaccgaagggaccgccggccatgtgtccgagtcgtccctgcgaaggaggggctccaaatcgagcctcctgctctcggtcctatgtagaacatgcggtaaaatatagatatcataagattgcgaaatgaacttagagaacgaatacgaccgcatgactatcaagaataatccaagcacacgagacgaacctctctgacaaaaatcggccttccaagcaaaggtttgtcggtaaactcggtcaaggccttcacggcgtcttctctgttagtaaactcgacgattctatcatttgaaagatacacgatcaattctttgttctccttctccaagtgaatcaaacggggagtcactcacccgcatccctttgagatatgggttggcgtaactaagatctctgtaaaagccacatcgagtccggctatagggttcacgtggatttatcgtataaagaggaacgattccgcaatccagaaaccccgattttattcccaggaagccatacagcacacccggagcgcaaattgatgcagaaacagatacacaagcccccccagcacccatataccaaagaaaaccaattccatcagcccttccgactccttcaaacagtcaaacccttaaacgactaatcataatccagcaacgcaaaaagactcttatattgtctactcttcgccttcaatccaaacagactaggtcggatatatactcgtggagcgtactccttcctttgggaatgagggctgttcgagacgattgcgctctcggatgcaggttgttggtgcgagcgaggaagattttagacaaggaaagccaaatgtatcgggatcgataaggcgaaggagagtaagagaacgtcttgcatcgaaaccgtcgaaacgtttgaggagtcgatgggccgagaaaacttctcaggtgttccaccttggagatccatccttcaacatcaatctctccttcgccttattctagaacccctctcttcttagcccctcactcgactaacgaccagcattctcagattgaatgtgtgagccaccggatgggaataggccattcttccccatcttattttgatcaccgtctatctgatcggctctgcgttgagagagccatcttctctaacctttatcacccttacttcactcgaaaatgtctaaattccaaacacccctacaccccatagccatgaacaaagaaaacgcaccgtccatcatgaaattttccaggtccttgtacctgacttcgtaactgagatttccaacatagacccggttctccttgattgatcgttgggcgtgctcggccgcctggtcggaaggagcattgaagggtccaccaacagatcgctggggagctgaatgatgagcgtgagtgctaggagcatgagaactgtgaggcgcaggggattgactctgtttatagaaggacagtttccgtggaagcgccaagagttagtcgacagactaagagaactagcgaacagggagagaaaggtttactcggcgccgataagaggaccttcgaggcgagcgggagcgagagcgcgatcgagagtggtggcgacgagaggaggagtgatgctagaggacggatgaaagcagaatgtacagaaaaaataaagaagcaaggttgaccaaacaaatgtggaacggttggtcaagacaaagagagagagcgcgtgtgtgagtcagaagtaaaggcaaaattgacagagtatgtatgacagagcagagaacagatgaggtgatggtgggagtggtcgaaacaacatctacagcgcgtctatgttgaaatatccctactctctaccctgttttcttctctacgttctactctctattctacatactacaatcacgacatgatctcctctgatgacagaagcaagcgcgaaaaggaaagatctttctgctatcacttcattctgttccgcaggtgggtgccttcgccgttcgatccaataaacctctccgctagccatccacgtgctcgctcgcctcgacagcccctgaaacagacaactctacaaagtagaagaaagaggaagagaatgttaagaccaactcacgtcatcgtatcgatccgatcgtctggccgaatgtcctgtggtttttaatccggttggattcagaaggatagatgcattgccatgtaagtgtgtccgtatgaacttggacaaagtcgctcgtagcctctaaagtaaagagtgtgggaagtatcaaccggaggtgagaaaacaacacgtacgatcatcccgagaatccctatgttcatccctatggtcatccctgtagtccctctcgtctctatcgcgagatctatcccgtctagggaccggagatctgtctcgttcgtcggccatgtttatactgtgcaatgtcctatctgtttaggggatggtaaggtgaatgaaagagaacggaagaagaagaaaaaaggagatggggcttggaggctaagggcagtgccgagggttttagcgaatttgattattcatatttacttaagacttaatcaacgttcagtctggattaagccacgctgctctactgctcacactcaaacacatccattcaacctcaaacataactacaagatcacatagtatctgtcctctgatctgctcgctagtcatcagccatggcagaagaagcagccgctgtagcccaggaatttgtgtccagttcgtttcggatttgttcctttttggcttcgtatttgatggaattactgagcatttcttggacaacacgtactgatcattctcaattcgctcttattcctgctcgactcgatcaggtctggacaacctttcgtccgaggttgccttcctcctcaacgagattcgtataaaggacgaaagatgcgtcgagctcactactaggttgacgtcccggacctcttctcatcttaaacatatcaggccatcctccacattatccacccctaatccaaatgtacctaccatcctaaacccggccactacaaaggagacaacagcgacactgcctaaaatctctagtgaattcgagaaactagcagcgatgcaggcagaaaaggtcgctctgtccgaaaggctgatgacgctcgtaggaaaacatgcgagaaagttggagttggaggttgttggaaaggtagccgagttagggggcgttcccacaccggcaatggttccattccagtcggcagtcatgtcgggtctgatagagaagaagggcctgattaatgctggtgctggtttagtatcctcaggtaacctggagcataagcgtacgtctcgtctccaacctcctttgaacttctcttttcagtgttgactttcgtatcatgcttcaatgttggtaattgtgcacgttggatgatatacaggccgtcgaacctctcagacaccctcgaaacagcctcttcagattcagatgcctcctccacagatgtcttattcgatgcaacccaattcgcgtcattctcctctatctacgtcatcatacatgcctcctcaaccaactgctcaccaactagcctcgtcatacacgccttacgatgcacaccacatgattctccccaacggctcttcatcttctggatatcccgtccattcgaaccactctggacagcagcaacaacagtcatctcaacagttgcaaggtttttccgctcagttcaatggacattcctcctcgtcctctgcttctagacattcaaatccagttgctggctatccgtctcagattcaacagcaactccagcaacaaatgcagcatcagctccaacaacagcaactccaacagcagcttcagcagcaacaagcatcacatgtccagtcgtctggcttatcagccaacggtcagcctggcgctaacaaagcctcgaagcggaaacgcaagtcaacccaggctcagtcggacgaggacgagtatccgagtgcgaacgcgtctagaccgcaggtagtcgtagaagacatgggaggcgaggaggatgctgtgggcgaggaagaggaggaggacgggggagacgacgatacattatactgctactgcaagcagaagagtcacggggaggttcgtagtttttctctttgcgtgtcaattcttgagtctgctgctttcatgtttgctcggtacttgcatgctaattgtctgtgatttgtcacgacagatggtcggatgtgataacgagaaatgtgccattgaatgggtccgttctatcttctcttataactctcccttcatctatctagaaggcaaagggatgttgacatcaatgatcttttctacccttagttccatatgcgctgtgtcaatctgacatcacctcttccggagtcttggttctgtccaacgtgtgtagcccagggggcagatcggaaacggaaaggcgggagaaggtgatctcggtgtttgtcggtctcctgctaccatctattgtgcattgttgtttgttttgcctggggggggggggaagccttcatactcgtccttgtccttatccatcgtcccctttctttctttctcactctttgcatcccatcgccgttgtctctctatctgctcccgattgataaggatgcgttgtactttcctatgttgtacattccttctttaaaaaattaaaattaaaaactttcgccccaaggaggctatcagatactctctgcatgcaagatcggcagtacacgaacggtcttatattgattccctggctgcaataatcaatatgcataggtacggggtccatgtccttacactatcaagattttcatccgatacttgtgtatacatattccgacggttcaatcatttgatgaacacacgtacaaactttcttctcgtcacacgcatgtacatctgtacatgttgaagcactgtccatccgataactatttgtcacccagcactaagcagtctaagatgaagagtggagagagtgctagataaacatcataaaacgccgatggttctaacgtcccgccgagattcgtttgatgcgggattttcttagtaatgctgtcgttaagtgagaagaaagttgaccgagctacatcaaaaggtggtaaggctgtcgcatacatgccttcggataggcaagcctgacttctcttacagaaagcaggcaaagggtttggcgttgtgtattcctatatcctcaaacgaaaaaaaagcaatcttcaagctttcgtcctatccgttcaaatactcgacagacgcctcagccttctgctccctcgtacgtcattgacgcctgttagttcagccggatgaacccttgctttcttgaacttgacctgaatggctgttctctcatatagttatccttcttcttctcccgcccatctatccgtctctctttctgtttcttttttacttggagatatttagttcgtagacttagagcgatcgacgtcttttcttccagaacaggggcggtcagggcgtatgataaatttggtcaactccaaaagaggcgagttaccatctatgttgactggaggtaggcttcagaaaaagtcgacaagggggacggagaatccgtatcctgacagacatgttataccgtgagtactttgtccatcgttgttctcttgatttgccgtctgaactgaagggaagactaggaactcccgaaggctgatcgagagaactcaccgcacaaaccgactccagatataccggacctttctttgaacctccaaccgaacgccctcttctgcttgctccacaaagccaaaccaccaaggatcatcagtctcttgcttccatggcccatccgccaacatcctataaccaaaagtataatgcagttccagctacttctcactcacggtcccgctcggcaggcctcgtgtatggtgggattggagagtctcctgtgagtagacacagctcggatataaattccaaccggagtggctcgttcacgactactcgagggaaaataaaagagggcatactcgcatcactcagggacatccaatcatttggctcaggatctggcggggatgatggtccggagagtgtgatatctcacgggataagttcgatctcgtcccctatcatccctccgcccgaggaagattttgatcatagaacaagaaccggtacacctcatggatatcggatttggatcactcccggacaagaatcatatgtttatgccccagaggcccatcccgtcacgacgtcttcttcttcttcaagagagtattcccccgatttctttatcccgctctctttccctcatcccgaccagcaattttcgccatacatgttcatctccgatccaatgagtcctgccaaaccagactcaaaattcatcccaacgcgctcagcacctcctccaatcgcgcctgtgttcgagagaccactgccggcaaaggtgttcagcaaagcacatatcaccccgcctcttcaacccgcgctcccgttcagccatcagcatcctcgtctccgaccctctggtgctggttccttgaaatctatctcggtacccaatctcagatctacagctgcccaacaggcctcttcatctgagatttcaaacacgtccgaccggcgcgtagaagcgtatcaggcggcaggcacttgttcttcgtttacctttcctaaaccaaaactccaaccattcttgatcactccgccgacctcacccaatgtgagtcaagttttgaccgattcgacatcttcccacgctctagctcaaaagagactcgcaaggaaacctgtgttgagggaagatgtcgatctggatctacaaaaagtacgaagcacggatgaggcggctgatgtcaaagctctaagggagtgtgcggctcgtgataaagagaggaatgaatgggctcaacttgctaggaagaggggtatgtctagatcgattacctcagtgggaggcatattaacacggactaagagcgcttccagaagggacagaaaggattcaggaatagggtcttctgttaggaccggatccattgacatcttgcgaactccgagggagaaggaggagtggtcaaagggtggatctgaagaggaggaagcgcgtcggccaaggaacgggagggtcattcatgttgcaagatccatacctctattcgaccctccgtctgtccctccgcctctaccgcctgtcaatgcaccaaatttcacacttccaaaccccccggattcaactgatttggcagccttccgtcctccgatcacagatactaattcttatatcacaccatccgcaagacttgaagaaatcggcttggcgatctcccctacagaatcatcattttccttgacgtcttctcagaatcctatctctgttgaatatggcaaaaccacccgtcgcccatccatcaactctcagccgagatcgtccttgcaagcatggtatcgtcgatttccgcctcctggtgctagtccaaccgcagagtcgccttcgtccacgtcttcagcacccggaattgctggttcaaatagtaacgtgcctagggaaagttggcaaaagcatttggtcacaagatcggaacctccatttgcgtttacgcctagtttgttggagttcacccaggctgaggatgtcgacaacggagaagacaatcaaaaggcttcgttctctgccgacgaggagagagaccaagaacggccagttttaggacctaggctctcgacgagaacggtggcacagaggcttgccaattctagtccagagaagaacttgcgggtagtcgaagtttgtctgctccctctttgcttttgtgtccaataaaacattggtgttcattcgtatttggttctttttctgacaagggcatgtttttcaagccgatctctcctaatcaaagtactgggtcccttcaatcaaacgaatcggcttcttcgtcccctgatctacaaaaaaattccccggtagacgatgattcaattggacgagctcgatcttcgctcagcacactatttaccatgaaaggacgtggaaatcagagtcatcagtcaatcgtccctctaggagctgccatcatgaatagttagtactcttcatcgtggtttatcttttgactccaattagggccacgcacgcgtccggacaacactgacactacgtctcactgtttggtatcaatcgtccgtacacaaagattctgacgaaagcagacctacgcttcaccgcgtagactctctccgtagcagagctctcgtatgtcgccgtctatctcggcattctcttcgagccgaactaggcgaaccagacgacgcgtctcaagagatcctttctccgactatgatggatgcattcccgactcctccaccgtcgctcctccataaggactcgtacacatcccaatcatcatacactactgccaggccctcgattcgaccgacgccatcgtctgcttcggtgtttgactgggcgggtttagcagatgtggaaactggagactccaggtttaccaacacgggtacgggtataggtctgggcatgggcatgggcacggacgtgtatcagggcagagtatctaccgaacaatcatcgcttgaaattccgcctctacagtcgtgggaatcatttacatcggaagcatcattcgtgaccgctcaacaaaattaatctattcgtacttcgatgaatacgaggagagaaggaagattgacgattgccatactctagaattcactctttcttctgctcgttcatcgccgctaattacctcgttttctctagatactgctctctccttctatatagtttgccttcaaaggaaacgccattgaattttgaagtctgatcatgtcttattctttccaatctctcgcctcttatgtccttcttgtttgttcgttctcttttgatgttgatgataccatcagaatcaaggctcttttcctatcttcattgtatgtggatcttgttccccgcgcgcttgttttgacacttcttctctatgctagccctgaagtctttcgctctttgttttgctgtcctttcctccttgctattcttattcttgcttttatcaatacgtaactttggttctggcttcttcattcttgctataccattgtgttctgtaactttctccttcctcttctaaagacgaaagtgtactcaaaattggcctttcattgctgataatggatacgcttgttctggttcgatacaatggcacgttgtatctatcttgaagaggaagatgcttgctggaaagagactacaactctacgatattctttaggaaaccctccttcctttctctcttctttttttttcaacccaggatgacgttccaaaagcttgagatttacttcttcccaggactttcccaactcaaatcttcccatccagtcttgatgaacacctctctcactttcctctctgcctctatcctacttccatctccttctccttcattccctgtgttagcaccagtagcattgacctccgaccaaactctcacagcttgatgaatctcttcttgattcttggcaccgaccaatactggcaccttctctccgttcagcccgttcaggtttctcagaccaaaccctaacgccaggtcgaccgcacctcctctagctgaccagagttctcctgctagcttcccagcctggcgagcggcttcggctaaaccagcattggccggattcgaacaagcaggatgccaagcggggggtccttgagaagagagaagacccatgttgagaggagaggcggtgagaagtcgaacggaagaagggaaatgagggagatacgacgaaaatgcgtcgttggcgaggttagaatgagagtaagatagaattgtggtgagctcataggaggaatgagcgcggattaggtatgagagccgaagaaggattggaagagggtagcctaaaccattcagcggaggatcatcagaccgagagtcgagactacagatacaatgcgaagaaaacggggtagattgaaccgaccacatatcccgatctccttgatcaacccttcttccttgagtcttcccaagacctcgaatgctttcaaaaccttggcatcgccctcacccaggatttttccttggtcttccggggcgagacccatagattgagcgacctgggtatagctaaaagcttctttaggtcggttgggtttctgaagacccggcagtttgtctgctataaactcgacatcgtgcaggtctaaatcaccagagcaaccagagcgtgatcggttattgaccctatggtatgagagcaaacgataggtttagaaggtgggacggagtaaaaaggacgtacagacaatatccaggtattcacagcccagtctgtccaagcttcgtctcacacttcgttctatattctcaggtgaatagtcgaacccatcggatgagtactggccgcatttagtaacgaccttgtatgtgtttctcgggtattcatctctgagcgcacgcaaacaatttcccaagacgatctctgaaggatgataactagatagcacaaggtcacaaaaacaccatgagaaatcctacaacaaccagagttcatacatccgaacgagattcgaagagaaagaagaggacagactgtgggctcgtgtcgacgactctgattccgtacttgaacgccaagcgaacggtccgtaagggtagcgagagctcttcttttgtcaccgcctgaggagcgtagatcccccatccaaacgtcgcacatccaagaacgagcggactccatccatctacagtctaggagatcccaaacagagagtggttgtcagcatgttttgcaagtatgatgaacagtaggtgagaaatagtagactaaccaaaggaatcggcgggcaaacaagctcatcggccggagtgagatcaagggaggcgagaggaacgagcggaatcaaagggtctggatatctgggatgtgcgcctgagctcattttggatgaagagccagatgatagatcaacgaacgaagggaattagacgaccgatagatcgatagaagcagacgagatgatggatggagaggaataagcggattcagccgaaagcgttttcttccatccgaacatccactccgccaggtcagagcagtctatccatccagccagcgggcctcttcctcgtcatgtcaaagactcaggtgaaatccaaagaatcttctggtcacacagctcagcccagaacatatcgatatattcaagaaatctcccaaatggtttgttttcgctcgggaagtcgatagcatttagacttattttgctcatccggcatctttcgcttcatttctcggtacactcagatgtttgtggctggtgaagttcaggatccattggtagacactgttcgtcaggtcgaggacatcgtccgcggccaagtgatcgaacttgtttgtcttcgcctgtctctctgcacaactgccggttcatatacacaccactgatcatcatcaacatgtacacatacatacacaaaacaggcaatcagagctcgccagatcgccgctcgcagagggtccagaaatctagcagccgaagatttgatcttcttgatcagagatgaccgagctaaagtgaacaggttgaggacttatctaagttggaaggatgttcgaaagaatgcaaaggacagtggaggggatgccggagcaggtgtcggagcaggtgctggaggaggtacaggtggagttggaggtacaggggaggaagagcctggagaaggagacggttcgtttgacccgcctccttttgatcctatgcttacaagactgatcgtcttgccttgtacgaatttttggactacctctagatgcgctaaagtcaaagacacgacagaggcagatcgtgaagcttccctgggaagtcaccacagtttacgccgacttccttcgacacttcaaaggagctcgaaatggagcacgagcaaacgtagatgacgaggagagtgaggaggatgaggatgagctcgaagcgaatgaggacatgcttcaacgattgagggtaagctgcgatctccttctcatgattcgtctcggcttgccaagaaacggaaaggcatcaacgtttttcgagtccgccggttgttctcctcatctgtcaaacaggacgcagaccttgtcacaaaaaacatgtctagggaagaatattctcactactcagattgtcggcaggctagttttacatatcgaaaaggtctgagtttgttcatctttcatctattgaacccgttactggtgagagaagacgatgggcggtgtctcatttctgcctttctttgtctttcctcatgaagcgaagcgatttcgggaatttgtcaatctgtctgcttatctagacgtgaaaccgaacgacgacattatcgacatcctcggtttcctctgttatgagatggtccacactctttgcacatctgctcttaaagtgaaggagatccattctccaaccccagcagattctctacctatcactctcctgcctctcgtctcttctgcctctaatatccacactgcttcttctaacaccgccacaaatacaagtacaagcgatcatgtggatcatacaccgatccagtctcaaactcttcctgatccaggagcacccgctgtcaacccactcaaacgttcaatatccagcacgaacatttcctttcccaacccatccaccactactaccggtgcttcttcctccgttgtacctccttcaggctcttcgccatcaagaaaacgaccgatgacagccaccgtggtcacgggtgcgaccacgaccacaaccgtagtccctggtggaaaaccagattcacccgaaccggcggtgtgtatgttgttcgaaagacccagtcaggcacgaacagctctgacacctggacatatcactgaggctttcggaaggattcaggagagtcaaggtaggttgaaaggtgttggggtaggaaacttccgaggcgctggaccgggtagaaggagacttgttctgttttgaaagcttctctctttccatcgttgtcaacatctgatgttctctctatgccagttaattatatatgtttttcctctttcttttttttcttactcaagagagaatggaccgaaagatgagctgagaacagacagtgagacacattatgatttatatagaagccactactttctgatgtataaggtagataggcaagaagtccgtgataggatttgttagagataagagaaggggtaattatgtaacaggcggtggatagaatggataggaagacaactagaatacagttgagatgaacaaaaacaaacgaccgagcgtctgagaagctcacctcgataaggcagagaggagaagatatattgatacagtaagatagatcagagccgaagagtagatagaagatagaagagagaagagaaggatagacaggattaaacctaaggaaagaggatcaagagatagagaggaaaaggaaagataaaaaatcatctagaagagaagagaaagagagactctgggtttaccaccatcgtcgttaagcaactgccgaggaggcggctgaggcggctacagaggacggcgctgcagaggatggttctgcagaagaggcagacgatgaggcagacgatgaggcagacgatgaggcagacgatgaggcagacgaagaggcagacgaagaggcagacgaagaagcaaccgaggaagtgactgcagaggaggaagcaaccgatgatgcgactgcagaggaagaagcaaccgaggaagtgactgcgctgatactggaagccgcggagctgatggttgaggtagatttgaagacagaaatggcgtaatgtcctccacacatctcagtactatcacctccgcaagccatgttgcagttaggagcggtagtggtggtggagagcgaagatccacagtctgtgttgttgtttcggtttttcgatatttatgtaaacaaatgacgtagaaagacttggtcagaaagaaagtcctttcaaccgagacaagaggggagggaaaaaggaataaagcgatactaacagcattgagttccgtctgttgataaacaagatcggtagtgaaagaaatgacgaagcggattagcattgattgagaacgagaacaaaagagcctgatcggagaaagaaggaagaagaaagacgtacactcgactccggcgtacatgtatccagcagcagtgcaagtactagaacacttttcgatggctaattaagtcaaaaaagatacaagcattagcatacctactttcagactgtcgagacaaactagacgtgaatatgatagaaacttactcatatcgtcagtcgaggaactagttccagtaagaaccctgtcaaccgaagaaggatcagagtagcaaccgacgtattccattccggtaggcgcggagatagtgacagtggatgcggttccttcgacgaggtggtagaggttagccctgtaagttcctccgcaagagacagaagagtctccggagcaaggggtattgcactggtcatcggcgacagagacaccaagaccggagacgacgtcagagccgcacaagcattgggagtagtactcggtggcagcgtaggtgaaacccatagacaagcaagtagcaatgcaagattcaggagtggccgcatcaatggttccccagtaaccagaaaggagtcggacatccgagtcagtcacacagccaagatcggaccaggtggtagctccagaggtgatcgaagccttggccgaggcgctagcgctaggagtcgcactcgctctcgcactggtgctagtcggggcggcactcgagtagtagccggccatggcgctggagtagtagctcgcgctggcactggcaccggcactggacatggccttggaactagacatggcactggaccaagctttcagactctcactagccatggcactcgagtaaccactttggacagcacttgggacggcactggcgctagggtaaggaccgaggctggcagaagcgctggcaccgtagctggggctggcagaagcgctggcaccgtagctggggctggcagaagcgctggcaccgtagctggggctggcagaagcgctgctactggtaacggcagccttgatgtatttgtacaactggactctccatgttccaccgcaggtcaagctcgaatcacctatacacgagaaaggaaaagaatgaacggttaagaaaagaacaagtataagagaaagagtgaaaaactaactaaccggcacaggccatgtcacatcccgaggaagcaggtccagagctggcagtgctgaccaagctgtttccacagtagcactggtttccgtctgaaagatgagaccaagaaccattagcaaagagtatggtgggacagaaggatggcaagaaaaggaagatagagatgacgaacattcgacaccggcgtacgcgaacccggcggtcttgcaagtagcctggcagaactcgggagtgtttgcgtcggtgaaaactgagtaaccctggaggacgtaggaggacgagtcggcgtagcagcctattgcgctccattcggaaaccgaagtgttggtgctcgtcgaaggagtagtggtgttggtgcaggtctgtgtgctctggtagaggttcaaatagttggttctgtcgaagagaaggggaagacacgtcagaattaaggaagaaagtattttgaattgggagtagagaaagacgcgtgtaggacttaccctccgcacgacgtgctcgagtctccggtgcaaggcttggcgcagttggaagacaatgtaggctgtcctccgctgttgcctaacgaatcggcacagtagcactcgttaccatctaagggaaaggaaggagatgacccagagcgcgtcagttatagcagagagaagccaagggagagaagagaaggatgtgagaatgacacgacttacactccaaaccggcgtaggagtaacccatggtagcgcaagtctgaagacaggccgggatggtgagactggcaactccctgctgggcgtagccgacgagagctcgagttcccgaagttccctcggtcacgcaaccaagatcggaccatcctgagtaggatgccgatgcccggttctgaagcgcaagtgctcgtgaaggcggcttggagtgacgtctggatgaggctcctgggtaggcggcctcgaccggcacggaggagagaaggaggaagaggaaaggaagtgaagtgagagtggagagggagaacatgatgaagtgagatatatgtatagtaagataattaagtaggtgaaccaagttaggttgggttgcgtatgggtctggatatactaaatctagtccaaaggtaggaatgagaaacaagaagagagagtggcgatgaggatggagaaaagagaagaaggaaggtggtaagaaagaagggttgcttatataggagtaagaacgaagacaatgtggaaggggatcgaaaaaagcaggtccagcctggtgaaggtcagtgtcaatatgtttacacctcaccctccgataaaacaaagacaacaaatcgatggtaggagaaggagagagaatggaaggaagaggagagcggaaaaaccggtaaggttgtgccggagcgaaagaagcaaggcaaggcaaatggataacaaggcggaaaaggtacaacaaaaatagatgaagagagtgaatcctaatccgtttcgagcgatgtccaaaagtcaatgaagtgagcgcgaaagttgttccagatgaaacctgattgatccagaatggaagaagaagaacagagaaagattaggtacgatcgaaacagaaaagagaaccgaagcggcggcacttgaccggacagagagagcagattgacgatcgatagttcgatcaaggtgaatcagtccaaacagattaaaaacatggcacacaaggagaaagagtttggaagtcaaggaataaaattcgctgacacgaacgccacgtacaagatacagaatagaaactccattggataaacaagatggaaacctgtgatggtcgtttgtttatgcccaacagaactttccttttgcgacaatactgagtattactccactaggcatgtttaacagtagggtgtggtggatggctgcatatccgcgtgctgaggtgcctgagtgccacggcatgcatccgcttgcttgtgctggataatctttacggtttcgaaataacaaagtctgaaaaatcccaataggattaagaacgaacaacttcaacacaaggagaaactcgtaggaacaaacagagagcgtcaaccgaaaagagtcaagataaacagagcagaaacttgagctaggttcagatcccagacagtcgtctcagtggagtgtcgatcgcttcttgttaatccgaatgtttggcttccgaccgcgatgaaccgcctgatactccgcagtaaacaacatgatcttccgccgatcggtatattgattaaccttgtcaaaatggtgtggcacgtgtgtgctgttgccacacagattttcgatcgttctgaacgttgcgtacagcatctgttaaccctaaccatatactgtcatctctcattcatctcacccagccacaaaagtccacacgcactgacccacgcctatacgcacgattttatacggttcctacacccgctcagagacgtcctagttggtcagatctaggtaatgcgttttcgagcagtcgtctcagaggtctcaaccttcgtgcagatcgttcagtcgatctccaaactctccaagaaatgtatcctcaagttttcagccgacaagatgcatctcatctgccacgacgagaccgagggaggcgtccaggtttggaggtatgtcatccgtggtagtttaaagagtcaaagatcctggctgatagatatcccgttttggtttggctcctcggttgatctttcttctgccgtcttctctttcgaaaacaaaaaaacaacaaaaaacaaccttccccatgtagccaggtgaatcaggtgagctcccgtgtcttttgttttctcacctccttgaccactcacagctcacaaacctactctgataggatttgattttttcttcataccgaatagaatccaaccaggcaaacgagatccatatctcgatcctcatccagcccctcctcaccgttctcaagtccgccctcgcactcgaaggcaaaggtgaggtggtggtcaagctggcgaagcgacctgttggtcaaccgacggctcttaccggtagtgaaccgggtgcgccggcggtgatgaaaccaatgctcgtatgggaaattggaggcgatgtttgtccttcctcttcctctgcctccttcttctctctacaagatcacctcccttctctcttttgagtgccttgaactcaggactgataagctgaacaaggcgttaacacgttcattcctttcatacagtcgcggctcaaccgaccgccgccgttatctcacgagctacacatcaaagtactcaagacaccagaagttgagcagctcaaagaaccgttatgtcctgaacccgacgtgtgtccttcatgtttccctcctctatagctcgtcatcaagccatctattttgacgcgtctctttttctcttctcaaaagatccacatcgtccttccacctttaagctcgttgaggacggtgacagaccatctttctagactgtcttctcacgtatctgtctcggctaataacttgggggagctcaagctagaagcaggcagggatgaacggaacggcgtcgaagtgagaacatcatggaaaggtttaaacgtccccaaaggtctttctcctctcatctttttatcagtcatcttccgttctgtccactttgcaagttgtcataaccaactcaaataaaaacatgcctccttgtaataaacccaatatagtcaactcagactcccagtcaacacaggataggagtcaacctcctccaggccacttcttcaacacgctcgtttcgatcaagtctcttctccgctttctcaacgcccattgcattcagggctcgacgatcgcctgtttgtccttccgatgtggtgaactatgagaattcaacatgctcacttaaggatcgttcctttgtttgatttgtctatatactataggtatatgcgagaatcattcgttgatcatctacttgtacatcggttcgttctccctcacccgtgcattcctccctcttatcttattctcaccatcgttgtcatcgacttctataccatccaggtgatatggttcagaacggaggagtccttacgttcttcataccagccgtgatcttggatgaggacgattgacttgaaatagtggcgagatagcgacgcgaatagaacgcgtcgataccatgaagactgacatgtacccgacatgcaagggaaaacgccaagcctagcaaagaacttggcttgggtaagctctgatggtttcggatctaccgcattctatcgctgcttcattacttgtactgtttgcccagtaaaaagaaagaagagttggttcccaagatatttctgaattatatgtttgtatgtgtgtatgccaagaatatggtggagtttaacgaccgcgcgaacagatagtgagacacgcgtgttgccgttcggccgacgtgactccgtggatcggcacacttgatggttacaccggcttgatcgactcgccggctccggcccgggagataagcatggccctggcacgaaatctgatgagatcatctattcggccggtctcttggcgtttccttcttggcaacctccgattatgcttcctacccttctgcttcttggacttgcgcactctccctcttctctttcgttactcagatacattggcggcaaagcatatcatgggtttccttgggggactggagggtatctctgatcgaagttcgcctgatataaagagccttatctcaggtctaggagcattctttctttctctcttttccttcatcaatctttgccacaatattagtcggatccctatccattcctttccgacataatcaaatatcccaatcaatctctagcgtaaatagagaacgagcacaactggaatcaaccacctcttttctctcttcccaacctttgcctgttcacttttgcccgtctttgtataagaaagaacagaatggcaaaatcaacacaatttgtagcacctgccccaccgcttcccggtcccgcacatatcaccttggcagaagatctcatccatgctcttgaatccaatatccaatcaggacttcacgagtcaaaagtcaaagaactacaggccgtttatggcccaaaccagataaaacctccaaagcctccttcggtgagtttcttgatccttggcctaattgatttttttctttcgatgtttctttacctttcatttctagatgtcgttatctttgattcatctgctctcttaagcttggcttttgaaataacatggttctgtagctgatcacaaagcacttcatgatgttgtctacattatttctatcgttgcccacgttcatcttttgcacggcggaaaatgatcttttcattctataggcgacaaagctcctgctccgacaggtggccaatgcgatgacaatcgtgctcctcatgagtatggctgtttcgtttggtacgcaagattggatcgaagcaggtgtcatcgccgcgctagtcatccttaacgtctctgttgggttctcccaagaatggaaggccgaaaagacggtggccgcattgtcatccgttggcagtccagttgcggaggtcatcagaaacaagaatggacgagatggaatagcgtcaatcattcaggtcgaggaggttgttccgttcgtcccgttcttagtgttcatatctatcgtacagctttcttattgtgccgcggctaataaataaccttttcacgcccccctcctcgcaaatcttatcaactctcttccaacagaggagatatcatattgctaaaaaacggcgatgtcgttccagcagacgctcgggtcttgcccgagtacgtgtcctcgttggagaccgacgaagctcttctcactggagaatccctgcccgttggtaagaaagccgatatcctagatgttcccgactgcccggttggagaccgaaagaatatggttcgttcatgctcttgtctcttctaatggtttgttgtggacaaagctgacatctctaggacttctttactaggtcttctccggaagcactgtcaccaaaggccgagctagatgtctggttaccggaactggaatgaacactgagctcggaaagattgctgaggccatggaacgaaaagagacgatcaaagataaaggctggcgagcaaagtggtacaagttcaaagtcatcatgggaaccgccggaacatccaaactccagatcaagtatgctctcactcctcctgtttgccagatcaagaacaaaaacaacgcaccttatgatgtctaactccttctcattgtttttcttcgctcctttcttcctgcgataggctcaacaagctcgcgtatatccttctcggttgggcactactcctcgcattcatcgtcgtcgccagtaccggatttagtgacattccgttctctattgccagttcgtatccacgtgtttgattggatttccttttcctttgttaaagacacactagcgttaaaactttctaacaactttctctctctagcttatgccgtcgccactgccgtctcgattctgcctgcctcactgattgctgtcgtgtcacttaccttgtcgaacgccgctcaggagctttcgaagaggaacgcgttggtcagaaggatggatgctatcgagtctctttcaactgtgactgatatctgctcggataagactggaacgattaccgtcggaaagatgggtacgtactttggcttgctctcccagttctagttattttctgactaacgcatcaacgccttctatttctctctgtgaaaacctagtcgtcaagaaggcttggattccggccgagtcttctttccaggccgacaagagttctagcttgatcgacacaactcgtgggcaagcttacaccgccgagagcggatctgagtatgttttctcttcgtacctcttctattacctctctgatcttatcttaaaagtgccaacgcacctgtttgccgttttccacgatattcttctaaaagcccgttctatcctagaggattggtccgcgcacttcctcgaattccctcccggaaaaacactcagagctcctctgatacccaacttcagctcagcaatgatgacgatgatgacgacgagatggattctgaggatatcgttcgaatttctgagattgaggagaacttcaagaatttggtcttgtgcgcctcactttgcaacatggcagttattcataaaggagacgaaggcaaatggcaagctagtggagatgctactggtatgtctccctttcaggatttattagtctattgtatatggtttctttcgctgaaaatcactcatgcgtgtcttttgtttggccgacgatatctatagaaatcgcgctccaagtatttgcccataaacttgggatgggtaagccacacatgacccacaagaggcatgacaaatcccaccaccacgatgagctcatgttgaacactctggattctcgaacggatgagactctgaagaatcacccaactcaggtccctggaaactactcgatggttatcgagcatccgttcgatagcactgtgaagagaatgagcactgtgagtttctactgaatactcttaaaacttggacggcagccagtggaacctaatctctactcaaaccttctcacaccatctcttcaaggcctggaaatttgaagctctgaacgctgaagaatctactcaagacatgttcatctttatgaaaggagctgttgaaagagttctggatcgatgtgccttcatcggactcagccccgagaatcaggtcaagctgaccgacgaaaatcggcaacagatcattcaccgaatggataaggtcagttcttctcatgcttctcaaatcttcactggacaaccttctgaaccagtttgggtttgacttgaaaatgacagcttgctgccgaaggactccgagtcttggcgctctctggaaaactcgtacccattgcgcgagaggccgagatcaaggcaatgccccgagacgaactggagaccggggtttgcttccttggactggctggtatctagtacgttagctatcctcctaaaaacggtccaaatttctggctctgatcaacgtcgtttcttttcttttgcctttagcgacccaccccgacctcaatctaagggtgccgtgttggatgccatcaaggctgggatcactcctcggatgttgaccggagatcatcctgctactgccaccgctatctccaaggccgtcggtatcttgaacgaaacctcaccccaaaactgcgtcatgaccggacagcagtttgatgctcttactgaagatcagattgacgctttgcccgaacttcctctagttgtcgcccggtgcggtgagtcatgccgtctttccgatcagtctgccgagtttggatctgatcttgactctttttttccttgatagctcccgatacaaaggtacgaatggtcgaggctattcaccgacggtccaagtttggtatgcagtgtacgacaatcatgactggagatggtaagtcatttggctcagtcttgcaattcaaacaaaagccaacacccgcattcccgccttgtttctcttgtaggcgttaacgattgccctgccctcaagcgagctgatgttgtaagttcagaggaaaaagtctttaatcgtgtctcgttttggtatatctgattgctcataatctcctgtttgtcctttcataggggttcgctatgggagaagctggatctgatgtggccaagggagccgctgaggtcgtgctgtacgtattccttcttagttgtcccattcaagttttatatcaatcacacctgaccattcttcatactcttgtctatcatcaatacagcgctgatgataactttggtaagcctcaaaccgttgtcgacacccctcatatatacatgcgcgctgaattactgacccttgtcttgttctggggctcctacagcaaccatcatccgagctattcgaaagggacgaggagtgttgacgaacctttccaagttcctcctcttcttactatctggaaacattgccgaagtcttggtcctttgtatgtattttgcacctcttccttttaagctggcgacccgttcaatcaatgtttgctgatcaccagggtttattgtttcttagtggtcggtcttgctttcaaagatcctaccggaaactctgtgtaccctctttctccggttgctgctctctttatcaacacaatttgtgccggtccgcctgctttagcacttggtcttgagcctagtatgtagcttttttctttctttttcttttgatcgtctccctagtctgtattcgttattgaccgaccgcttccttaatcacttccctccttccaaatcactagccgcgaaggatgcaatgcttcgaaacccaggggatttccgaacgatatttacgaccttctggtggctcgacttgttcttctatggcttccttatcggaggtctaacgatcgtaaactttgtgatcgtcgtttggggtaccgtccttaacggcgggaaagggcagatcggtctggaatgtaacgatgggcattacaacgcttctcaatgtcaaaacatcttccacggacggtccgccgcgttttcgacgttgatgctgcttgcgatggttcattcgctagagtgcaaatcactcgagaagagtatcttccagatgaagctgacggataacaagatcctgctctggtcggtcggaatctgcagtctcgtcgttttcccaatcgtctacatcccagtcatcaacgattacgttttccagatgtgagtatgcacctcttctcctcctccctcctggagagtctttccctcaaattttatcagagacatgatagctgacggttcaattttggggcacgtatggatggtctcaatagtgttggaatgggatgggagtggggaatcgtgttcggcgcgctagtggtctacttgcttgctaccgaggtttgtctttcttctttttgtgtctcactcatccaacccaacatccgctggcagggaatgaaggaaaaggaaggctgactagattctggatgttctttcttcttcttcttctcctcttctaaagatgtggaaactaagtagacgaatgatgtatccacttccagtggccgagctcgagaaagacggtctccctcggttcgatacgatcgctgacgagaagcgataggccgtgtttttctttgatcgactcttcatttcctttcattcttttgggtggatcttttgtatgccctgtttgagcttctattctatctctggatcttatccctactattcctttcttcctctctctcttcttctttcctttgtattcgttctctttattcttcattctacttttgaacttttatttatctggttgtttgatcattcgcataaactcaggatgaagaacatcctgagatctagtcttcaacaaactgtgtatacaacaatgcatttctcccaactgtctcttctttcaagtttatttgaatcatcaatcgtcgaccactgtttgtcgtcgctcagagagaaagaaaagaaacgatcagaaagatgtgttctgttccagcatcagtgctttcgcctgatctggattctcatgtatcgattttgatctattctatctgttgatcacgagaagcacaaagtacaaagcacgaacccacagggcactaaaaacaacagaacgagatgagacaagatgtgaagggtttgaaaaggaaatataccgatgttctagattactatgcaacataggaaataaaaaaagattcctagagtagaaaatataaactacacaagggaatgtgatgtatacagcgagtgaatgaagaaagaaaaaaaaaagaaaggaaaataaacgatgatgatgatgtctgggaataggaaaccagcacgcacgaccttagtccctcactcaagccttagccttacagacctcctcccaggttccccacctagcggcccgttcgtccacccaattgatgaacgtttcccacttgcagctttcctctataccgtcctggcagccacccatgatctctactttcccgttgacgacacatctcacaaacttttctttcttcttgaccaaatcgttggcgtcggtacctttgggagggatgtactcgaattgttcgagagcgatatgtccaaggaaaggaacgagatggcttgtcatccactgtctgtcctctgggatcctatccaaaggaggatcgattcccgcgctctgaccgattccaccttgagcttctgttcggttgtagaggttcaagaacacggacgcgaaccctggggattctctatgagtaaagaacgggtggagaagttgagtatgggtctcattcggaggtagctttggtatagggagtggccgagtcttcggccttttcaaattggaagtcgatagcgaacgaggggaggtgatgtagaccgagtcggcctcggccgtcaggtgggattcctcgccggcgagtagatgagcggccgtccggacccaaggtcgaccaaggtaaggcgagagtgagtttccgtaaccctgaagaatagagacgagggagatagttcagagacattgacgagtcaaaagataggtgtacatgagagaacactagttggttctctctaaaaacatatgaaaatatgcactcacaatcatgtagtggtatcggatgtcaaagtaatactccacggcgagccactcttcgtctgtgaacactttgcacaggggggaatccccctggccaatggtctggtacccgcagagcatctgcatagcgagaatgtccatatcgacgaatctaccggcaagtttctcacccaacagcctatcatcactcagtcgagctctagtctttgctgcgtacaccgcgagccaggtttcagctggtttcttggaggattctttttcgaacgcatcgcatgccttgtggggtgtcagcgagcgctcccaagacttttcatgatttggaacttcgatgagctcgacctgtctggtggtgggagagaggatgcaagaagaagttaaaaagtcaggacgctgggttcttcagctgagaaggtggtagggaagagcagggagtgatgctcgtaaggagtggacctactctccatcaccggttccgtccggcccgctctgtatggtgggaaaggcgcctctgatgtaggactttgaggtatcaatgtctcgagcggatgaagctgaccagacctgagtaagcgaagtgattaggaatattgaaacaacgatcaatatgaacacaggtatccctagggcgcaccttgtaagacacacgggtcgactttcgggacgacgatgacgatgacgacttctttttgatgaccggggggaacaaagatccatatgcgcttctgatcatctttccgaatgcctgagtgatgaatgatagaggaggttagatcaaccaaggccaggagttacagaatgtaggaaaaagaccgacataagaatcgtccttgcctcggtcggacagcacctcgaggtctttgcgggaaatgtgactcttccaggtgtttaagaagtgccacgggtgggacttatcctggggaaactcgctctttgggatctttttgagcttgtctacgaaaggcttcattgtttcgtccctttgagaggagaagaggaagagaacgaggaaggagaagaaaagaaaagatcatcaggacacggcgagcgagctactaaatggagaagatgaacagacggaccactcttcgtcatttgcaagaatggcagagtgtctaacaagcaaggctgctcttgtgaggttgcagttttctggcagcgaagccacagcctgttccggcaggaagaacggcgagattgccgagaggtctggacagggggaaagcgagagaagggaagatgaggcaggagaaaaaaggctcagctccaaagggaaacatttggcgatgagatagattctactcacgagtcaagggatcgatctggttatggatgtccatcgggtgtgatgatttgtacttgtcgggctgaaaccagaacggcatttgagctgactgctgagagttgagcggccttgcctgggcaattgacccgacaagcacggaggacaccccaagggcgacccagggtgtggagggtagcataggagagggtggaaaaggtgatgggacgagagagcgagtgtgcgtgtattgagagaacgacgaggacgaggtgagagagggagttagagaaagaacagagtagaaaacgaaaacggaagaatgagaaagtaaatcgatcggagggatgacgtcaggttggctcggaaggggggttttgtcagggacgtgacctgagtgttacacctcgggtaaccttcttttggttctgttgtttctcctgcctcggtattccttatgctctctcattacatcaacatacaggtatatgaccttccagcgcaggtgcttctagcaccttctatgacctgttctattatgcataatcattggagtctaaggatgatatataagacgggtccccctttgccacccatagcatagtctaccaagcctgaatcctttgtcatt

SEQ ID NO: 2324 - DNA, 4730 bp, Xanthophyllomyces dendrorhous
cattgttgtatcaaccttattcatacgatttccctgccttgcgctctcgtcacagtcaccaagctagagagcctgaacttccttcttgccagccctattccctgccaggttacattcttgtaacctctccgttaccctctgaacccggatcctgacagtatccctgacaggaaagctgtaaaagtcacatttatcacgtgcatactgcgcagctgtcgacgcgtcaagcaactggtcgcaagcgcgtcagacaaacctgcgcggccacgcgccacgcgccacgttgcccacgtggcagagcgaggcaagaaggaaaagacaagaagattcccctggacgttgtttgtaatggattttttttcgtgttcaacagtgcgccttggttgtactgtgagggtggatgtgcagggagtgtgtagaggatgtacagagtgtgtgaagagcgtgcgaaggggctgtattgagagaacaggaggggcgtgaaaacactacaaaatctctctagtgcttccgtagtctggccctaagaactccatagtctggctgtaacacgctcgcccccgacgcttatctgccggtcgctcaacatccctcccgttcaacatcaacctcaaccttccgtccggtttcggtgtctctttctttttcttctttcttttcatccacacgcacacacgcacacactcgctcacacacacttcctggtcaccttgatagtcaagggaacatcactctttacaaggaagagaaaataacatatactttctcgctcgctcgctcgttcagtccctctgcccctgcccttctctctcctctgtttatcgcccgtccttcctttttcactttttaccttcccgctttctcatcgccggcaaagcacatttggatatacacacacacatacacacacacattcacacatgtactcggcatatctagcatccggcccatcctctcctccatcctcagactcgtaccatccgatagacccaattaacaccgcccagccgaccgccctgcttgatagctttactccttcccattctttcaacgacactcacctcgcctactcccacgagcactctccgatgcccttccatgaccacacccatggtagttcgcttggaagctctcaccaccccatacaggctccttcacagtctctgagccatcggccgtccgttgggaacatcactcaagcttactcgacagccgcccctccccagtacaactcggaccattcgacgttcggccaccagcagcagcaaccgcacatccatactccagcgttcgctgcccacgagtacgatcaacagcaccatcagtcgatacaccagcagtctctccatccacccagccaccatcagacgtatcgaccacaaactctcacctacgacacgcatcccgccggtcagtcacagccagctcccgggtctacctcgctccccaacctgtcacctcaagagttgaccccggcttacgcccatcactccgagaccatcaggatccattcgtatagcgctgccttcagctcaacagatacctcctcgtcctccaatcccccatcgtcctcgtcctcgacgtcatcctctttctcttctgctctaacccccgccccaaccgtcctcaacgtcaactgcactttgatcgtctcctcgagccagacggataacaagccaaagatcatccggctctgtttcgacaaactcccactagctactcatgtcgccagggcacccattccgtcagacaggcatccggcctccagaccggaagaccaggatctcatcctgagctgcagactgccgtccgagagtgagcgtccaacatacaacccacattctgtgaacctcttttgcgagattctcagcagagatcaacctggaccgggggttgtgttggaaagactttggtttggtacattccagtacgcgtccaacagcctcaatcacatggattctcaatcgacacctggtgcgttctcttcgcgttctgcctgtaatgtttctatgcccctctcttccccttgttccttatgttatcccactctgatcttggtttctcctctcctttctccctatcaaaagcttcggcgcccccataccagacatcgttcccaaatccttcagtcgtcaacgttcatacggaccctcatccatcgtcatcgacttactcatccagaccgcctagccggacgctaaagactcgacattcctggtcccccatctcccaatcaaacatccagcgccaacaacaacaacaacaacaacaacattatcagcagcatcagcagcaccagcaccaacaccagcaacagcaacctcactatcaatcacacgaccgcttcgagttctcgcctatcggaggaccggacgagcagggagaatatctaaacgtctcgtcagatgccgaacggttaaataccatcgaccctcatgcttattcttccgacggtcagagtacatacacatataccccagattcgattgaacaatctcaatcgcaaacacaaccccagttacattcccaaccaccccttgtccttcagccggtcgccccccagccggcaagatacaacatccatccgactcatcagtcggcttcgcagaccatgttctaccgacctgtcctctccaacctcggacaaagtaaacacgatcatcaagtccatcaagtctaccctcatcaacagccacagccatcctacctctaccctaatactcaggcccaggttggacccacgccgtcgccgatcaatttcagacagaccagggtggctccaagggacaaagacagaccgttgaactacggaacgggtgtccattcggctgccgctggtggcggaaggaaagccgctctcgaagtctatggagagttgagcatgatggctattggctggtgagtatccttctcttgttcttcttgttctcgtttttcttcttgtccctctcatgtctgggcggatcttagattggcactaacgtcctctctcaacgtcttcctaggtctgatgaggaatggcaaacgtccagacgactcgttcagttctggcgaaaagtagaaggccaaactatccacgtgacgttctcacccatcacacaggctcaatatgtcgatagttcgattgtgatctcttgtatctggagagaagataccaatgattgctatgtacgtctatttttttatacttcttctccctaggttatttctttgttctgacaggtccgcgctcgtctttgatcgaatctttctcctccaggttacttcggtagacgcaatctttcttctcgaagcactcataggcggtcgattctctgttgaagagaaaaacaggattcgtcgaaatctagaacgttgcaagccagagacgatgtccaaatcgaaaccagacaccgaggctttcttccggttgatcatggggttccccaggccgaaaccaaggaatatcgagaaggacgtcaaggtgttcaagtgggcaaacttccaggaggcactgaagaagagtgtctcaaaatactttatcaacgagcagaccgaacaagcaaagccgacagaccggatgggcccaccggtcggcttggtcatggcttgatattttgtctgatcgaaaagtgtcttcttttccttgtctctttcctctttgttcttttctctacttcattatcactcgctctcacatatgaacatttccgacgattaggacatacaccctcctcatctcctatcctctctctttcttttccttctatcgacttgactcgctcgtcaacggataggattcaagaaagaaagaaaaaacttgatctgtcaaatatccattatctcctaatatctttccctacgtctctctcctcttgttctccgggaaccttctttgtctttattctcaatatccactcccagtcatctgcgtgtcgaatcttatacctcagtccttaatatcatctccttcttcctcgcctctttctttcttgccctttttttttctcttttggtttctttttccttccttgtttcgttcggatcttcattcgatagttcactagttcgcacgtccatcctcgtccataagattcgattcttaatctcttcctcgggttatataagacttcttctttctttaccctctgtctctctttcgctctcgaactttatacactcacacgagagtttatttttttctaaagagaaaagaaaagaaagcaagagggaatgagaggagtgtgacaagcgttatatcatcagatggcccacgcagcttacgaacagatccgatctagctcgactcggataacgacaaatgagaaagaaaaagaagaataaagatgatgatgacgatgcatgatagtttgcaaaggaaaacaaaatgggaagaaagaaaaagaaaaagaaaaagaaaagagaatacacaaatttcacaacctttccttgtcatacctcgtactcccgcccgttaattaaaccgatatcgactcaagcgaggtcttgagtcaactcttcagcaggtcgaccttcccagcagatctggtggacctgttaaagttttccataggcgaatagagatgaaagaaatacgtgagttgatcagttggatgttctgcctccttttttttctcatgatcaaccgagcagaataaggaaataaatattgccagaaagaaataagaaaagagaagaagggcaaagataaaattgctgggaatagagggaaaaagggggagggagggggg

SEQ ID NO: 2325 - DNA, 35234 bp, Xanthophyllomyces dendrorhous
gggggagggagggggggggggagcatatcctagaatatcccggaacattcaagaagaggtagaagcagaataacaatgagaaggacgaacggcttggaagagagggtacttgtcgacctttccttttgccttgaggaatgtgttgatctccttggcggtgtaaatcccttgaagctctaaattgtttattattgattccaggaaagatgcccgatcgtttatcgtgatcagttttgagacgtaaatcaaacgaaaagtaacatgattcggaatgtatattagaagagggtttgtccttccggaacgagaaaatgaaggaaccatctcatccctcatattcccggttcacttgaaacaccgaaagaaggatgaacggggagagggaagaaagaagaaaagaaaagggaaaatgaatgacgtactttgcccattgagcatttccttctccaggtcatcccacgacttgttgtttccgacgaaagcctatccgtccaagtatagtcaaatccgcccccacaaatcgtgccaaggaaaacggagcaaatacgatgcgtcagactcggacatctataccccgcacacactcgtagaaattggtttcctccattcctgcacacgcgcgcatgcacacgagtcattaagagagaggaaggaaaaagattcctgaaaactcacagcggcacaccgtctgtttcgtcctccaagacaggtggtgatcagatcggccacaccagcggattcctctaaaaatgtgctctccttgacatcgtcaaagaattctgtgcaaaagtgcttcatctctagaagaccgattcgcatgatggcagctaaaagaggaatagcgaagcgattggtacgtaggtctttcggttactcgagaggaggaagagaaaaaagcgatacctttggagttctgtccccaaccgagaccgtcgttgaaaccctgagagcaatagcgagataagataggaagaagcgcgatcagctttgtacacataaagagacattctgaaagaggaacactcacagcggcaacagccacgacgtctaatcccaaataacgatcagcagataacatgtcaactctgaatgaagaaaccaggaagaacaaagtggcaaaggacctactcttcaaagctccacacaatgaaactccagcgacatcctcaatgatctgcaccctgaactgaggcgttgcgaacaacgactgccaaagttttccttcgacttcggttcggtaaccaatcgtggtttctgtatatgtcggcccaggagataaactatgagcgagcgccacgtgatgaatatggaacgcatacacgaaccagagaatcgatccatagcaacctcttgggcgatatttgcaccacttgaaagaaccgaagcgacagtggatgatcttattagcctgtgtgacatctcgatggaatgatagctacataaaatacaagaaaaagactgaatacttacctgagtgccgaacagctcactcccaggtccttctcaataacatccgcaaagatgtgaatatcttcgccgtgaacgtcgactccctatatgggtcagagccatgtacacaattgagtgatgggtccaacctgacttgatgtggagggaataggaaaggatactaaccttgatgcacgagacggccttggcaccctctgcaatctttccttgtaactgcccaagtagcttgtctaggaactaatcgagccaacatcgagagaagactcaatcagggtgtaagagagctgtcgtacaagaaacgaaacttaacgagaaagcgtttaaaaggtaaaaccctgacctgatggggcataacaaagactaggcaggttgcgtctttgacagcttcgaccaagtcgggaacagccacaatattttcaggaagcttaacgtctggtctaggtttgtcgagaaaagaccacaagagtttgaagtgtgtaggtgtgtatattgggtgtgagctctatttgaacaaagaagaagcgcaaagagaacaaacagatatttgacgttgacatggtcctggttgatgatctctgtgagctttcggccctcgacctgagagaatgatataaaaggattaatcgttgcttgaacgaagcatcacaggcaaaaatatggactaacctcttcttcatacacccacatcttcacttctttctcaaacttgtcgctatgcttctggacattgattcctgccaaacgggcgatggcagatcccctttgttgaagatagtttacggacggaacgcgagatcaatttaattatgaaagatggggttgagatcaagcagcaatttagatgaaaccccgacaagaaaaaaaagcagcttaccagttaccggatccgatgatcgcaacagtctctctcttgctaggcggtgtagtactcatggctcgcgcgatagaaggtgtcaggcgtgtattgaatgcggtttggctataaagatgggacttgatggctcgacgagacacgctatgaagaaggcgaatggagagtatggcgataaatgtacccagctgggtcgacggatggtgagcttgatgagtgtttataagaatgagtcaatttgtgcttcttcctcttctttcgatcgatttcttcttcttcttctgttccttagttcgttcggagttgctgcttcgtcttcttcttgttcttctactcttctttttttcttctcgtcatcagaaatcaatcgaaggggaaatgagcggtgaccccaagacgacggcgaaatcttgagatcttacgtaatcgtttcaccttgggggccgacgagggggccagcacagagcggttggggaagagctgtacatatcacgtgacaatataaacagccagaatccactcacgtgatcatgcgtcacagtctgatctctccctctaccccgctcgggccagcctgctgcgcgttcggccgggctgcgctacggggtcaacgctaatccttttctgtctcttctttttttgacttgttttgtttccttatctgtttgctgcactctcacctcgacctgaaccgttctcactttccttttctcgtactctctcttgcacacgctcgctcacacgtatattccttctacagcaatgcacccttctgagaaacacagagagatggagcttgattctcgatcggccaacaatgttgacttgccacctccttcgggatcgtccgagaaaaagaagggtctcagtgcagcaaccatcagtcagttgttttccttctctctctccctctcatctcccttgctttgttgcatcctcttctttgcctgtcttctcttcctgtcgtctatggacgtatcggatgagaaaataaaataaagagagcgacaagagaaaagaatgaagcggttgccgtcaacgcccggtcgcccgcgatctctgaaggaaacacagtcttaacccgaaaaaaaagcgggaagcaccgatgaggcgcctctgatcttgctcattgcctgccgttaggaatccatactaattgttctctcttgaatccccgtcttttctcgttcgaaccgggttcccttgtacgatgatcacgtctactgttattgttgtctcttgcacgtttgacgcaaacagtcccgatatgggtacgtcctgcatacacttttgctcgcttgctcacctgtggaagatgcacagtctcgctcagacacgtttcaacgatgatctgacgatctcttgtttctctttgcactctcatcaccctccaatagatcgctctctcttcgtctgtgatccttttcaacaagtacctgtttactacccttgaattcccttacgttcgtatccatcactcctttcacattctcttccgactagagacacgccctcgtcatcttccgtttccctagagtcgatctcagctatcttacatctcatcttcctctttctcgactcaatttagccggtgtttttgacaacatggcacatgaccgtcgccgtacgtcccgctctaggtcctgtttcgctctttttgaatattctggtttagattgatatctcacacatatcctgctcatccaggctattggaactaggctccttcgacagtttacccctttgttgaaaggactcgatgatgtcgtcatctctgtacgtgccttctatctctgaccaaagaacttctaacggcggatggcttatcgaccgaacgcatcccttatctcctattcatagagagacatgtacatccgatcgattctccctatcggagctcttttctctggatccctcattctctccaacatggcctatctgagcttgagtgtagccttcatccagatgctcaaggtgagcctccttgatacggagcagtcagctcagagagtctgaatcacacaacttatttgaattcttcaatcattcttcttaggcttttacccctgtcgctatcctgttgatctctttcgctttcaagctccaaggtttgtttcaactattcccatccatatcgtttgcctatagtcaaacacaggactgaacaactactgtctccgttacacttgctcttacatagagcccaacagaaagctcggagccatcatcggaatgatctcagtcggttgtgcgctcgccgcctacggagaagtctctttcaggcctttcggtttcatctgccagactcttgcagtcgtggtatgttgaagcttcccttctctgtgtcccttttctgctcgtcactcacgcttgtggattgatcgctatgatttctccatccaactctgccttttcacagttcgagtcctcccgattagtcatgatccagatcctcctccacggcctcaagatggatccgcttgtctcgctgtactactacgctcccgtgtgcgctattatcaacgcgtgcatcgttccctttactgagggtttcacgcccttcatcgagttcttgcgagtcggaccaatcgtcatgttaatcaatgccggagttgccttcagtttgaacgtggccgccgtgttcttgatcggagctagcagtggtttggttcttactttggctggagttttcaaagtatgtcaatctcgttctttggatgcatagtgtctaattatccggaccgctatactcggcttctaatctttattgtcgctccttcgttttgcaaccttcaggatattctcctcatctcgtcgtcctctttgatcttcggaaccgttgtcatgcctctccagatcttcggatacgccattgctttgggtggacttatgctcttcaagctgtctggcgcgaaatgagcggatcctgtctttcaagagcaagaccgactttagatacacatgctcttgtccccttttcttaatatctctgtctttctcactcatcaatcaggatgttgttttcataaggatagaaaaagaggggcgctaaagtacatccgattcttttgatgcctctctttctggttttctgtcttttcctcctttcgtcttgtctcaacttatactcagacattttcgtttcggttcatctcgatctattgactcttttcgggttctgtttaactactctctatctcttggttctatctcatctggttccgcattttctagactgtcctcttcctttccgtaaatcactcacattttttatctctcttcttcttccatgtcgttcttcctcgccagtgatcgaagttgccctcgaactgcattcttcttccttcttgtttcgatctcatatcttttctctccgtagttctcaaaagtcgtcctggtcgacaagtagaggacgattgatctttccatttatttatgagtggacaagtttttgttcttgctttcatacttgatcaagagatctattttgtctagttttcagaaactgaaacggagagggaacgagtcttttggcagattgtaattcttggtcgtcatgtcctccaacagttttctggacatggctctgcaagaccagtgactgctttgttcgagtcttcgaatctatcttcgtcttgactgctgttctgctgtgttttattatgttcatcataacgatgaacaatcaagtaaaacaactacctctgtagctacatcggtatctttatctacctgtgatgacgcataaatcagcctccctcatggctatcatacaatacagcaagaccgagggctcatacacatgcacactttcttctatatcgataggaagacagcagtagacgaattcacattctgataaggtatcatctcattcttctcttcgttcatcgtcatctttgtgatcctctatctcaacctctccgtcgatctccgacgcaaaaagtccaaactcctcttcgcctttcaatccatggagtcccgttcctcccgtccgattggcagagaaccagacccggcgaagtcgacagttggcgtatactttgacgtatgtccagctcgatccccgaggattttgaccggacggaaggatcggagcttggacgtgggagtgttgggcttgaggccgagtccgggtatgagaggacgaagttgagggtgcggagagcgaagaagtaaacattgacaacctgtgtttttccgtcagagagcacgtagaagagtagaaaagaaagtgagatgatcggttttagaagcaggacatcaaggttgatgaacagtcatcattctcatcaacgaagaagagagaaaggaagaaaatcgaacacgaacagggtaggaagatgaaatataatgtgtgtccatgctgttagtatgggcaccgttcctgacgtagagccggatatcaacgacgtagggagtggaggaaggtgaaggggaaggagtaatagtgccggctgggttgatgagaatgacaaatgaggttcgttctgcgggatcaggtattcatcggacaagatcgagaagaaaagagaaagatgagtaccccggaaacagtgttaatgagagaagaggaaacaaaagacagcacgggaagaaacaattgataagagattcaacaaattatccgacgagatcaaagagggcgatctcagagatcttggttagatagatcaagcgacaaagataggatcggcaggagagaacatggagaagtttggtttcgaaacattgtcatggtatacacaaatacgttcgatttatagcaaccatggacgccaacgatgataacgaaaacgtctagtttccagaaaaacatcaacgcgaaaacaaaaattgaaacaggcctcaccgtgaaggtactagctctgacgatacccttgatcccccttccatcaaccacgccaaactcaacggccaactctctccttcccagaggcctcagttgaaggtgcgcccattccaaaccgatcccgagatcgagacctgatgatttagcgggacagcgcagatatgtcgtgcggatcgttggactctgtaaatgaatgaccggatgaacgatctgtttcccaggccgatcaccatttggttgatggatcagcgtacaactcggattcaacggggttaccgggatagaggacgcgtcggattttagaggagcgataagagaatcttcaggaagagcaagatctgtgcgtgcctcccaatgtggagaagggtaagtagatgacgaaaagagagaaatcaatgggattgacgagagagaggatggaggaaagagcaagggcatattgagcgtggatggttgaatggatagaagaagagcaagtagaaaagattgtcgtctttataatagaagcggcttgtatcagatctcagaaaagactacaagaaaaaatattagtctaatctcgcgccgtcactgctgctgctgcctcgtccagagatgcctttggtccagagaaagagatggtcgctgacgaagaaaaggacaagagacctttctgatctcgcttttgcatcactcgggcagagacagaacgagacgatggatgatggatgatggatgatggatgatggatgatggatgatggacgatagctgttcaatgctggtcgacgctggattgaatgagatgcacgtgacgcaaagcgtctacgtgtaacctcgttttcccatctaaccgtgactggagaaaactctgtccctatacttccacatcacactcaacgttcatatagtacaccatctcttgttgcttcattgttttttttagtttcttcttcaccgtccagagataatgtcagaccctctagcacccgccaaggagatcgttcctccggccaaagatgaaaccaagggctccactccatccgccatcacgcccgctgagcccaaaccgaaggcacccttgacgatcaagcaggagctcgagacaaacctggacttgctcgatcgaggagtcagttcgtttgagcccaggtatctggctagagttcttagaactttgacgacactgagaaagaagttgggcgggccaaaaggagacggcttgaaggcattgaaggaggtcctggttgaaagttatccgaagagttcgttatttgctttctcttttctgtctcattcgatagcaaccggctcttgtttctatccagacaatgagaccgccgtgatggtctgagaaagtatgatgaggaaacctgttggtcaagatctagttgaagatgaaaattacatcgccttcatagaagggatcatcaacaaggagatggagacagggattgtcatcaatcgagccttcggccgtttcctcgtccttgaaactgaataactcgcctatattttggttcacaggtagttcaacggcgtctagtctcgcctctatccttcctgaagctcccgcctcggaagagtcgatggatatcgatgcctcatcagcccccgctgagcctgctagttcatcgtcggccaccgtggctgcttcgagcaaggagaaggaagtgacagaaatactacccgaagcggacgtttatcttcgattgttggtcacgctagttctgattgacaccaaggcgttggacaaggttcgtgtcatgtcaatgaacaagaatagcaaaactccgccactaaccacaagtggtgtttgatgaatgttgacatcataggcagaaaaagtggctcatgagacagttgatttgattcagagtctgaatcgtcggtcactcgatcacctttctgccaaggtctacttctatctcggtcgaatctacgagctccaatctaaggaagccgagctccgacctcttttcttgcaagctcaccgaaacgctactctccgacgtgacgaagatcttcaatccacacttatcaacctactactccgaaactactttgcccacaatttgttagatcaggcagataagctggtcagtaagagtgtgttcccagaaagcgcaggcaacgctcaattggctcgatacttgtattatcttggcaagtccaattttttctcctgattctgacctggtcgacatgtatttgagatctaaccgaagaagggtctgatgtatacacgcgcaaaccgcgttgtaggccgaatcaaggctgttcaactcaactacacagaggcccacgctcatctacagcaggctattcgacgagccccctcggctcatatcgcccctgggttccttcagactgtgtgttccttctctgctttacatgctgtctcttgccgtactatgccactcatcatcatgatattcgatctacccgtctttgctaggcctacaagttcttcattgtggtagatctgctgatgggaaacatcccagagcgatcaacattccgattacccgtgttaaagactgctttggtgccttatttccagatcgtccaaggtatatcttcgtcctttgcttcttgtggtaatcttgaacacttgaaacttgactgagtctctctgtaccaccaacattagctgtccgatcgggagacttgtccgctttccagaccgcgctatccacccactcggccacattccaacaagactcgacttcgactctcattcttcgcctccgacacaacgttcttaagacggctctccatcaaatctcattggcttatgcccggatatcgctacgagaaatctgtgtgaagcttcagttggacaacgagcaggacgcagaatatgttgtcaccaaggccgttagagatggggtgctaggtgccggggttggggtcgatcacgagaaaggatggatggtttgtggcaagacggaaggtgtgttggagagtggagagccgagaggagtattcgcgaagcgaatccagttttgcctagagttagtattttccttcaaactttttacttttgcatatcctcgaagatctgcttgtataacatcctgttgactcttgttctgccttctcttttcccccaaaagtcttcacaacgagtccgtcaaggcaatgcgtttcccgttgaacgctcaccgaaaagatcttgatcaaggagcagaggcaagggcacatgcgagagaactcgctcaggagattgccgagggagcggatgtcgatgaggatgacgagatggacttttgagtttttttcttccttgtccctcccttttttcgcattataggttatcgctcttcccatttccttgtatccatgtttatcctacctcacatcctagccaaacgagtctttaagacaagagaaagtagactgaaacaaaatcaagtgcatattatgatgaatgacttggtttttagatgaagagtaaactattccttctcagcccattctgtagaaacagactacctcgcccggtttttcgggttgacctcctcatgcttcaccatatgcaacctcaccctggtctgagtgctcggagtgtttccgccatgacctttaccccagtcgtaggagataccggctgctaggattgaatgggaactgttgaaagaaagggagacgatgggtgtcgcttgagaaggaggagtaggcaccgttgggttttgggagagggatgctgcgtcgagtgctatggagaagcgaatagaggggaggggagagggtcagaatcgaaggggatgttgatatgcgggcatggttcagtcgtaaggatgaaatatgaaacgaaacccactcttcaatttcgacctgttctcatgatcccagaaagtgattcgcccatcagaaccagcagtagcgaatgtgcctagggttctatgaaacgccatcgcgttgacacctgttatttaagagagcataagatcagttccatgtttcggagaaggtaagagaaagaagggcgatgaagactgactgtgaacggcgacctgttcaccagccttaggagcgtccggcaatcgatgacacttgaacgaaaagtttttcgacgacgcatccttgtccatgtgtctttacgaaaacaaaggaagagaagaggaagagcataggaacagtcagcattctgttcgttaattatccttctctacacgcgcgcgcgttcatcgatcaggaaaggagaggagaacggaacgtactggatggcgactctgccttctatacttcctaccgcgaaccctttggcagtggggaagcaggagactactcttgtctgatgttttagtggactctcttgactctggaaaattggagtggcaggagggaggattgggtgatgataattttaatataagatactgcagtaaaaagaaaattttgaacagagcagacaatcgagaacacaccttgaagatcactcccggattgttgagatcgaagatttggatagatttgttggcacaaccgacaaccatcaacggatggacgacatctagcgtgctgtaggagtaattatttcaaaggaaggcaataagaaatctgatgagaatggaaaatgaagacgaggcggttggcttctttttatgtcacttactaaaccttatcgggtagcgtcacagtagacacagggtttgctgtaaaggttgtttccggttagatcgaacgaatcatcagtttaggagagctttctcgaaaccagataaggcctcataaagagtgaaagaagagaaggacgtacgtgttcttagatcccagtactgcaaacagaagagccacctttgtcagcttgacacgtccgttgtaaaggagcgattaagtatgagatacaactgaccttcaacgtcttatcccaactaccggtgaccaagaagccactgccattcgcctgaggcacgtatctgcaagatctgatgggagcatcgtgggcggcgacttgagctgtttaaagcgccccaaaacccaggccaaagaaatgagatgatgagctcgaattctttcgagatagcaactgagatgctagtgacaccaactgacagctttgtccagttgctagatcgtacatcctcgctgctttgtctgccccacagcttatcacttttgatccatcctaagaatgcattcattcgagagcaccaagacagacacgtgagagtcagcaggaaagcgcttgagtagtcatgtatgaggcagaagccgtttcttacaggtacccaacaaagatccatgaccgggccctcatgcttgtactctgccttgccctgggattgaccttgagcattagtctcgtatagccgaacctgttcgtttcccaaggggattgcaagcgaaaggcaaacatttatgttgttactcagccaagaagtgaatgaagagatcattgatgatcgaatgaggccagaaacaagaggaaggagacatagggatgaagagaaggtgaaacaggcgagcgttccgtttgaaagtgcgtctagaggcaggctatggataggttggaccacaaggatgaacataactcacggtcgaatcccaacttgaaacggccaggatatcggctgtcggactgaacgaaacggccgagacagagtccgaaggtgggttaacgagatctgaatcgggaggagtcgaccctgcactagataagacgagagccattgagagaaagaggaatatatgaagtagagaagagagaaagtagaggattgaaagagactgaggtctctggatgagttgagtctgatggacgatagacaagatgaacttggaaggcgtaaaaaagccggctagattatttttttactatagaattccctaatgatttttgaaatatcgatcaggccgttttgtattgaccagagaagacaacaagttttctaatgaattctcatcttccctattgctcgaatagaagtcttatcttagtctcagcccgcccactcgttctccctgcactcgtccatctcgctttgatcattcagatgaagtcagtacatagtccttccatctcctcattcttatactatactgacctcttgaagaatctttctcacccatagtgttgtacgagagatcaaccaaatcaaccaaaaagagctcgaacgaggtggagcgggctcttggcacgatgactacaaaggtccgttgccttgggttctgaacctctttctgctaagatactgatccctcaacgcatctgctttattttgactttagactcggcttacatctttgttggaggcctgccattcgaaatgaccgaaggcgatgtcatcaccgtcttctcacagtacggggagatcgccgacgtgaatctgcccaaggacaaggtacgttccatcgccctcattctcagcccagttctcctcatacaatgttgcttcttcctcttgtctttgctcaagctgtctctcttgaaaatgcgcccaacaggacaagggtacatctcgtggatttgcgttcgtcatgtatgttgatcaacgatccaccgttcttgcagtagacaacctgaacggatccaaagttgctggtcggactctccgggtgagtagtctcattgtcttgtgccccatgatgtctcgtgctcatcacaattacacttgaatcaggtcgaccatacgaaaggatacactcagccaaaggtgcgaaatgacgaaacgggtgagatggaggacgctgaggagcaaagtatgaatgccatgccagctctcgttggtgaaccctctgtcgcaagagtcggagtcggcgctggtgacgtgaatgaagacgatgtggatatggaagacccaatggcaaactacatcctcgaggaaagggtgtgttctctctttttttttgtctgcccatctctgtctaattcgcacctctgactgcgtaccttcatgtctacgtattttcatttgggcttgttcgttttgggtatatctgttatagcgtcgagaagctttggagggttcattatcatcgagcaagaaagacaagccatccaagcatcaccatcgatccaaggaggaaaaggctgagaagaaagaacgtaagagggaaaaggagctcgcgaaagaagccaagaagcaacaacgagcaggctcctcttcgttaacccacaaatattctccatccagatcgcctgtatccgctccgtcctcgagattgacctatcaccgcgacgacgatcgcgatcgcgatgtgagacgaccggtgcacacactcgccactcggactagaagggattcgcgttcgcccgtatcctcaaggcgcgttagctcaagatctcctctccctcagtcgccgccaccaagaagaagagacgaccgatcttctcacccttattctcgagactatagggacagagagcgagacagagatagagtgagagacgaggagaggagaggaagcaggctcgaacgagacagggaacggagtaggtacgacgacggggacaacgcgagatcgagagaaactcatgatagacgccgagagagggatgacgacagatcacaaggaggatacagaaacagaggctatccatgaacagacttccagactctctatcttgccaatcatcttgatggtgtccattcattgtccaatcttgagagctgaccgtccctccgaagccagggttgactgacagctttctctaatcttcatcggtgtcgacacgatttcgattgacgggatcatcctacgtagccgttaacagccatctctacttgatctcgtttccattttaaatcgatccgaccgtacgatgtcgttgcctccctcacctgatagaacatctcatgcgataagccggtcgacgaaagacattgctcgaatcagagggacgtacgtagcgacttgttcttcctcttgtctttattccatttatatactaccttgacaaggcctgacatcactcgttcatctatcttgtttgatatcttgttcttcatctcttctgtcaaatccagattaggaggttcgaataatctttattccgttcatccggctgttcggaacacacagagatgactatatgcgcgttgtctcttacctgtcttccaaaattgaacaaacagatactgtatacctaatcgaaagcttcaccgaatcactcaaccagaccgccagagacaaccgactgcaaagagaccaagtaaaggaactgatcggtagttggagacaagaaatgaatactgtctgtcagtcgacaaacgcgacaggtaagtgtatctttcaatacaggcctttctgaaatggggtttccgttcaagcctgctgaaattgttcctatgtgaacgaacgaagagcagctaagtcaatggaaactttggaggataaaactcgtcaaacaaacgagagattgctcgccatagagtctagtatggctagattacaggccgtcagttcgatctcaggcctagtattctctgtataagacaactgtgagctgacagattatctagaactacacagtcacaagaagaacttcaaaaatccttaaatagccaagtggatcaactccatttaacatcaactgctcttcaagcgattgtctctcgtctctcgtctccttcagtttcttctcctgcgcctctgcacagggaaacaggatcatttccgccatcgcttcctccagtacatgtacatatacctatggatacgatctgcgacaaattgagcagtcagctggaacgactctatgcacatccatcctcaactttttcatcggcgtttctaacaccgactccggcaatctcttcccatgaccagtcttttccggctggggttgttcgaccgctcaaacggcctagtctgagggacgatcctcctatctctgtctctgcatctgtcttggaatcgagattcctaagtaggaaacgtgtccgaggagattcagcggaggtcgagattgcacctgaaccgagaaacaatgtcaactcggtggatccaggctctccacctcaaacagagaacctgtcgagaactatggtcgacatccctgtatcagccgattataaaccctcgtccagccaaccaccgatctataccaataccgatgtcgataacgacgttgatgttgacgtcgttcctccatcggacgatgaaatggagcctaagattcaagatgaagtcgaagtggaagggtccattgaacagccacgttgcgtttctccaagtttgacagccccaagtattgatccaactaacaaagtagacgatggctcaggtgggatagattactctcaacggctgcagctgcagcgacaacagcatcaccagcaggatgtgaagaaggagataacagaaccgactatgcgaagagatgatgtgtttgtcgagagaaggaaggagccacgggaaacaagacctaacaaacgaacactgctgcaacccttatcctcttcgaccgatacggcccacactgatcttcacccgtccgagacggaagatgaaggagatgaaggagaaggatacgaagaagaatttgatttagagtttgatgtatgagacgttgcttttttgttgatgatcggtcggttaatcttcgtatatatgtctttgcaggatactaaagtgggtctacttggtctggtcgatgtacaaatagaagcaacattggaagagggagattcagtcgtatacattgtcgaaccgaagctacatcaacatcaagtattttctatttttacattcaaaaatttcaccttccccctatatccttacgccaaacttcgacgggctagagtcgaggttatttccttgtgctcacacaaccacttagggaacgaaatctcttcgtcaaacattacatgacccgacttctgagtcaccatttttcgcagctccgttcgatgctcaatcaaaaaacctgcgaggacaactaacatcccgtctgttgaagaagaagcaattaagacacggccaggagatcagaaagctgggggaggaggaagaagtgaaggacaggtaaatacgttcaacatacatcgatagaggtagttgcaccctagctcgaatagcttggcctgcttgacgccaggaggagtagtctctgctttaagctatgaaagagcaacagaagagtttttcccaaacacaagacaaatattgtgagtgaccgaacatatgtctcgcaaattgatagattcagattgatatcgtgttaccttgtagtccatgacagcctttcgtaagttttgcacaccatccatctgatcgatcgctctatcggccagtgcctttgcttgtggtccccattgtaagaaagccactagagacaagatcatcttgtattcgcctagacggattgataaacagaagagtatcagttcaagctgaacatgtgaacacccaaccaagataagccaacggggaatacacaccattcaagtatggatctgtttgcctagattcagaggatctcgaatctttctccgccagagcgcggtctccgttcacgacagaagagatcaagcaagcggcaaccataccagtggttgtacgtcctcgtcccctggattttatgcataggaacaattagattgtgatttgaaacgagcctcaatgacttctatgggttggcaggcttacatctgacagttgaaaaccatgtcggatctaaccgtaagactatcaatcactcggtgtacaagagcatcaagggctgctggaagaggcgcttgttcatcggtctaagtagtgatacagatgagggcaaggatatatcagcactccgaatctcctctcttaagcgacaagcatcttactaacgatggcaactcgcgcatcttcaagcattatatcaagaggaacaaatcaatacaagaatcggatgccaggacaaatcgtcgctggaaaggagagtaactcacagttgaccataaatccttctctgcgcacttgctcgtagacgtctttaggagtcatgacatcctctttcttgacagtttcccaaattggaacgatctcaaatcctccctggccatcttccacttcgtcatgctttgaaacaggacaagaagatgttgtcaacacaaaagctttgagccgaaaggatcaaaattcagagaatgcttacaagcagtattcgaccatcctgacttcgtcggatttcatcaacaacatccttcttcaaggagacttccatagactctacgacgtcggtagtaatacctacttgatatagacacatcaatcagtctcgaatttagcccttgtatcagatattatagcgcatacctgtagctctgttgcaaaaagattacacacgatgggaaatgagtgagatagaacctgaatcaaaggaattgttaagatgaagtagactcactcaacattagtgagaggtcgggattccaaacgtagtacgtggggtcgtccggccacatagatgaccggttccctgtgaaagagtatacatattaatgtctaatgatgccaacggacgaacgaatgattatttagctgtttctttcagaaatttaaggtggcttactctcttagcgaagtccaggcaaccacctggctgcccttaggtccagcgtccatcttgtataatgcattcctcaatccatcaatactcggcatacccgtccccactgcatgcagcccatcatctaaccagccggtcagtttcttcgtctgctcacctccatcggctggaggcgcaaacgcgagtgtgagtggtacccgtctataattggccgctccttccactcgctcaggaagtgatagcttttgaaggttcttaaagaagtctgacttgaggatcgtgagcgcagacagaatgattcctgttcggtttgccaccgcagtttgaacttcatccgaggttgccaacccatcagcaggaaccagtcgggtgaccggagcaagcgattcgaggccaccctctttgagctccttctcaaacgtgctgaatactggccgcttgctgacaaaggactcgaacgactctaattgttcaaaggtatctggatgggtttcttctaagtatgcttggtactgttcatgtaaatacccgatcagatgagcatatataaatatctgttctttgatctccattgagtcagagtggatatcgataaggtttactcacaagcacaagctggaagtaacgtcgcaaatggtaaactccctgctgtgtatacttgtttcgaagctctgctgatgtcgcctccgttgccttggaccgtgcgtcctcgatacagtctcgtaagttgatgttctgaccagctttatcgatggcttcgtccacggcctaattattacaatcctgatcagcatttcaaacaggatgttggcgactgggaacagacttaccaatttgacttctagtccatttcggacaactcgaagcaggctattgatgacctgccacgacatagccttactcgccttattcgtaggtagtacagatgccgctcgagaggtagttcgtcctcgaggagaatgttgtcgaattggacgagatcgtcgcacgatcgattcaccttggaccacagcgtcctcttcttcggcctgaggaacatccaagttatgaccgtcggaggaggagttggctcggtgtttctcaagccattctttggtaagcaaaattataactgatgaaatagttgactgtgtagatgaaatggatccagggatattaaataggtaaatatccggtgagaagggcgatccctgatggtaagaatagatgataaacatacccttcctcggcctagttgatcgtttagtacaatagcggtttcttccagatccgttcggaggacgagctgggttaaagtactgatatcagcaaaatcgagaggttgctcagacgctgtgataaaacatgagtagaaaagacatcagatactagagccaatacaagacaaccgaattgacgtcagtaatcgagaacctactaagcggaagtcttttaaaagtaagctgtagctgtgattgtgaatgatccttctcttccatgatctcccgaacggatgcgatagatccctcgtcacagtcatcccagacgggaaccacagatccatcagaagtctcagaatgtaggagtaagctaaagcagataatggcatatgatgagcgggaggccagaaagatgcatgaagcaaggacaatgtcgactaacctgccctcaaataccttcaactctgtctcaacatcactttttagtctgtcttccaaagcttcaagtctggacgccgaaacaccagagtaatcctatcgtaatatggtgatcagtaagtcagacgaagtttttcaagcaggaagaacgagacttgtgtaccttcatattacgaagtgataaactctcttttcgaagacagaaggggtggccgttgatgtactatggtggacaagacatagtaagtcccagaacagaaacaagcatcgcatcaacagagcttatacttactaccagaggctcttctctcaagttcacccacaaaagtgatttgacgttaggcgtacgctccttgatggagctaagaaccttgtctactgcatcctctgtaggttgtcccacacttgagtccaagagatacacacatcgaatgatcaaggaatggaggtaagaaatactttgctatggtcagggatatcaagagaactcacgcgtagatgtttgagcctggaatattacggaaaccagccgctccgcggatgatccaatcatttgcagagtttgctgtttgggagaaccactgatcagatttgagaagtgtcctggagcaccaaaccaaaccgaaaaatactgggtcaatataaatagatgcatgagcaatgctgatcggagacatggaaagcccaccctgctcgtagaatgattccagatcgttgagcgacaacatgctcagcccactggaagagcaaccttcgtcagtacgtgctcagacacaactgagtcatcgcttgagtaaaattccatacctcaatttccataagttttccgccatcaggttcaggatttcggttggaagccctagaaacaatggaaagatccgtgactggagcaaagataaacaaccgagagccagttttgtgtccttttcgcaagaacatgatttggctgacaaatcaaagacaacgttaactcatgacctaacaatcgaaattaagttggtcacgttaaacgcacttccagatctccgatcggttctatattaacgtagtcgaggaacagaataaatcagccagacctttttgtatgagtgaggtgcgtttacttacccttagccaatgcgcaaactttccatttaatccatccgaatcttctataaaagctgcgaaggaaatcatgaagaaatacttctctagggcctgagatgctttatccagcatagtcttctcagtttcaagaaaatcaatgagaacaggtgggacataaacgtgtcagtggtgccgggaccgacgaaggttcactataattcgggaataaaggaacgaacctgtctcattcggtcctcgagctccaaagaagctttgatccggtactcgatgatctcctctcttaagtttgtgaccgcatcgcctgataataatgaccaaatgtgcgcacaaaacaaaacattcagactcaatcgtttgttcgatcgaattaactgagtagacaaagttaacgattcaaaggacttacaggcatcgattactgagtcgaccagattttttactcctcttccaccttccagacagcctagcaatgagaggatgacctgataggagcccatatgggccgaccggagtgaatccaacaaggccggtctttcagaaagcaaatcagcggctgatccatttcgccggttgatcaatgctgtattatacgtgagagggtgaaggaagaaattcgaaatggcatcataagattaagaataacgccgtagcatgtgagcgacagacaagggatgacttgcctgaatcgagcattcttgtcaacttgagcaaacttcgatttaacgcgtgttgtgcggccgctgattcgataatcctaccagcctgagagactggattctgtagttataaaatgatggaccataagcgcgctgcacaacaggcgatactaacactgcctctcacggccaaaacggaggagaatcaagtgtaaagagagagaaaccacatacagagacagtcgagatggttggaatcgtgcctgaagatgaatgtgtgggactcatcaacgttggagtcttctttccattcgaaggagtgaaggttccagagggctgaactgcgaaatcgtctgcatgtcctaacctaagcatctggtgtcttcgaatcagcacagcggccgtcatggcaaaagtcgttcggacgacccccttaagattacaggcatcacttcgttagaagattcggaatttctgatatgaaaaataaggaaaagaaaagcgaactaaccatgccacagttgatgaccacagatgagttcattgggtccagtccttgaagaacccctaaataggcatccagataattgtcttcaatcggacgttcaggcgagataggaatccttgtgaatcgtcccccagaacaacgttttatttagtaagcctctgatataaagataaagtatatgctgctattatagaaagacatgagctcaccgatgataatctactttccagccctgcttgttgaagtcttcataaatttccttggctgtctggacaccagcttcatccacttgaatccagacgggtagaacttcaccctccctatcagctgtctcttggtgagtcaagatcattcctccatatttcaccgcttccttaagtacatctttcttcagtcggttctcgacaccctccaatgtctgagccgatcctccatagggaagtgttcgaaggggagatgatgaatctcgaagaacgaacggtctgccagagatatacagtataggttcttccctggttgagagcgatactgttgtttgttggctggaagtttgcggagacgattgaagaatagaaagtatagtcttcagcccgggtactgtcggctgggcgacgccatacacgttgtagtttgaccccttatttgaaagacctctgaagtttggagctccaattaagttgatgtccaggtccatctgaaattttatattgatgccccaaaaaacgcggttattgattagtttcaggttagtagcgccttatggttaagacaatactgaccgctctcccagttgggtagtgatccgtcttgagtataaatctagtataggtacaaaagaggttatatctgtcatcgcattctgagaacttttgtttgtaattggaagaaaaccataccctcgagccaaaacacctccatctcttcgtctgacaactccaggaagactcttcagtagatgggcgggtgagcctaggggaggattaggagttggtccggctggaattgccattttgaatagcacagtttcgggctttgagtttgattttcgatcaagttccatcgcacaaaaggaatcagtacaaatgtcggttcaaacgacgaaccgaggaatcagatcagacacgaacgtatacacgagaaacgatgagaagaaggagaagaaggagaagaagacagtgagagattgataagttgatagatgatggtgatggcgctggcaatgtccaaagaaacatgtccgatcaaagtcggataacttttggcttagtcagcccgatatgtatggagataagacacaagtgctttccactccgccatcaatgatgcgttctgatcttgctacaacaaggggataggatacacccgtcaacagctgttggaatatcattacatagacgagcatacaatgacagctccttgaaaacaaaggcccggtatggtacaatacaaacctgatcaaaacaggaaacatgacgaggaggccaaaacatagctccctcgtgcgggtatcgaacagctacaaaaattcttgccttatcggcttgaaagacagaacaacgagaagaaagagagacaaagaatagacaactgattgtagtacagaaaggaggcaactagtggaacatgacaggtgcccgcttcttcttctcgacatgaacgacctcgcccttttcgttcttgatcgtctcttcggataggtgcgcaggaggcacccactttgtcgagttccacggcttgacgcccgactgccacatagcatcgacctcttcgagggaaagtcccttggtctcgggaaccatgaagtagacgtagaatgttccgaaaatcaatactccggtaaataccaacaagatcagaggaccgatttgtgcggcaatcttgggagagaagtaggagagcataaagttccagaaccagttactggcggttccgagagcaatagccttaggtcgtactcgaagagggaaggattctccaaggtatacccaaggagtaggtccccagagaagggagaagagcatgatgtgaagcacagcgaaggcaatcagaacaccacctccggcccggtttttggaagtgagcgccgctccaggatcagcagcagtgaagtgaccagcaagacctgaaggtggatgaacaattccgaagttaaacatacacatctgccacgaataagatttctactatcgtactcaccagcgatcaaggcgcaggaagcttcaaggacagctccccaaagcaacatctttcttcgtcccattctaacaacgaaacaagaccaagaaaaagttatagtatgtgagtcatggagtgaagggaggggcagaaggcttgatggttcgatgtaactaacctgtcgatcaaccagagagaagggaaagtagcaatcaaactgacagcacctagaatgagctgaatttgatacgagtcgagttccgttccagagtttttgaagaaagtaggtccatctatagaaataaagagaaatcccgggcgggttcgagcaaaacccataatgttctcagttttgacgtgcggcaatgagaccaaatcagatagttacaaggaacgtacagtagtagtagaagttttgaccgttcaactgttgaatgaactgaagcatgataccattgagagttcgcttccaaaggacgtttcgggtggaaaagcactcaagccaagtggcctttcctccctcgttctcctcggcaagaccgtagttcaaatcgtcgatctcctcttgaacggtaggatcatcgatgctgcagttgttgagcaaggagatagcctttcgggcttcctcctctctgccctttccgagaagaagacgctgaacagagacgaatggaagtctaagaacaaagcaagtgactggtctcattgaaacatcagggtaggctactcacaggcgactcgggtaagaacaatattcctccacagaggatgagaccaaagaggagctgtagaccaacaggtacacgccaagcggcactgccaggaaccttgtggacggcgtagactagaatatacgagataaagattccggtaatgatttgaacctggtagaataccaagagaaatcctcggagagcctttggagccgcctctccgttgtagagaggaacaatggcagacatggctccgactccgagaccggcaacgaatcgaccgacggtgatctgaacaagagaacactcagagccagtctggatagcgactccaacagtgaagatagccgaccatataaaaatggatcctttctgatagatcaaacgaggaagcgaaaatagaattcagttggatgagttgagaaaaagtctgaagatacggtttgaggcttactcgtccaaatcgatcggacgtaaatgcctgagataaagctccgaagaaggtaccagctgataagagagaggtgatgatagattgcctattagcacttaggaaatatgtgccggttccgtcgtcttctccgaatcgcataatgaaatcaggctgaatgagcaacccagcaagtactccgatatcgtaaccgaaaaggaaacctgagaaggtgggcagtaggtcacgaataagcatcatggtcttgacagatcgagaggacgtcagcgatatgaacaagaagaaaagacaaacctccgaatgctacgaagagacagaacacgaccacccgcttgttggccatgaggtttaagggagccatggtgaagaaccttcaactatttagtccagctccttttcgaggagagggggaaaggcaaatatcgattgaaagacgagagattgattcggttcttttcgttgtgttgtagacgatgatggttctgaagggaatgagaatgaaaagaaacaaaaggccgccgagagcaagatgagagcccggttatataggagggcacggacgtgaacatcggtcggttaggatgggtgtagatcctacgtagagatcccaaatggggactgacgcccggtaaacgactctcacctgtccgtccatccgaaagaaagagagcggtctaagaaactgccctcgctcgtatgtatttccacatggtcgcctcacctcggctctactatattttcatcctctctttctacgcacgatattcatctgtcagttcctccactcagagcgaatcgacccaagaagagcatggttaaggcggagaggatcaggatcgaataaagattttggcacgtccgcggcttccgtcgaacccgtgtgcggatgtgagtatttcgacaattgttctttccataaagggtaatatcacactaaatctgatagtttactatgacgatttttgtgtaattaaaaataccgacagtaagaatacaaagaattggctttcgattctaaggaaatagtaggtacttcaggattcatattttatctatttccccatttggaacgaaatgtccgagcggacggaacagaacaggggtaagtgtggaaagtgataggttaaaatagggacgacccttgacaaccgaaagccatagccgatgtcagccgaccttaggatccttattttgagcatagaacagcatagatcgacggaccgaggacgcgcagtaggttatttgttggtccgttcaattggattctttcccgtccaagtttcgatacagaagtatgctcattcatcatgttcccctcaacggacgaagatagttggatagaaagaaaggggtataacttttgtacaaaatctacaacaaactacgcagccggacccaaaatcgactgcaacgatcctccacctgattatccatctacacgcccgaacgtaatctcatcagtacatcgcccactaacccagccacgtcgcccgctctttgagcttcagttacaagctcggatatatccatatccgagttgacgagctgtttccaaacagagttgaaactgaacatgatcagaacgtgtagaataatgcatttcggcactagcttcaacgtcgtgcagaaataaaagagggatcgagtctttatactcaccgtaccgtctaacagggccccattcgtccctggctggaagatcaacacgagcgtgattgtttcttccttgacgacttcggatatctgtccaccacgtcctcgatgattgattccgccactaacgccgctggtatttgatgaggatagcagaggtatgctataagtcagattcagctcattcttcccattcggaccagtcccaggggtgattgattgaaggcagagtaaatccttgtgtgttgtcaactgggtagagtacctgtaaaacagcgcggacgtaaacgaatatagctatcaaatggccgaacaagaacagagtgcacagaaacaatagatatgaagacgcaggaaaggaatgcgaaccattggcaaatgttctccactcgaagagattccccgtcttctgtcagccgagaggtctgcgccgtcttgactctagcttcatccttctttcgttcaggctccaatcgatcgaccttgagtttttcgtgatatcatgtcaactgaatgctctagtcttccttcttgtttctagcaaatacaaaatgggaaaggaagaaaaggacggagaatactcacctccttcatcaaattggctacctcccgtttagcctcttcaacgttccgcacctgggcatcgccatcatccgcaatcatctgcatagcgataatttgattatctaaaatctcattcgcctcgtcgatcgtcattctctgtcatattgccggtcaaaagaacacgcttatcaacatataacgaaacaacttttggagagagggtagaaagaatagaaaaatagatcacaacggaggaagtaaaatagaggaagattgagacgcacgtcaactagcggaacagactgtcgaagtcgagaaagctcgagctcaatctctctaatttcctttgaaaagtgctctgcctgttgaatgtcttgagtgagctgatcgtggtcttgattatcgaaagagacggatcagtaagtgaggtaatttgactcatataaaaaaggaagtcagataagagcgaaccgctagaaacctcatctgctactttgatcagctcctctttcagctgatccagttctgtttttgctcttttgagcttttcttttgagcgacggttttcttcagctgatcacagatccaatttttggcgtccgagtgttacatcagccaatggaggatctatcacgcgcttatcggttttaaagagacaattgaacgaaagctaagacaaaccaagcttatcgttctctgcttcatcaatttgaagaggctcctctgcaagcatcaattttaagaatgtttcctttgattcctgttcaatgtacttgaacttgatctttttgaagaattcctgttttgccatcgaatatgatcagggtttaacatgaatgagacatcagccatcccaacattttcctctcgtaaagattctaaagaagagtttccaaaacttacaatcgaagcggcaatctcttcgccaatcaatgtcggattgcccgggtcaatagccatagcggagtctgagaacgcgacggtagcatcagctgaagcgaccgtatagaatcggtccttcatacccgcgatagcgaatggagtctggtggaacgccgtgaacactctaagccattcgagccgggaaggtcaggataaagtaagtccgtttggaatcaaatagttcattcggcataaacgagatcactcgtactgttgagcagcctgctgtggatctgcggacgacattattgacgacaaggggtaggtatgattgaaggttgtattgaacacgatcgggggaacgtaaagacgagcgcgcgacgcgtctacttcccaagtagcttatgtaatcatagagacaatgagcttaagcacatgccaaagggaaagaaaatgcgcttctcagctttacgttcccttctctatatcaaacctccttttccatctttcttggtagattcatgttgtgctgttttcacactagcgctcgtgaatttagatgcatgttcttttgtttccattctggttgtcgacatcttgagctcggcgtaaccggatcgtaactaataaagaaaatctttcccagggattgatgacaaagcattgaatccaacggagtttcaatggcccactcgaaatttcacgatttctaggcatcatctcgccgccactcttccggttccaaagctatccaagaccattcctctttgcttcctttgcctcctcttcaaaaatggagtacacccctcagacggtagcacactatgtgctttgtgcagattgtggtatgtgttggcatgaattcggcatttattcgtgtcttatgaggcatccttcgccctcgcgaagcttgggatgtggttaacaaaagctgacatgtctgcatcctctttctttgctatgacttcgtaggaacaccaattgagcccaactcgggtatgtacatgaatacgtttcaacttctttgaatattcgatacaacagttggaatgtttaatccttatcatgaaacgtttgttcgacagccaacttgtgtatctcatgtcttcgaaatacgttagtctactttcctcctctcttcctctttacaaaatgataggcaagctttcgcttacaatatcaatctggcgtttatctcaacaagggttgacatcactgagggaatccccaaacagtcatccatcaacttctgccgaaattgttcaagataccttgctcctccccagagttgggtgtcgtgcgagttggagagcagagagttactcagtatttgtctgcgaaagctgaaggtttgtctgtttgtcaatttttcctcagggatctagtttctatcatcagtcggaaggtccactgacaataacctgttctgcttcttaatcgtttctttgtagggtttggtcaaagttcgcttaatagatgctgcgtttgtctggaccgagcctcacagtaaacgtatccgagtgaagctcactatccagaaagaggtaggtcgatgacagttgccgtggtatgtccgaaaaagagcaaacgttgaacttcattcgggttcctcttgttcttctaggtcttcacctcgacgatcctccaacagatttttgaggttgagtacgttgtctctcatggtcaatgtccagactgtactaggttggcggcgaagaacatgtggaaggcttcggtgcaggtccgacagaaggtgaaccataagcgaactttcttgtatcttgagcagttgattctcaaacacaatgcccacaaggataccgtaagtgccatcttgtcttttcttctgacgtttatgtgagcgcgcgcccccgcatgttaaatcaactctttgtttgctcctcttctcattacttttccgaaacaaacagatcagtatcaaggaggccaaggacggattggatttcatgtacatccaacgaagtcactctatcaagatgtgcgagttcttggctgccgttgctcctgtcagagtcaagagttccgagcaactgctgtcgaccgacacccactctggaacgtcttcatataagtttacgtactctgtagagattgcgccgatatgtaaagacgacctgatttgtttgaacacgaagctagcccggtcattgagtaacatcagtccgctgtcgatcgtgactcgaatttcaaactcgatccagatcttggatccggcgacgcttcaacagacggatatcccttcgaacgtctactggagggagccgttttcatctctgacgcaggtgaccgacctaatcgagttcttggtattggacgttgagccttccggtccggttcgaggaaagtacgtattggcagacgcacaggtgacattcgcaaacacgacgaccactcacacatctacggccgagggcggaggagatggaatctaccacacgcgaacccatttgggtgggatcctccagccgggagacactgttctcggatatttcctcgcccgagcaaactttaacgatgaagctttcgaacagttggacccttcaaggattccggacgtgattctggtaaagaagacgtacccgaacaggcgaaagaaaaaccgaacgaggaactggcgactcaagtcgattgcaatcgaggcggaggaggtgccatcgaccggagccgacaaggttcacggtcgaggtgcgatcggccgacggggtgggttggaccagcagagggtcgagaaggattacgagttgttccttcgagagttggaggaggatccagaacttcgagggacgatcaacctgttcaaggccgctcctgcagcttctgcggctgccgttcctgccgaaaccgacggtcagtctgtcgatgtggctatgggaggatcttcctctgcaggcagtggcctggctggtgggaagcgacgaggaggaaagaagacggctttctcgatggataccgaccaggtggcgacccctgctgctcctacgatgattgctggggaggagaacgaggacgaagaggacgaggaagatttcccagatgtcgacctcgacgaactgctcgatcactttgaggaactcgctatgagtgacgatggtgccgatccagaggttgccgctcatatcgaagaggagatcgaggcgtttgctaaggaagagtagatttgtgtgaatagatgaatgggcgtgtggacatgtctactttgttttatggtccatgtgcttttaaattcaccggacacgaagatatacctgaacaaaacagttcatcggcataacatcgtaaacgatgtattacatcatgggttgggtaaagaagaattatcgagctatagaaagaagaaaacagaacgaaaaggatataagagaatgaaacatatgcaacgtggtccaaccaatgcctaacacgcgcttctcgtctgctctgcctgcttctgcttccctctggatttccagacttctgctcagcttcctacttgtcaggcaacattggactctgttggaccgtcttttatcaaatttacaaaagtttaccggccgaaggaaagcgaaggagaagaagagagcgaggaagtacgaaacaatatctaaaaacacgaggggcctagacaaaatgaataacatttaaaatacagaagagcgcttgaagcacgccaatcgttgcgcttctttgtcttgatcgtcggatcggcacttgctcagacccttcggttactgcgcgattttgccttatgcaacgtttttttttctgatcaaattttcagccatcaccttccaagatttgatcagtcgttggcaataaatgctcgctccagcattgaatcctctcgatggcgtctttcatcgtcaatcagtcgaccgaaagagtccatccagattctttccttaaagacagtcgtctcgttcgagctgtcttcactcttttctctctttccttgatctcgtactttccttccttcttagtggctctattcatttagtcggctgctaccctctggcgcgcacatacagtttttccctctatcccttccctgcttcacttccttcttcacctcttcacataatgtcctctccggaccagacaaacgtcacaccgtcgtacttggcgaacaaggtggccgaatcggataaaacagaatcactcaagggatctactaaagacaagtcgacctacgacccctcgatcgcattggctcaagagagtacgttcctttctcctgactcttgcttcctagtttgggctatgtttggcgtcaaagaaattaattttttcttcgcttgctacccctctccctacctctttcagttgacagagatggagagtcatttgatgaggtccctcagtcgaacagacgaatcggaaccttctcagccgtcatgctcatttctaaccgaatcatcggttcgtcctatcctcttccgtctcacttcttttacctcgtctcgatgcgccgacgcctgataatgttttctatttctattttttccaacctttcataaccttctttgacctcaggaaccggaatttttgccacgcctggatcaattgtgtcctccactggatccattggacttgccctcatcttctgggttattggtgccttgattgccggatccggtttggccgtatatctcgagtggggtctggccatcccgagaagtggtggtgagaagaattatctcgagttctactacaggaggcctctctatttgatctcctgcatgtacgccatgtacgccgccctgctcggatggccttccggaaactctgtctacgccggagagatgcttctcaatgcggccgacaccgaacttggcagatggaaccagcgagcgatcggtgtgggtgtggttacattcggcctcatcattcacggatgtgctcccaagtggggaatcaggctccagaatgtgttgggtatcttcaaaatcggtgtcctcctcttcattgtctttgccggcttcgccgctctggctggccgggtccaagctggagcacccaacccgagtaacttcaagaacgcctttgctggctcgaagtctgatgccaactctttcgtctctgcgatgtacaacgtgatctggtcgttcgttggctacagtaactgcttttacagcatgtccgaaatcaagtctcccatcaagaccgtccgacgagccgccccgctcgccatcatcctcatcaccatcgtttaccttctcgtcaacattgctttctttgccgctgtccccaaggatgtgatccttacgtccaaccgacttcttgctgccgagttctttggccgaatgtttggtgataaggccaacaaggctgtcagtgtcctcattgcgctttctgccattggaaacgttctctccgttttgttctcacaaggtcgagtcaaccaggagcttggtcgagaaggcatctatcctttcgcaaagttctttgccagcaacaagcctttcaatgcacctctcgccggtctcgctcttcactgggctgtcacattaatcatcattcttgctcctcctggtggagatgcttactcgttcctcctgaacttgatctcgtacccgctcaacatcttcaacaccctcatttcattcggtttgctgatgatctacttccagaaggacaagcaccaatggaattcgcccttcagctgtactctccccgttgtcattttcttcttccttgccaacttgttcctcgtcatcgctcctcttgttcccccggcagctggaaatgagccctacaaatatttgccctactggttgcacgttgtcgtcggattcgggatcattggtgctggtatcgtgtactggatcgtctgggcaaacatcttgcctcgaattggtttgtcttttttacttctctgttctactgcctggaacgtagatcctaactccttgttctgtattctttccgacgatcgatgaaactcaggcggataccggttgggacgaattgaggttctaggagaggatggcctcaccaggaaggtctttgtgaaagaacgactggattaatttgcttttgttttctttcgctcttctctcttttatcttttctttcttgctctcttcttccattgtttgcatcgcttgacctttaaaatgaatggagagtgacattacacagatctttccttgtaccttcttacatctttcgttcgttatcatcgtcctcatcgaacacgtttcatatgctgggtatcgcc

SEQ ID NO: 2326 - DNA, 20419 bp, Xanthophyllomyces dendrorhous
cctttcaaactgcttgggcttttagaattacgcttttcctctattcctatatttctctttaaaatgattggtctccaatctataacgtcctccagtcttaattcaatatagttattagtttgttttctttccttacagagattatatgtatacaccattctcaataaccgggtttcttcgttctcttcaattgtcctttaaaatgaaccgtgccttgattgtcaagattaactagagagaacgattaagtctcgacttgaaattggcaaacaccttcaagctttcaaatgttgtttgggccggatcgacacctgatgaaacattgttcaagttttgttctatatgtcttattattgatttctcatgaatttattaactgccagatctcgaagtacgccttcaaataaccaaatccaatcacccgcatcgattgatcagtctatttgctcaacggaagaacctgaagagagatagaggaaaaaagggaataaagcaaaaagaagattagaagaacgtacagtgtattcatcaggagtcatcaactcttgatcttcttccgtcacttgtccgaacggtttcgcaactccatcgactgtaaacgccaagtaaatcccccagatacccgcgcagtcgcgatcatggcagttgataatagatttcacatcatggtatgaaggatgtgttaatttgagggaaggatgaaaacaagagatgaagatcagagaagctaaggaaataaagtacgagaggtggtatacgtaccagttactaaacgttcatctaagtccacctgcccacttccttctctctctgtcgcctgctcagaggcagctagaccctcttctccttctccttctccttctcctcctccaactgataactcgttgttcactattgactcgtattctgtgcgaattcgtttctgagcgctttcttcatctggatcgagggatgaggatctagcttcttggcgctgttggtatttagattaccacatccgtttattgtgtcaacgtagaaaacatgaattatcacagagaagaagaagaagaaaggagggacgtacacgcttagaagaggtttctgcagagtcttgatatgtaggttcggactcagcagagttggtctctccgttcgtcagtgtcggtgtggctccggaatgtaatttttggtagtagtcttccaaagcttaaaatagaaacgtccaatacatatgagagaacaagacgaaacatctcagcagtcccgcccaaaggtgttggtaagagagggaaaggaagattgattgggctaaccagtagtatgcttctcctcggccacttgactatcatctaacgtagaagctaggcctgccagtaacttctccctctctgcagcgtaagcaattccaagtgcggtctgttggccagacactgtcgaatatagatgccatgctggtagagagttttgtgacctggatatgtgaaatgaaaggattgtatgagatacgggagggttacgttgatgcatattcaagaggagaaaagggggcacatgcctttgttgagcggccatttgttcgcgctgcttagccaaccggtcttcgtctccatccgcttggatctgaacttggacattagagtcagccgcttctcttgatttcgcatgctcagctaaccacatcttgatgtcgaaacttgtttgtagcagaaagggaagggaagggggcatcaaaggaaattagtctcaagacggttgaacacacaacagagcaacgaacccacaagggaaacaccatctctgccgttttcctcagtccttcctgaatgtaagctgtttggctgttaaatctagccatcgcgtcttcctgtcccttgacagaatcagcatcctcgttgtcgactagctcaaacccacacacgtcacacaggaaatgtccttccggagagaaatttaaaggtacatccacaggaaggtatgtttttcggcaatttggacagatatatcccttgttctcttgctcctggattgagtggatatgaaagaaggtttgtagagagaaatggtaagtaatttggtgtatgaactcggatttcctctgaaagaaacccttcaacatactgatcgaagtttcttgtctaatgatttataaagagtgtccatcctccagcggacgacatccgaaaattccttaaactcgatccagtagtacgttctcactaacggacgagcatggggtagcagcggtccttctctgtgttcgtttcgagtgaaactatatccaagattatagattcaaattcccaaaaagaaaccaagattacattcaccctcaagatcaattgttcgttcagataccttctgtcctcttgttcactacaacagaagatgaaatattaagcagaaagaagaagacagacagcacaccttttgattaagcgatgagacagaaggatagctgctagcttggaaagttctttgacggctatcccacacatcgaggcgagctcatcctctctaattctatgattacccaattgaatgagaacagagagaatacaacagaacccctcattgatcagcctctaatctccttcttctggactcctctcccatatcataagatgattatgatcaaatcattttaacaaagagagaagagagaacgaacacttccttcttgatcaattgatctaacaggatgatcaccggtgcatcgtagaacgctctgctgaccgtctgaacaaagatcttcaatgttggcagatcctgatcctgatgtgttgagctcattggaaaaggattcggtgaatcaaggtatctccaatagatccaatcaaaatctaaggggtatgagaaagaaacaaggaataaagagagctcggtatgtaagtaatggagagtgaatgtaggaatgtgaactgagggtgcaggtaattccgttaacatggcttagtacgtaatgcaaggtaatcgtttatcaatgtattcaacacgtgtcacacagtatgtcttgaggacgttcgaaatcctcatatattcttctctcagttttctcgaccattctgaagtcgatggggaacatagcccaagagagaaaaggatcatgcagattcttcctgctcaagatactctctaaacttttccagtctggctttctcctccttctcggtttcttcttcgtccatgatttctccgcccgctcccgttccagagcgcctaaacttggatcggccgtcgtgcagagatgcttcgattcttcgttgagcgaaatatcggcctgagcaagcattgagagtcagtcgcgtagaaagacatgaattgaaaatgagaggggcacaacttaccattaaatttaagaacgcaggctcgagcagcaatgggatccttgaactttacagtcataatgccctcctcctctcgctggtttacatgatgatttggaagagacagactgattagcatgtctcattttttaaattgaatttcaactgagagaagaagagggaacaaacatcgaagagtgtcacactcgtcacctctcccatactctctgcttcctctctaacatcctctttcaagtcaattaatagtgtcgcgtccgcttctagctcgtccagagtgaacatgtgcttgagcacaacaagcctaacgtttggcggaggaagagcctgttgaatccttctctcagactctccgtccgagtccgagtcccaatcagttagtttgctggtgaagagaccaccagacacaagatggaaaaacattagtcatagtaaagcacctgtagcctaagatctgcaagggatcacaagagagattcttcgttataggaagtgacaaacctttccatttttcttatccgcttgcttagctctttcttttctgcttcggtcatcttccgtttctctttcttcttttcccctatttcggcagacgtagccgagccgtccttcttgccatcggtctctccatctccccactctgctcttctaactttcattctgccctgcccttctcccaacctcaattcactgtcgttcaaaacagtgatcgctaggtcgacacttgtctctttgaaatacatcaccaaagcctcgcctttaaagataccggcctcatcggtatacatcttgatctttggctcgtccgatggagtaagcaggatgatgccacatttagaaaacgtctgttggatttcttctttggtcgcgtcgaggggaagattcgtgatgaagactgctgtcgacttgcgcgcgggcttctccggagcaggcgtcgtaccggctgagctggaggctgacgaagaggaggaggaagatgccattaaattgctaggaccaccagaggccgcgtcggaagaggaagaaggatcaggtcgggctcgtttagcagcctttttggtggcagtagcagaagaaggaacggtcgagactgctgtgttagatgtgtaatcaaccactggcttgtcctttcgtttcttgttttctctagctagaacgggagcggccggcgcctgaacaattgatatgaaggtaacctattcagccttgtggaactcacaaagaagggggctagagatgaaatcttgagagtgacacacattttcgtctacaccggctaccgagtaggccgcctgctgagccttgatgatctcttcatccaactgataaaccctcggaccagcgatcagaaaagttcggaaccatcgggctttgatcagcttcgtttccaacgcgtcttgagcggaggagactaatggaactacaaaaaggaacttacgatgggcacccagctattcacaacttcgctccactcgaactcgtttccatcgtcatcctcaaattcccacttacccgaaagtcgactgaaatgaactctcggatcagttgagaaagcagcgttggacgtagctcctgctgatcctgctgccgatgggtcttgttgttggctaggtgtgtttgacatgcgcactgtttcttggtgatggttgaatttggctgtgagtagtgagttatgagcgaatagtaaggacttgattagtcagccgagtaataaccctagtcttaacctctacccagatgctccgtatggaccagcagagccagactgaaaaaaatgctttgatgtccacaaacttggttgatgtggacggttgaatgagacaatgcaggctattagagtaagtatagagagatacgacgaggagatacgtatacagaacggctcactaaagaatatagccagagtacgcgctcgtgcaccatatatcacatcgttctaaaggtttcagtcttctcacatcagcttcgatcacccagctggttcactgtgcgcaaccttaagatgaaacccatacaaagagctgcgatctctgttgaaagaaatcatgttgtagagtatgccatgtaaatatctcatatagagtgcggaatgagtatggatgtaaacgatgatacatcgagtttgagctgtgcatttctctggtttgttactcttttggtcgtttcgttctccatctggatcgtctcctttcctcttttctctctttcgacaaccttcccctctttatcctttctcccttcataaagcatccgcttcattcgaactccctaggtctagaactactgcagctgttcaatcctagaaatcatgtccaacagtcatgcgggttcccgctcagcattatcatctactagtccgggtctctcaatacctacaaccggcaggcataaggttgtcttagacccagccatgattcgagccttagttgggtctatagatcatggggcacactctcagggtgacgagatagagtatgatgcgttcaaatgtgattgtttttcctccttgtcttcttctggccttgttcctccatattagcgtctacaagccatcatgaccaaacctcgctcacaacttcccgatacatataaacatttagataaattcaaaccgtcatccatcttgacttccaagccgggtaccatcaccccgacagcttcaaaggattcttcatcctctctcagtggctcagcaaccgtacatcttcaaggtccgctcgaaggagaggtccatggattcgctgccaaagttgagtcggaaggatccgcccgggcgagcggccggccgggctcgtgtcagaacgatcatctagctgttctgaaatgggacggcaaacaattttcactacttccgatttccaaaacatattctcttgtgcatgacaagtctcttgctctagattctttgccggtggctcatagtccaccacctcagtcggagagggcttacaaacaccagcaaccctcgacaactttgatatcatcctcgactgaaaaacgacaccgaccaacatctcccccctcttcatctgcgccggctacgcgggacgtccatatgtcatcttcagcatcttcatccaggtcatcttcgcctgaacactctgtgcagcccaggccgaccgtacccgcacttccttccgcttctcagccaagacctacgtccaaaccacctttgtcttcatcgtcgataaacccatcgttaccgacccggcctacatcccaaccatcggtcgttaacccagatgttgaaatcctttcttttccgacatcttcaatctcgacttcgtatgctccaatgcctagtgttcccgcacctttaccagcaagaccaatgtacggtggaaaatcgttctctcattcgcctctgatgggatcaccaacgatacctcaccctcaacctccagcagatggatccagtgatgacgacgactccgactcgagtgagagcgaaggagaagatgacgacgatgatttcgctgctcagctcaaacaggagctcgccggtgtcagtgcaggcgggaagaaggcaggaaagggtgcgtttggagttgtcggtggaaaaggtttaggtctaggcttgggaacaggtcatgtacaaggtgctggcaagagaccggtcagcttgaatagtttgatgggttcgttcatattctattctacttatcttgtgtcgctgcttctgcgacaaatctctgtgagctgcgctaaccatttattgtgatcattctcattcgaatcttctctaatctctttgcgggacttcgataggtgtggaggacgacgatttagaacaggagagcccaagtagcgatgaagattaaaatgaggatttctctcacactgcgtccctatgagcaacaactgtcttgtactttcatcatgcaaacttgagagttagtcagtaagaatagtcggatatttatggctgtattctcagaacagatattcgagacagatcacaccgcgactatgctgacctagacgaactgtgttgtgttaactcgtctgatgctcaatgaatatttctggatgaggatctgtcgacgcgcagcatctgtaacgatttcgcatagatagtctgatcaacttaatacatagactgtcatcgaatactcatgtctgttgttgagaccaacatccctcgggcgaagaggggaagttctaatctggattggtccttcggttgtttgtacactatctgtacctgacgagttcatcatacctacggcgaagattcagatggcactcaacagacaggcttattcttatctgatcatcaccatcacgtggttacaccgctttacctaccgatagcttcctctatcactatcacgactaaaccatttcatctctcctgtttcttcaaaccggtcactgtcaccaactcttcatcacctgaactacaaccccgatatatcgaatcggtatatctaaactatttacccctttctgacctcacgctgaattattaccgaggtgtttaggctttctaagggcgatctatatctctccctatcttgagcatcaatcacgatgagacgacaagatccaaggctccggactcctttctttctttatctccggacgtttgcctttcctttggttctctcgatattcttcgtacttcttctctcctcgtactttgtgcttgtccatccagttgctcaacccaagaatcacaagatcggttggcaaaattgggacgtcgtagagctagaatctaaaccggcattatcgacagctggaaatattagccagacaaacggatcgatttctgatcctgaagcggagggagatatagaaggagtagacgaatctctacctttggatgtgtgggacccactgttaatgcacaagaccggattgactgaaatcataggcaagtcaatgattcatgatatttaatagcaggctcgaaataatggttgacacctgttgagaaatctggtctcgatttgaggatgttcagtcaagacttgtatatttcgtaggtctagtacttcttcttcatattgataccgaatgagtggaaacttacgatgatacccgccctaccgtttatgaacttgctgaagctccttggcaagggtttacggattactgtgcgcctgcttctacaccagctcaggattctcgtctcggaaaatgggtgcgagtcgataaagacatcaacaaacgaagtggaatttggtattcctatatatattaccgccggtctcgtcggtttgatggtaggtctctgtcaatctatcccggttctttctattgagattctccttctcaaggtagtctgatgagctcatagcatttcttgcacagttccgtacatcacgtctctcaagatcatcccatctagcggcccacctccaccatcttatactaagtctacaggagacgatttaacttccggttcctggcctgcgctttctggactctctctagcctacaaacttcaagctgttccaggtgcttttgacggattggacgactcgattcaagatgaggctgaatttcaagaagctgatgtcattactgagattgatatcctgtggggagacgccagcgtttgttatgttcctcagacttttctcacttcatatcaagtctatgttcttacaagtcggactgacacacgaagttttatagccttggtgggggttcaagaggatcgagccgcctatcaaagaaggaactaagcgattccctgaaacacaatccttggtcgttcgtatgggtatcaagcgtgagaactaatctgtcttcttcccctaacgaattgctctacgttctcatactcacataacgactaaatccatacttgttcattcttgaactttagctcttcctcctaagcctgagcttcgattccatgcgaatgggacgttcaggatcatgcaagtcgccgacctgcactattctactggagttgggtaggcgccttgtttgatgtttttatacttaattttctggggctcatcagtttgtctgagataactcggtttgtgtacacagggtctgcaaggatacggaaaaaacaccttgcgtcggagatgttgattcagctttgttactagattccgtgttggatgcagaaacacctgacatggtgattttctctggagaccaagtgagagttctaactttggattcctctttgttctcgtggacatatctattaatcggtgaagttctttccataagctaaacggccagcaaaccagttgggactcgatgagtgttctttcgaagtacgtcttgtttctgtccatgttgctctagagatgatcactcattgtttcacaacaatacagattcgcgaagccggtgatcgatcggaaaatgtcagtactttttttcggtcgtacgacatccatgtctcataattgtgcgcattgactgatcttctttagcggatgaagaccatgggcgctggtgtttggaaaccatgacgagtaagcatgtttctcatatatgtggctatacaaatttgattttctactgacccactcccttctcttgggtcgtttcgttcattttgtcctccagtgagaatgatctctcgcgaaaagaattgatgagcgcaatctctcggatgccgtattcagtatccatcgcgggtgataaggatgtcgatggtgtgagtcgtatcagcattcatattctgtttcttgagcatgaagttcatgattcaacccatcatctcttcgttgatgtgggtcattctttcatctaggtcggtaattatctactcaaagtatactctcatgacccgtaagttgagttctagtcagatgtttcagtacgctatcaactgaagtccacacgggatgatggtctttcatactagttcgaagacacatctggcttcgatctacatgattgattcggggtcttatcagaaggcaacaagcgtattccagaaaaccactggatatgactacatcaaggtgagtagctgcgcttgctacatttgtgcaatcaactgtaaccaatattggtatggtattgtcttggttctgtagcaatcccaaatagattggtacttgtccacatcgtcgaaaatagggttgatcgagcgaccatttcaaccagacaccgccagtgacctagaaggcatctggaccaagagaaaaagaggaggacccaagagaacaaggcagataaacactggcgagaggacgctagtcaagccaaatgcgctgtgagtgataattcctacttaaggatcaaatccttcctaacactgacggttcttgatattgggtatatcaaataaacaggatgttctttcatatcccgcttccagaacacattaagtgagcattctctgtttcgctctgcatcttttcaaaccattttctaatccatgaacatatctacgcactctcaagcccggcggacctcgacccagacactggtgttccccttgatactgggctcctcttggacacaggtggatcatctagtgtcaactctggattcttcgagaatggtatcaaacaggctactactggaaagataggaaagaacaaaaaggagatgaatgaggtcagggtaattagcaatggagtgagttaacgctgcccctcgtctcatccgaaagctgatgcatgcacatgagattaatcaatgattcgctatgctccggtgattatcgattcagcatgttcacatcgtaagccatgatttctccatatcttctgaataagtaactcagccgatatctaacggaattatcgctgccaatacacaggctgagaattgtagaagaattcaagggatttggatgtgttttggaggaggaggatcgtattgtgagtcaggccatttattcaagaaatccataattcctactcatctggatcaatcgtaatttgcctccctcttgttagctgggtacggacggatagggtatgtttgttcagtacgagctctatctcttttgcacatggcttcttacgtgttcctttgtctctgcctcttgtcttcgaattcaccaagatttgaacgaagattccggatttttgatatctccgagtttggtgagcgcatcagcacatacaagcacaccgagagtgggaagattatcgatcagatggatctggtgggcggcgacgctcccgtattgtaatatctgtttgaagaggagagaatgagaaacagaaagagattagtatatacatatgttttatcacgattttaaatgagtgtcattttcttcttgatctggacgcggcttgatatgtgaatgagaattctctgaacgcgtgcttcgccacccggaaattggcatgtaatcctcatcccactttccactcttatccatcgatcatcatcagatcacccatcagtctgcattctctttttgtgacacaacggccatgctacaaaactctcttttcagagcgccatatcggtcgtcaaggagtgtggcttctactcgtcgttcttccaagcgaatgctctcgctctcgacattgaacgttcaatcttctacctgtatccgctcaggaattaccttattgccatcatcagctcccttatccttcgcagcttgttccccatcatcatcatcatgctcatcatcatcttcgttctcttcaagacaattctctcaatcaagccggacatatggaactcaaccctggaaaaacccatcccagcaagcttccacaagcaatgctcaaaaggcatcaccatcgttagcagaaggaattcaagggctgcatttgataaagaacgaaatacagcatacattgtcggatgaacaagcggctctactgaacaagatcgttcggactgggtgagaaatttattcatcttctgattccacaatgtccgaaactcacttaattcttatcgtctatttcccttaatccctgtcctactggtttatacacatactctcgctttgagtcagcatcaatgtgttcttcaccggctcagcaggaactgggaagagttatttgttatctgagatcgtcaaacagctggaggcgaagggaaagagtgtctttgttacttcatctactgggatatctgcttcgaatatcggaggagtaactgtccattcctttgcgggcatcaatttgggacaggaagaagtgcacgtgttagcgaacaacatcaacagaccatctcagaagacggcaaagaagcggtggatggacgccgatgtgttgatcatagacgaaggtgcactcgctcttattcgctcatattagcttgatcattcttcgtctcaatagtgctgtacgcgtgattaactcgcacttttacacattggctaatgttcaatccttacatttcggaatacaaacagtatcgatgatcgatggcaatttgtttgataagctggaagaagttgctcgagtcgtcagaggtgactcccgtgttttcggcggccttcaggtgatcatgtaagaactcggttattttttgtcgctgtagccaaaaatctactcgatctcactaaatactgtccgaacatttctgcacagtactggtgatttttatcagttacctccaattgagggccgagattcatggggaaggaagcgaacggaggtcaaatatgcttttgaggctaagagctgggacaaagtagttgacgaggccgtcaagcttactagagtcttccgacaaaccgatagcgaattaatctcacatctcaacaaactcagagaaggcagatgtgatcctgatactaccgatttctttcagagtttagaacacaaacaatgggaagagtcgaacgtaatgaaattgttcgtgttcagtatttcctaatttttcatcttgctaagagtaaatcatctcaacccactcaaaccgactgttttactgagaataacagacttcctacgagacgtcaggttgaaaaagagaacctgagacgtctaactgaattgaaagacgatctgtatcgctaccaggcagttgacctctcagctgatataggtctcggacgtttcaggttagtggacgtgttagatgcagagagtcatttcaaaacacaagctctgaacaaactagacctcaaggttggaggtcagtcctgattttcgtatacgtgactgttaccaccctacttgcgcttgatttgagactctaagacaccgacgaactatattgacatatacaagtatcaaattcttgatgaagcccaaattatggttatccaggttagtgaaacctgctttctttgtaacctcaagaacctccacacttcctacatgtcctgacctgatgcattatttctatcctctctcattatgactccgccccaaaagaacatgatccctggcagagttgtgaacggaacgctcggaacagtacattctttccttactgtcgccgaggtccaagagatcaactctagagatcggtcgatccatatactaggaaataacaacaaccgaggaacagatgaaactctgcgtcaactcttaccggcatataagatcgacgattcattaagtgatttgcacagagatcggccgaatgttttgcaaatgttagagcccatgttagagcaagacgagtccatgaagtttccggtgatcaacgtagatggtcacctctacttcgttcagccaaggttgttcacattagggaggcggaatacggccgggagcgtggagcctatcgtggctcgataccaggtaagcctttcttatggatgttcagaaaatttatttcaggtctatggagcattgataaaaccgctatctgtctgtatatctagcttcctctgataatcggctacgccttgacgattcacaaagcccaaggacaaaccatcgatagggtccaagtcaactgtgcacagatgtttgccttgggtcagctctctctcgatgtctctccctatcctccaattctttcgggttcatttcataactcaactgtttccttttctgacttcaggtcaagcatatgtcgctatttcaagagccaagtctcttgctggtcttcaagtgataaacttccatccgacctagtaaggcgcttctccgaattatccatccccatgtttctgcgtgcgacccgctgatttgttatttttcggcctcgcacttctctagcgtcacggtgaacaaacgagttcaggagtggatgagcaagataagaccaatggatgtttcggatactgatgaggtcaactcatcagtatctccaatagagtcatgatatgattgatttagtatgattaatatgaacaacacaaattcgtcatatgaatgcgcctgttatttgacgggcaaaaaagctagagatatataggcgttcgtgcgaataccatcgaccgttcatcatcttataacaacctcttgggagcagctgaagagaagaggaggaaaccaagcatcgaaaagggaagctatgatggttcatatcgattcacttcagcttgaagctcatcttctcacaatcgaccttcttcaatcaatgtttcctcttccatcagaacttctcctctctcccgggtcggccgagactcttgccattctacgctctctttcgtcaccgatcgattctttgcccactcctgtacaggatgaaatcagactactccttcgcattggattgattgaagaggacaatacccttgagctggatatcaagttttcactgaggatcgggttgacaagcatatgtgcgaatagagacgagaacaaagtggatgctgatgacgtagcgagagtttctttagaaagagaacacggccaacaatgctttccgttcgccccctcagttaccttgctcgagccatcttggctctctcatgcttccttttcgcaactgtcgagtcgtgttctttctgcagtctacccagaccaattgccaacaacagcaacgtcatctcttggttcaacaggtgtttccagtccgacggtcatcatcgacgaagacgatccgacgagtgtgatcctccaacttgtagaggaaatcaagacactcggtcaagagtatattccaagctcgagaactctcggctctacatcatcttctgaagccaagagggtcgctgacaaaggggaaggactgggaggatcggcggaagatcaggtggagatgtttagagttagagatgctttgatatgtgtttcaaaaatgcaccgttcgttctttccgtcttcttccatgatcataccaagcgttatgtcagcttaagcttacacctatgtgcgaatgagcagatatcgtgaaccaaccaaaacttcgtaaacttaaagcattagcaacatcatcaggagcaagcggctttgtaaaatccggtcgacctgggatactgttgtacgagattgggagtaaagaggatctggcaaagtttttggaaggagttcgagtatgtttttagttctgctactctcttgtttgtagatcttacttatgagaacaagatgctgaatgattgtgtccgacgtgacgctcgatgcagagtctcaaatatctcgaatttcaccatcttacagccgaatctctctatcccccctcctattccccctacatgcacaatagtcaaagcgcatccctgtctgaatcaacctctcaatctatccaatcctcttcccagcctctcaacgagcataaactcttgaatgaggggaaacctggtctgatcgagttggatgaggtcaaggatctattagatattgcggagaaagtcggccggagagaatggtttagagaagcaatagggatgggttcgaccgggaagaagtccaggtaaggcggtagtagtggtgaatggttatcccggcctctgagtttggattgttcgctcttacatataccaacctcgtacaagaatttcattgtaaaagagaaaaagctatctgctgtatcaggagattaagaacggcaagacagacgaatgtgcatatgatctgttaggagcaaggattgtttatataaaggatatatgtacaaggacaatatgtaaagacaactaaagaagtggctttatcgtctcttgccgttttgctgcatggcgaggatctgaaccattcgaatgaaactatgaaagaaggcagaacaaggcccgagtagaggatcagtggcaaaattacatggagacgagctgctgtgaaaaggaacagcatgttcttacatgtttaacgtgtccaactcaagggaaattgactctccgaccgggtcagccctgtgtcgacccatagccgccattctagcgtgggccaaaatcttctgagtatcatacaagatgcatccaccgaacacagcgagccctccgtaaagggaaagcgactcagtgacggccaaagtgcgcaatgccgtcctgggcagaatcatcggagcaagcgaggagagagcgactacagcaataccagccaacagaggtccacctaggtagagatacttgtcttctcttgcggtagctccaacgtaagcaagggaaccaacaacgccaagggtgtaaagtccagctctagcaagaagggcgggactaaagaagaagagtggggcgattgagacagcctgaaaagcttggaaagtactgaagaaagccattttctggacgtgatctagagagaaagatgaccgaatgaggaatcagaacatcaaaccagatagaagatggctcgaggcgtagtgaaaggtataaaacaaagcttactctctggactcgtgctgatgcaagcatacatggaaccaatacctccgacgagacccacgccgagaacgacccatgggttggcctgcatgatcctagtagagattccgtacttgtgtagtgagtaagctcctagggacgtcatcgttaggcccaatccacttagaaaatcagaatgatcggaagacacaaatgccattacttgtcagctaaacagtcggctatatggggcgaatcagacgaggataggagtatgaaactcacgtgtatttgaaagtagagttcaaatgctctcgctcaaagggagtaaaacctcctcgagtttctcgattgagtacaacttgattcaaagatacgatcgaggtaaggaatcatgaatttgacgttggcgaacaataacgaagaaacggcttacagttagttccaaccatagctccagccacgacggctccagcaacagctgctttcttccagtcaaaggcaatggggcctccaggagcagcactaaaaccggcaccggggttgtaagagctccatctcttgccattagggtgtttcggcagagcctgaagctgtctgatcagtggcgaccgaagtgggacggatgttgaattgcaagtggagaacgtgcgggaagctgttgatctgaaaatttgcgaagcaagggggtgtagcttgagcatgttaatgatttttgattgtggttgtgattaagatgaagatggtgttgagggtgatgttgttgttgtcgtcgtcgtcgtcgtcgtcgatgttggtggtggttatggtggttgatgggcagaacggctgaagtggaaaaaaaggccacgtcatggaaacctcgcttagtcagctacggcccaactcatttatacctgctctcattcctcgggctttcccttgacctttccattgatctttgtcctcatctatctttctctctcttcaataaacaccatgctcgctattcttatagtactaggcttattgttggttcctttgggctacttctttggtctctttaggttccttgtcgacaagctgagccttaaattggagaccgacgaagattgggtcattgaggatctgctaattcatcctataaaggtcactgattatactccctactcgaaatcttttccttctctcgagctttcgtctatatgctgaaatcatctccaaatatcataatcatgagtcgacagagctgtagaggaatttttataggagagtctggatactcgtcagaaggtctggatgtatgtactctctgcctctaatacataacgcgcgatccgaatcccacatattcacgttctgttcttgaccatgataccagtacgatagaagatggctcatcgtcgatgcggaaactcataagtttgtcaccgctcgagaacttccatctgtgcgcgcacaaacaacagacgcttccatgcctcatatctgaaatgactcaccttgctcttttgtacgtgattgtcagctcgttttagtaacgccttcgatcgataaagcgtccaacaagcttcatatatcctttcctgaatcggttggcctcgattcattcgatatacctcttgatccaacatctgaagatcttgttgcctgggagctgtaagctgttccaccaaatcctcttctttctgtgtctgctgaccctttgtgcgaaaatcacttgttttatcagcgcatccgacgtgacaatctggaaatcaactactgacgcatatatcatccccgatccattggcgcactctcgactctcgacttatcttgatcggcccgttctccttgtcttcaaagggcctactcgacgaccccttcggcttccctctgacccagaaactttagcaaccttcccacctgacgctcgaacggcgttctcagatggattcccgattctactcgtcaacaaaaggtccatcgaagatgttgagcaaaaggtcatcctgtcggttgaaaacgaagaagaaaccgaatggtcggtgaaacctcgattagaaggtgacatcaaagagaaatggttggctgggaagggagatatcacgagaaggactagaggaaacgtgattgtcggtaagaaaggaggtaaaccctgggtggaagagacttggggagttattcaattcggccaaggtcaggaagcccaaaagatgattgttgcttcaccatgtggaaggtgtcaagttcgtttataataccttttctatcacatgttccgtgccgtttagcttcctacttacctcttgactttgtcttcctcgttgcaagctccctaacgtggatccagaaaccgggatttctaacccatcagtcccatacaaaacaatgacaagatatcgaagagtagatcctcgacagaagtataacccatgttttggaatcaatgtcgttcccacagttggaaaaggggttctgaaagttggcgacaaggtgaaggtgaaaagtttgaacaactggcctcgagtagagtagtattgtgtattattagtttttctgccttctgtacttgtttcaatgttccgttgatcatctacactctgaccctccgacgatcggaacacctctacacaaacatcgtatattatttaaattcttctggccaaatttctctttttctccatccgccatccgaaccaactcgtggattttgctcatacgctattcctttatcgatgggtgttcctagtggtactattgatttgtattccgtttgcattatgagcaagaaaaggagccaaccgaggtttacgggtaggtcagattttgattcacgtaagaggaagaggcggaagagaacaaaaggtattacgcacataaccatttccacgacacatcgcccattattccttcccaattccgtttgtgcccaagaaaccatctgtttccttctctgtaagctgacccccactcggccttccacttttttatgttttccctcttccccctttcagatggcatgttcaagaaacgaccacagatgcgatagaaaatagaggaggtgtgaatgaatgttgtgacgagaagagaagaagaaggctgacagaagaagataaggatgacggacgagttctgaaagtaaccgaaccgagcgctgagcgaaaccgactctcgctccagaaaatcctgacagcagtaagcaaaaagtttagacaataaaaaacaaaaagatttgaagttctcatgagttggacaaacagaaatgattcgagcttctagtgtcgataggttattgtatatcatccatgcatggtttacagcaagtagagccgtaaatattgtgaagatcgttgatctatgctcccgtccgaatttgataacccacccgggtacaacagaagaaggagacatgtcagaattgaggtctagactgtcgtgaaacaaacgagaaaatcatacttacaatacaatgatagagatcagtgtcccgtcatacccgagcccacgaagagag

SEQ ID NO: 2327 - DNA, 43659 bp, Xanthophyllomyces dendrorhous
cggtgatgatcagaacatagccggtgaagaccgttgaccagatcgaaaacaccaagaagtgctgaaatttggtgttccagacatgattggtgaagccttagggtaagattgaagcacgcattcatcaatagagtgttatagaactcgccttgtgattctgttgaccgacgcaacctccaacccaagctgtacatgtccctcgatctaaagtgagcaacaaggataaaagtgaaagattgttacaataacaggggcctaccacagtgatgatcaaagtttaggacacaagttccacaaactcgacagctgatagatccaaagaatcagtatgtaaaatttggcttctcacaggcggacaagtaaggactaataaatctaaactgactgatgcgttctaggcggtttcaataactgacaataaccgcaccatcttcctattcgttcaggttccattggcgtcctctccagcagttcctcacgagggttagaagtatttatatcctgagtggcattcatgacttgggccttcctctcctgaaataaaggaggtacgagtgggcatgaagttttctttgtgttcgctgagggctttggaacgggtgggatctgattagttagaaaaggcggaggaccggcttggcggggaggaggagcgggagcaggctggactgatatcggatagggtagcccttcgagcggatccgatgatggttcgataggatcatactgtttgatataatatgaaacaagaatggcaggctttcgtatgttgaggtaaaatcgcttcgcgttatagcacgcgatgcaggaaatgaagaaactgccttgacttacgtctttggctaggcctggaccagtgagtgtgatcttcaaatatgaccaggtgaacataaagaataagaggatgaagatgatgaggaaagagactacgggttctcacaagggaggaattggttcacatcagctcataacggaagaaatacgagagaaaatgaagaacacactgactccccctgcccttactaaacgctcttccttgtatcatccttacaaatatcctcacgacgactacatatatcgtccagcccactatgattatcaatatactgtatgcagtttcaatttataacaaatcatcaattaaacagactcgttagcgaggtctttcactgaactccatggatacaaaagatgcgttctacacgtacggaacagtccccttacgtctcatccatgagtcaggctctccagccgagtcattagccttcttctctgctcgttctatagcatcctcccaaggtgtgaacttcttcttcttttgatttggactggaacttgtgtctggcgaagcgttcgagatatcgccattggggatggctacgagggtttcatctggaaaaggaggaataaaggtagatgcttcgggtagactcgaagtcgagagagacataacggttgatgcagacactcctggttatggatcgtgatagcgttcttgtcgatacttgatgaatgatagttgtgaaagtcttctttggcgttgtctggtcacgacaagaaatacgtcatcgatatgacacgcggccagattagataacgagacgttggtcaccctagattacatctcttcaatggattactcctggagagcagttgttgcaacatcgaaagcaattgagttgtatcagactgtagagctccgtcgatataaacaaaagtttatgatgaagcgaatgcaggcggtcgaccatggaaggtgcagagtaacatacataaagcaagtgttagagcgttgcgggaagggggagagggagagacatcgacagaggagttggaaactctagaatgacaagaaggtcgggtaagagtagctagtggaaatgtagaaatcagagttacgcgcatgcataggtaggttctaggatcgacatacctcctagtgatatatcggattacttgtatcttatctcgataataactcattgcaactagaagcagcggtcaagatgaccgactggcgatgtttagtcgatctcaatctgaatggctcaagaacaaagctattcttggttgataacgggtttacgaatagttgaccattataatagtcaccagtcttgaatacgttgaacctacctcgagatggttcgttgatgtagagaagctaccaggagcagagggagatgggatgagtatgttagaagcagttgacaaagtcaaatccagagaacgtatctctgctactattcgttcgttcttggatattgatataaggctcatagaaagagaagatagagaaattctatcaaaagcgaaaagtcgaaaaggagtggcagttgaggtgaaattattacagacaaaacatgaaacatagccctcgtacaaaatgagatatcaggaagacgttcgatgaacgttggccaaattcgaaatggcagctcatgtagaaatttatttcattatgcgttcatgttagaagagacaacaagatcgctacaatacctctggttttatccccacttatttgtctcaaccctattgcttcgctctgttgaaaggcttcatcaaagtttgaacatacagaacgagtccattcttcagagacacaatctgatacacacatatataaacatacaactatgaggtttcttgtcaagatcaagcatgccactactcgagttttcctcttttgtccacattcattccactcgctcctgcgcatcctccgtgcttgccttccccaccagtcgtttctggtgctggcgttccaccaccagggagagcccagcgattccaggcgccaagccaggcgccaacaccttctgtcggcgccggatagatactttcgacctggtgatgtgtaatcagcgccgtcagcggggagaatgagtagagattgcctgttgctcggaaaaaggtatgccggttgctgcatcagccgcgctggatcaagacaaaacttttgagaatgaaaacatactaattgtccattctctgtccggcccatcgcctccacctaggattccatgttccaccacatccagtggaactcttagcctgcccttcaccttgactctgattctaacctttctatccagtcttgaccggctaatcatggcccactctccatcctgtccttctaccctgacctcacctccattcttactcccatcagttccttcttccgaacaagggatcaccaaaacccgctcgatcttcacccctgggtctttcagtagtatactgagtgatgttcgagcgccggtgaaaaagagactatacattcggagggatgatagatggaagttgaaaagtggaggtgtggtcaagtgaacggacggatggaagagtgtcggcggaaagaccgggggctctgcaaagaagctaggcagggttgtgtgtagatgtgagattgcgagggaaaactgagagacccattgagcgtccgagagtggacggttgtcgtttgaggaggaaggtctgggatcttgaggagacggttgtgagaaaaagaacgtcgacggaagaccagaatgaaacagattgtaagagccaatctgagaagaggaatatgtattcgtcgacactgtccgtttggcaggtcgacatgacgatcggaaagttaaacaagatgttgataagaacctccgctgaaagagtactcgacctccaggacactttgacatcctttcaagagagacaaagcacaagaagagctaggtgtggcaacgatggctgtttgagcgaacttcctcaatgttctgataatttgagaatcctcggcgaacgtgtagtgacaaagtgtggtggccggttattcacctcctcaacttcggcgcacgacgcgtctctccctatcgctgtttctcttaccaccatctactattcgtttccaaatgactggaacatctctctatctggcaggagcgaccggtctcacaggtaggtgttttatgcgcccttttgtctgcgtatagaaaggagagtaatatgaggggactgatggatgcgttggtattgggttcgaatggtgacttgaattttcccctgaaacaggctcacatacactgagagccggtctggcatcccatttagcgaccatcaccaccttctctcggagacccatcaacacgcccaccaccacaccctctactgttgctcatcggtcgattgtccttgattttgaccaccccgagacatggcccgatatcttctcggagccctctggacaacccacgggggaacagaaggggaaggtattcgctagttgcttgggaacaacaagggaagcagctggcactctagagaaccagcgaaagatcgactacgacttgaatttgagtctagcaaaaaaggccaaagaagccggagtggacacggttcgttctgtttccttctcttttcgtttcgtctatttccttctgtgtgagttgatcttgatgccctatcgtctatcccggtttccacttgcagtacattctcgtctcgaccgggatggcttcttcaaagacgcgctttgcgtatttgaggatgaaaggcgagctcgaagatgcagtccgagacctcaacttcaaatcaacatatatcctgcaacctggtcttctttacggacagagagaagagaaacggatggcagaaggttggagccagttcttgttcaatgggttaaaatcagttggtttgccaatgggtagatattccatcgatgccgaggtgtacgtttcatctcttttcatcctgaacctatcgcctacttgattagttaacaatctgacggactttctgtctatctttcccgtcttgtcgcagaattggagaatgtatcactaaattggctcttgctccgaaagacggcgtccagtaagttctctttcaatttgtctttcttcgttgtatggcaaaccaactaacatgtctggtctgtgcctataaaatactcagtgttctttcgaatatggagattcttgcttttgtcaagaagtgaaaggatagctttatctgagtgtgagatattgggaattacgtctgtagactacttctgaaggcagggaatagccatgagatctatatatgaaagtatttcagtcgcactatcctctcttgtccctctgacatttaaaccgactttcctcttcgagcactctcaattgcctcgagaacgaggacaagatctttggtctccctcgtgtcatgcaccctgacaacctggacaacgccactagccacacagcgagctacaaccgctgctgaaccataccctctgtcctttgggtcggttctacccgtgagtgcaccaatgaaaccctttctactggctcctactagaagaggatacccagcgatcgggtttctttccttccctccggacacatttccttcccgaacgagatcttctagacctgccaatagtttccagttttgctccgccgttttggcgaaaccaattcctgggtctaagatgatgttccatcgtttgactccagctttgatcgcctgctctacaacttgagctagctccatcctaacatcttggacgacaccgttcggataatccgtaagggagctcatggtctgactgtcccctcttgaatgcatcaatacaaccggtgcatcagactcagccatgacgtcccacatgccttcagccctgccagcatggacatcgttgatcatactggctcctgcttccatcgctcctctcgctaccgatggtcgataggtgtcaactgagattgggatggtgatcccttctgatcgaagcgcttggatgagagggacaactcggtcaagctcgatctcttccgaaactgcttccgcaccgggacgagtggatagaccgccaatgtcgaggattgtagcaccggactcaatcattgaccgagcggtttctagcgcaaccgaggttgtagggtacgaccccccatcggagaaagaatcaggtgtgaggtttagaattgacatgatttgcgtttgaggacagtcactcgagaggtgggaaggtaagagagagattgggtgatgaaacgggatcactcgattaaggcaaggcggaaatgatggaggcaaggcttgatagagcgccgagatagaaacggaataggacggatgaataaagtctgggatcatactacaagacacgtgttgtcagtaaacaacaatctttctctcttccctatatagagagtattgaaaacatactcgatcaaagggcgcaaaacaaactctcgctctcccagcctagggtgaggaacgatgagccctccctcaggtgtctcaacgtcgatcacctgatcatcgtagaagatgaggtcgagatcaaccactcggggtccatttcggaaagtttgggttcgaccaacgccagactcgatggcttttaggtatgacaacaacttctcagggccgagcagagtttcaatctggaacaggtaaagaatcagatttcagctctctcatgaaacagaaaaaacgggtgtactctctggaaagatctactagaaagacaagagcaagagaaaaagtacatacgatgattgctccattgagaaatctgtcttggtcctcgacgtacatcggctcactctcatacaagaaacttgtatcaacgagcctaaagtttccctcatctctcagcaaccacttgatcgccttgctgatatttcccattcggtctccaatattagaccctacagccaaaacagccgtatgggatttcaaagcgtttccttcatcgtcagtgtgatcgagaacggtggaactagacaaaacagatgatcgctgtcgggtgatctcgacagatgcgtatttggcgaacgtcaccgcgtacggtttagacactcggagtgtcaacgacgggattggagggtatgatggaagagggattgagaacagatgggcagatagtgtctgagagagggattcaatggtctggtatgatgttggttgaacatactgagagaggagtagactatcagcttcccatcatctttgtcacagcaaatattataaacaaggtctcacatcgtgaatagcattggcaaagactcgatgggggaatccggctgatgactgagatgactttccttcatttgacgtcaaggggatctccaagtcaatcactaccgcttgtttctccaacctctcctgtgggttgacgccgatgatacacctgacctcaacttctttgatccagatcttgctctccttctctgaagacttcgcaagtttgctcccacccctaaccatctcgaccccaacttttcctccagcaagatttttcaaacattccagtcggaccttgacttgacctccgttgttcattctgaccaattcatcggcgattccttctgcacatccttcgatcgattcccatgtcttggaatgagcgagcgaaagagcggctttggcagcgtcagagtaggaaagcgtctgagaaacattatctgtcaaggcggacgctatgagaggatgagtgatggtgaaggagagtgagtggggagaaggattcgtcgggcgatgccagtggtcacccgaagcaagaagaagagggaacacaaggtcggtgatgacaatctcgtctggtttatttgtcgacgacatgatgctggtgtaagaaatgaattggtgaggaaaagttcgtccgaacatgaagcatggcagactagaaagatagaaagggagtgaattacggaagatcacgtgcattcgattctcgcatcattccaactctcatctccgaagtcgttagagaaggtggtcaatgagatgatagagacaacacaaatggtacacacggtggtgagcaagttcgtacatgaccatcatatagagaaacggcgtgcggtctctcatcgacatcttgctttctggacagccgttcacgcaattcaaccagcgtagaaattgaccactgtttcgttttgtttcgtttcttcattaatgtctgtttcatctccatgttgaaccttcatcaatgctcaaatcacacttgagttcagcacgccatagaaaactcccgacagccatcaggatagccgaatatcgaggatgcatttgaggactagctattatgtggtggggaatgaatattataaacagcagggcacggagagatgaattaaaaaggttttggtaagaaaagtaggaaggtgattaagtgttgtaagaataagcaagaaaatgatacagtcatgtggaaaactttctgatgcagcgatcgtatcccctctctcttcgacatgaaattgctcttccggctcgacactccctcgacacaatcgttcgatccaccacgagaggaagtaattaattagaacaaaaaaaggaacaaaaagaaaataaaggttgttggactgcgtgcaaggtattgtccagataggacaccgaagactcggaacacttaaacaagagcaccagtgaatcgatctcctcttcgaacagatcggaccaacaaagcgacggcaacggcggtggccacggtcataaggatcctagaatttaagcacaaggtgaaacggttcaaggttagaatcttgtgagaacatgagttaaaccaggtttggaagctcaccagttaacccaggcgaagccctcgagagcgttgagctgaccgcagtgggctccatcgaactcgttacagttcaatccaccaccaagagcgtcggtgatagaggcagcagcggcaagccaaagaatccagctgtagtcaagacaagacaaaaaggattgtggttgagcatcagttgaaggaattccagtggcaatcctcatcgaacaaaggaacgaaactgacgtcaagatgagccagataccgtgggaggcgacagaagtgaggatggaatccttcttgatctggaacaaggcgacaaagatgatcgagctaatttcatttgtttgatcatgaagaacacgtcaggtttcaatcatccgatggatgcatcaagatctaaaaagtcagatggacgaacaagacaagcgtccaccacgaaaggaagcagatgaatcgcgatcggtctcgaatagaaccatcagggtagttgttgtgcctgttgtaggtgttgaccagccaggttgaaatagctccctcaatgatagtgaacacgatcaaaagaccaaagaggactagtaaagaacaaaagacgggaaacaatgcgcgatgagcaacgaatgacaggccatggtttacgtgatgcagagtacgtccatcctgtaacgacttactgggatgtcctcggttaacgtgggtatcgacggccatgattgatgtggatgtagatggtcttcttttgggtagatgtggctggtagagatgtgtgtagagctcaatggatgatgggtaggaagaaagagaaggtgggaaaaaaacttaagtctgggttttcttaagaggccgggcgagggattccaagttttcaaacccagtgtccgcgggaggcaggactgacgtcatcgccggggaatggtctcggatatgctggagtaagcctcggccgagactgacatctcggcgggctggtagcttaaatgtctccatggatcgaacgactctgagcatcatcgagttcagtggatggatttgcgtgtgggtgagtatgcgtgtacgtgtgcatagatctaggtgtaggcgtaggcgtgaacgtagaagttgagtggttcaggcgagctaggctttcccgtcgccctaatgtccttggatgacagactcaagctagagatccttagcacatatcagtactgaaaatgctatcacgagggttcatttgactatgtttcatagtcgtcatactattctcccttcttcctttttgcctgatatgtctcgagtcttacttaatccttgctactccaagactttgctagaaatgacatacactccgctcatcctatcgacccactcgttcgttctctttcgtccaaccatcgcctcacctctgtcttttcgctcattcgccaagctcgcgcgcccgttcgttcgtccaatcgctcgtacaacttcaaaatcgtcccacacaccaccaccatgtctttttgatcaacatcgaacagttcccaccatctgtccggtaacgggtggccgatctggtggaccgatagaaagattgttgatgccgccagtgtcgatggtgagaacagcgcaggaagagatgtttgaaggctaccgtggaagaggggaggaaaagcaaacacgtccacacaagacacacttcaattcgtttctctttcctctttctgatcagaaggaaaaacgtacgaatcatttagtaaaccccaagcgttctccacgatgcccttctcttggttcccaacgaggcccaacatctgacagtagctcaccagcgtcccgtacggcaactgcacttggacgttgaaccctaaccgtttaaggacctgcatttctgatatcaccattgcgttcttcagatcataaaatcttgagcttgagtacgccatcgggagataagtgaatttaggaaatgttgtgctagaagaagaggatgaatgctcgagcaggtaatttgatctctgatgtaataaatcatacacgttgaccagatctctctactcagaatataatgaaatacatcagatatgttagaccaaaccgttttactcgtcgaaaggtgttcaacaagaactcactaaacgcataggacattcttctagtttcgttgctaggtaaagcgcgcccattccgatgtcctagacacggacggagacacgtagaccccagaaggcgtgtaatttggatgtcttggatcagttagcacagtacgtgtatgtatataatgatgaagagcaagagcttacccggattccaaactgcttcatagaagatacataccagaacctttggaagaggatctgggcagtcgccatagctacttgtggtctgatagtttcctccatcgttccaaggcagaagtatagaatccggttcagaacgagatacgaacataaacgacaagaggagtgtatcagctatgtagatttgacccaaagagacaaactacgagaaagggagaaagcaagcgagactcacaatttggctagtcggccagcctcttggattaattgagctccatatgttcggaggtcgtcctccaaatcctgaggaattccatcctccctggaaggtgtcaaccggatctgccgaagagatgccagtggactgaatatgatactcattcttgtagtggatggagattagacgagaaaaggcttcttactcaatccagtacagccggccaacaatgtccagttgggttgctatggttaccgtcatatcggccaatcgatcaaccccagcacgatgatacccacatggcgcacccagaacgctcaacagacatccatctgagaacgcttctatctcggaatctctgatcgtacttcatcttttgttcccatatcttcgtgtgcgttttgctgcaaaagtttggtcgtgtcgtcttggattgcttggtggtgttgagtctgacaaacccgcttcttttattatttgccggtcaaacaaacccttgaacaaaccatcacattatgatcaacatctcatcttctgatgaacgtcttcactcgaaccctcacttccactcgtcgacattccttctttcgaatatcctcgctaaataaatctcctttcccaatcgtcctttcgcacagacttattttgaaagacccatatacagttgtttctcgtagagatatgtccatcaaagccccatttggatcttgggattctcccatcagcgccgatttgattactcagagcgctatcagctttggcgagattgcttcttctctcaagtacactgtacgttactctttcggcttctttctttctttctttctcggcataagagaagaaaagaacagagaaccgcgactttctccgtgcaatatatggttgctcgctcggccaactccgtagatgatggaagttgacactcgccatccgattgtggaaaactgaatagtaccacaccgaaggccgagcttcagagggaggaagggaggtcattgttcggactcctctcaaagattcgcttgaagagaaagcagaagatgtttatggccccgaatttaacgctcgttcgtctatatcccatctttgctttggtttattatcttcatatttatctcacaacgactctatcggaactatcatcgtgaataggatcaagagttcatgaatatggtggaggagcatttcatgtaatcaaagaaacggatgaggtattcttcatcaacttttcagacagcagggtttatagcgtcaagcctgggggcagccccactcctatcaccaagggtatgagcatcatttgatcctatctttcaacttgatccgtagactcattctattctgatgtcaaatttcacctgtaagatttgaaaaatactcggtactcgtctcttaagcctcatcctttgttctcgactacccacccttatctactggccatccaagaagttcacgaagacccggtggacgtgtccaaagtctacaatagcctggccttgatcgacgtacgatctggcgaaacgaaggttctccagtctggcgctgacttctattcgtcccccagatgggcgcccgatggggtatctatctgctggatactctggaatcatccgaacatgccttgggaggatacccaactttggaccggtcagatcgaagggcttggcgaggtgggcgccaaggtcatcaactctaagcgaatcacatcgggtgaggaaacagcggtttctcagccgacattctcggaggatggaaaatggttgtacttcgtctgggataaaactggattctctatcctataccgagtcaaagctgggtctgacgagaaaccagaattggcgatggagaaaattaagagcgatattgtttcacccggtgagcccttttgcattcttaattccgcaattgacgctttgtgctccgggcaaatgtactcacaaataggtctctcactgcacctgacagcttggcggcttgactcttctcgctatgtacttctgtctgacaaatacgctctcatcacgccaagcatcaaatctataatggtccctcatctgctcgacctaatcaccaaaacctccacccccattcccagtccttttgttgtcttttctgagattagacggatctcttcgacttctgtccttctggttggtctgtcggctactaagccttccaggttggcaatcctgacgtttccgaccagttacgacgtaccgggagtaaagttcacgacggtcaaatcttctgccgtagtggatgagaaagtcattccaccaggaacattttctgaaggaaaaggtctcgagtttgatattccgggagcgggcaacgacgagggaaagactgtcaacttgaacgtcttgttctatcctcctaagaatgctagatatgctggtggaaacgatggagagaaaccaccagcaatagtcagtattcatggagggccaaccagtcagtctcttcccggtcatcaatggagaattcagtactatacttccagagggttcgcctttgttgatgtcaactatggtggaagttccggatacggaagggactatatcaatcgacttcgaggtaactggggtgtggtcgatgtgtccgatacaatcgaagccgtaaaggcttgtacggctcaagggttgatcgacggaaaacgagtggctatcatcggtggttctgcgggtggtttcactgtgctcgctgccctcacaaagagtgatgtattcgccgtcggaatctcctcttatggtataggtgatataaaattgttggcggacggaacacataagtttgaatcgcagtatctatttaagctggtaggaggtacaccggaggagattcctgagatctatcatgatcgatcgccagcataccatgcacaaaacatcaaggcttcacttcttttgcttcaagggttagacgataaggtcaggatatcgttacatcacgttgcgcccttttcgtctcgtcatcgccatatagaatctaactctctctgtctcttttgtttcttttaggtcgtcccgccagaacaagctcaagatatggccaggagagtggaagcagctggtgggaaagtggaagccgtttactacgaaggagaaggccatggttttaggcaagccaagaacatcaaagattctttggagaggtcattgagtcacatgaggagggcctttctctgatcagtaatgcccatgatcttgattttgattgtgtcttggattcttctcactcccactcctatgaactttttttttttattcgatgtttatatgtgatgcctttttaaccaaccgtggtttgaacctatttgaagcctccatcaaaaaaaattcgaggacttgggtcttatcacactatagatgacagtaagagcaaaataaagaagacaaagcgagaaaagcatatatgtaaggaaaggataggattggaagaaaggtgaggtaaattcggcccaagaacggttagtgagaaaaaaaaagtcaaggtaaaaagcaaagggcaagtgaagggagagaagaaacaacgtgttttaatcaataaatcgaaaaccaaaatgagaatcctccatcaacggatggcgacaaacgaacgacagtctaaagagacagggaaaaggaaaagaaaaacattcgagaggcgaaagggatataaatggataccaacagaaacaactacaaatattgatatagaaaaaagaagggaatgagaagagagatcggtgaaggataccaggctctattattttctcaattttagatcatccggtgcattcttctccaaccactgtctgtcccattcttcacccaccgctacctgataactatcacctctgcttctgccatgattgccatccggttcaacgctctcggcatattgtcttcctattaagccttccgtttcgaaatgttgctgtgcctgagccaacgcgcgggattcttcttcccagctatccgcagagatcattgagaatccagaaagagagttcgcgcaagagttgagatgttcacagttcgatctgtgggcctgctctacagcagtcaaccaaaaaggtcgatctttggaggtgctcctttttgggtcgctggattttctcggtggcgacaacgcttttggagtaggtgctgttgagatggttcttgtcggacggaacgaagacgaggatggagagggtaatgaggatgatgatgaaggaccgtccataaaggtgggcatgttatcactcgacatttgcgcctcaatgtatgacacattcggagaggagtgtgaagagtatatggacgaggatgagcgaacgataggatcgaggactagatttgacggattcccatacacccgcgatggtcggagggacaagttccatctgagagatatgaatctttttacgaacggaattagatagagcaagaagaaaccacagtaagaaaatcatagaacatgcaagtttcaagagaggcgcgtacgtcatcgactaggtcaatgaagagctacttactcgacagcatagttcggagcctgttaatcccatatcaagtaaagaagatagtcagccaaatgtaaaggttgatccgattaaaagcacgacacgtacgttgtgggcgaccaattgctaagttacaatttcaagacagacagacaaaacgttcaaattgtaagcgactatgttaaggagctccggtatgacgaatcgagcgaggaagattcaagctcacctgttcaatcgtatgcaacttgtttgataggctgaccttattgtttatggagagcttgtgttgagcgtagctctcgagaactgcttttgcgtggaacctattgctagctgtttatgaacaagagtaggtatcatgatttgatcagaaatttgaaatcaatttcgaagcaaagaaaaagacaactcggtatgatagccctcgactgaatcacctcgacaggcattgatcagactagaccggtggagaaaagagacaaaactcacgctgaacaagaatatctatcacctcttgtttcgaatgtatcatgagttggtccgggtcgtcatgatcatgggagtacctgaacaatccagagttcggcatacttgctgaaccttacaagggaagaaagagaaagaccaatggctgacaaaggaacagtagcacgcaaaccaaccacttgaaataggatggagaaaggaagaacaagaagcagaagagccaaggtggggcaagaggtgcaagtcaaagaagactcaaaagcggcggtggtgtgaaactgaaacgggtaaattgttacgaaatgtggtatgcgcagcagtcgaccgggccaatctaatcttgtaaaaatgttcccgatagtattcacgtgatccagcacagccacactaactttctacattcatcatcttatactcctcctacaagcttcatcctacctcattcgacaaggttgttcattcccgtttatcccacacactctgaattttacgaggcatcactagatagatgggagcagatcaatccaagcctaaacagtcaggtgtttcaacaaaagaggcagagtccgagcccgacttttatacactactccaaatagagttagctcttccacttagttttcatacttatactttcttccttctcgcgcaccttcgaaactaatacgacaagctcggttggcttgaaaaatcagcgaaggggcaggtgaatcagaaattaaagtgggtccgctaaaatgcacacaagaatggtcaacttgaacttgcttggccttgtgaggctcagcttattcattcgctctttcccttgctttgaacgattagaaagcatttcgcaaacaggctcttatatggcatcctggtacgtttcagatacgccgagatatactgaacagtgttctcattagatcatcttcactcaaccaactatgtgtatattcctcaacaacataaagataagaacgcacacagagtccaagaatctacagctcacttcgcgcgacttcaggaagcgtacgagatcctttccgatccggttgaacgttccttttacgatagacaccgaaatgatagactggccgccgtagaggttactaccgaagatttcgaggatgttcttaagggaaggaaggagccacctagaccgacaaagaagagtagaggtatgggcgtaccagagttgatgaggttcttcgagaagagagtgtacgacaaagttgggatgaccgacacacctggagtgagttgctcttcctctcaaggattggccctatctataaccgtttggctgaccaacccatcttcttgatcctcatcaataaataaaaagggattcttccaagtgtacgagactctattcaagcatctggccgctgaagaatcagctcatgcggagaaatatatggattatccgtcatttggatcatcacaaacaccatggtctcttccgaaacgaaccgatattcaggtgggtttttcccacttccgtcttgcgagtgcgcgcagagacgtttctagagataggcatctgaaaccttatatttcctttcttcgccacaatattttccttctgtgatgaggataggctcgaaatttctatacaatctggtcaacattcgtcaccgagaaaaactttgaatggatcgagatgtgggagactgagcgagcagacggaagacaagtccgaaggttcgcctgtcctccgtaagactgcgggccctgatgtaccgaattaatctcgcttcattttaccgtcgtatctggcgcttagattgatggaaaaggagaacaagaaggctcgggacgatgctcgaagagaatataatgagactgttcgagtaagttaatcccgctttttctctactttcaattcgatcgggtctcctcctcctacttgccgcagactcagatgtccctttgtttcaatcatcaggctctggtagctttcatcaagaaacgagatcctagagcacccaaacccaacactgtccctctcttccagcctactcttcctcgtttatccaactcgaatttaaaatcaaattcccaaagccgatcgaatcttcagccggacggcccggtgtataccccccaggattggcaacgcgttcaacctgggtctggaaccgttctttccgattttgaatcttctgatgaagaagaccatgacgaaggggacgatgaggggggtgaagaggatgaagatgaaccagacggggtgggaagagtagatgcaggtgaatctggggaatgggaatgtgtggtatgtggaaagaccggaaagagcgaaggaagatggagagatcatgaaaggagcaagctgcatagaaaagaagtggagaagctgaagagagagatggtagaggaagattgggatcttgggcttgatggagaggaccttgatgatgaggatctcgaatgcgagcaggatgatgaggaggaagaaggattaaaagaacaagtggatgaactgaatctggcagaggaggaaggatcgataccatcttcaaccaatacacttccaaactcaacccaaccattcgactctcgacactctcaaacccaagaagaacaacacagagacgacgacactgacgatgacgatatctcaccaatcatccaaggatcatccaaaaaagcccggaaaaagaaacaacgagaagagcgagaagccaggaaacgagctgaactggctctagctagttcgactgcctcttcttcaaagggcgcgcgcccgaatgttgcccctatcaagaacccagggcaggaaatagatactgttggggtaacaagtggtctagaagaagagaagaagggagatgaggataaagataaagacgaaaaggaagaggaagaggaggaaacaggaggaaagacagagatgagcaagaaggacaagcgaagggaacgtgaacgaaagaaaaaggaagctctccagggtggaaatacttcgagcaaagaatcaggagaacaaacaatcgtcaacggatcagaagtgtgttggtttttcttgttttcagttttctttttatatttgacatcaactcagccttcctgtcctcactatttttatcgaaatagaaatgtacgatttgtaaatctaccttcccatcacgcacgaaactatttgcccatatctcgaaaactggtcacgcagccctcaagaacactggctcggccggaggtggtggaaatagaagattactagagggaagtgatgatgaagcagattcaggctcggggaggggtgggaaaggaaaacgaaagggcaagaaatgacactgtcttttcctgtcccacctctctggagtagatgaactatgtcattcttcatccataagaatttgacgaaagtatccgtcaagcacatccaatgataacatatgttcatacaattttcaaacttgtaaggctaacactccaggaaataggatgatcggcaaaggccttgtacatataatgataggcagatattcaaaatcatgcttgttgttgctgccggttgaccatccgttcttctagaaatggaatccagatactatcaaaacaaacagaaccagaaaaatcaaccattcagcatctcgtgattatttcaaccaagagacgagtagctaaagcgaaaaaggagaatttacttactctccatccagatcgaagtcgcttttaaatgtgaccgctgccggtaacacgataccccatggtctgtttgaccgcgatctccgtagaacagctatagattgtcgaggatcgacccctcgagtagaatgtttgggtgacacatagtttgttggtgtttgtacaagatggtcaaatggagttggaagaggggcagcaggtgcgttagaatcgaaaggtgctccttctgttattgcgaggcctattataggcgttggtgcagatgtggtcatagtctttgtatctgctgtgggcgtgaatatcgatgtttgtgtcggtgtgagagttgacagcgaaggaatggaaggagatgtagatgcagcaggtgacggtagggaagcggaagcgggccattttgattggacgatggggagatgtttcagagcctcacgaataaggagacaagggcctgaaggaacgggtggtacgttcgaatgagccgtaagcttgatccttgagggcgctgtagtcaatttcctaagcggcgatttgtctatcgagccgccatttgctgaaaccagtccggtgttctctatctctacatctccactcatctcgtgatgtaagccgtctactatgttggtctctccattatgctctgagcctgaccgcttcagagagagactcgatcgttttctgaccggccctgtgggatcccttggcagaaactttcctttctctcctctagcaggctgaacacccccgaaaccaggtaaaaatctccctgattcatcccgaccaggtaaatcctctccctccatattctgcaattggcccaacgtagagccaacgtctgctagaaacgaattattgatagagtcattggtcgaatggtgaccggagaatttccgtcgaggccgtggtttgggcgtgatgacaggtttatggccaacatctaatccaacagtatactctagaccaaggtctctgacatatgctttggaaggtcgtatgttgttggcggcggcagtagaagcatgatggggtacgatgataagagaaggttcgtccgaatcaacagaaacagaagagtatcgtctctttcggctggtcgatggtttgaacggaagaggcgaagcgggtgaagtaggttgaccggctggagaagtcgaagcggttgatgacggggtagaaggtcgatgtttaatagataaaacagcggaaggaccatcagtatgtcgcagactagacactctggatggcaaaagagtggtggaagtcgaagctggtaagacaagaatgtcggtaggcccttcctcagaatggtcagcccgtcttggttttctgagcatcaaaacggagaaaggaccaaaaggcatacatgcagaacaaacggtcagaattcaaccaaggagttgagggtagaatcccaaagaagaagagatgcaggagtaagagcaaaaacacatacgaatgatcccgagctggaagaagaaggtcgtatcgtttgagaacaacttcagcttcttctaatagcttttctctcagtgcctcagggtcaacctctcttctgggtctcccgactacggacgttttctcagctatagcattgactagagcagagaaactaggaagaacacgggaacaaagagagggtcaatgtttatagtcttgaggaggttcaacgccgatagcaacaacatggtactatgacttgaacgataacgcagaagtagagaaaataatctcttaccttttggcttccatacttttgatcaattcgattctcttcttaagattatacctttcgtgcgcccatttctctttctccagtcgtttttgcttcttttcgaatgtctcgtattttcgatgaagttttgtgtaatattcatccgaggtgtcctgttggcctgtcgtctgcttgtaccaattcaagataaagaagtcagtcatactcgggcaggattcaagcacagtatgatcccactctgcccttcctatctaagttgatacgaacagtgctttcctttcgtcgacgtagtctccccccacccacgatggcttctgtttcttcatcaaggattttccaagactgggtcggtagcttcttcaccgaagtaggcgcggctgatacagagcttttactatcccacgatgacctgggtccagcttctggtatcggcggaaatcctgagcggtctatcttcgtattcgaggaagaggtaagggcaggtgctttgggttgatcgactcggaagtaccctgactgctcgggagcgctcaagaggaacttgattggggggaacgtatcttccagagctggaacggggtcttgtactattcagacaggcgttcaagaagcgagatgtgatgtaagcttccgctcaactcttcaatgtcctttggacatgaaaacagaagatgatagggaagaaacgcacccattctttccctgcattcttcaacaatttcctcaatctcttttctctccatgaagctaaggcctccaagacctgtagcactggccgatacagatgatcttttcgcccttacaggaacttgcctcggagcaggtgctatttgacgtcctctgtccgtagatatttttctagatttcatggttgatgatgaagctgcttctaagtgaatagttgactttggcttgagagcggtgatagtcgacattctctctggccaacgggaggtgtcatcttcattgtcgtcggctgcactgcttaatggcgaagaagactgagccctagcctttcctttctggattggtgttaaggagtctgtggtgggaggagaaggatgactctcgaacatggggacccgagacgatgaaggcaaagacgaagagtttgaggggaacgcgggtatatagccattgacagatttactggcaaccttaggcttaccagatatcaacggatttctgtcgagtatgttcatccaaacaaaaatgtgagcacgtaaattcaagacgagttctgtcctgtcggtttcgagaaggataagggagggatggcgacaaagtagacttacgcgttcaaggacgcgtcgtttctttcttcctctacctccggattcagcagacgatggagcatcatcttttggtcagaaaagatgctccaatcgagtacaagagaatcgtgaggaatctctggatggcagagtaaagatgagcggagtgcgggatagttggcaggggggatgcaacgaaggctcagagaagatgatcaagaattgtccgaaaatatattaagaaacttttacagcttttgtaatggacgcggtcgcacaacctcaatatcaccacccacttctcttcccctcaagatgaacggccagccccagacttcaacatctccaacaggaccactccatattcctcctccagactacgtgtaaggccgagacataccttctagccgttcgatcggttttcagcgcactcctaggctccaagagctcacaggttgacacacgcttctactcacctgttgttgaaattgaacgatggtaaacagacctacaggaaatgaaggagtcgatcgactcgcattcttccacatcttggagcggctcaaggtcattctctctttctagaccaacttactctgtttgagcgatcttgagtagagtttcaatagatcattgtcggctgaatccgaagcatgctcttttgttccgtttctcggagggacacagactcaaaagagagctggctgggtgagagaaggtgtaagtctgatcttgtctctcttcattcgatcaccgactttctctgcttctgcccacgctccattcgttcggagggaaccccagagaaaggacggcatcgaagtaactgactgaaagaacccctgaagctgatcaataacaacctgcgcgtttgttgacctactacaggtaaaacaaccagagagcatcagcgtcagtatgcaaaacccgacagactctggcgatagtaaccaactctttatactatctgaactcttccctgtacttgtcttgcacgtctgaatataaattctcaggaccacatgtatcgaatgggcgtgcttgcattatgttgcccaaacgaaggggcggaaagaccgttggacatcgggaaatgcgtcatggtttgttgcgatcttctcttgcctttctgaaaggatgtcttcagagattatttctgatgggcttatttcttaatttttatttttattattaaaaaaaacttatcttttcagatggccatcgtgtgagttatcacgaaaaacagctcatctagttcaaaaggaagcatattcgttgacaatactcgttttcgtttattgatcgttcaattctggcgcgtcttaaatgacataaagacatgacttggcagaagcccagtgagtgtcgcatctaagtcaagcaacgaaaacgttctgtgttgtaaccgtcacttatcaatgcgcgcggccgactgtcgatcgaccacagtgttggtgatatcacccctgtggacggtgtttctaaggaagaaaagcaccgacgagaaagagtgagttctgaatttcctttacggtttgatccctctttatcttggaaatttttcgctttcattctgatattggctatccagtatactgaatcataatcctctgattgagggcttggatctaataggaggctatgcgttcgttccttgaggatatgctgcatggaggcgaagccgcccgtcggattggggctctttgggacgtacgctcaatatcaattttaagcctgctttctccattaacagcatccattttcccgttgatttattcgccgtctctttcatgttttttatgttgactaatgtgtgatgagtaggaatacgaagatgggatcacaccagaagcgaagttcgtcaaagatcttgaccggttggagcttactcttcaagcaatagagtacgagcgaggtttgttcttcttaatcctctctatccttgtccaacggggttacattcatgtacctcatatctcatgttttttaacctaaaatgcgttgatccgtttgtttgtgttgtgaaccgatagctcagggaacgaaaacaataggaaccttcgtagccgacacggttcggcgaatcgttcgttgtttttctttcctacatattcttccttcctcctgtctcaactcgttcatagtttcgatcaaatctgcacaagatcttcagctgatgtcgttctcctctctttctctccagcgccaccccgctgtccaagattgggctcgagacgcccttgttgaacgtactcagctgtatgaagaacgtggggatcaagccgaattgtggcagggagtagatgtagagaaactgggtgaacctgtagttggagattgggtcgccaagaagaattagataaacggtcacccttcattgttttgcttctcgtcttaatgtactttcaactggtcaaaagtgacgaggaagagaacccagtccagatactaagaactggtagaataccatcgatacaacggatagaacattcgactcaataacccttccctctgtgaaaatcactcatctctatgaagaatcctcctaagaaacttctctccattgagaatctttccggctattcacataaacatcgccttctttgcccggaggagcccatgcacccttttggccgggagcgaggttcgagacctgtgaaagagaaaatgtacaaaagaagtattggttagatttttaactcttgttagagagagatagggacaaagtagcaatcaatcaagatgaaagacgaaagaaggacgaacaaggtaccgtttgccttcgatcagcccttcatctccgaaagataaagcgtcccaaagagttaattgaccatttcggagagctggttgatttgactgaaagtctctaaactttatcactctgaacgagcggacttctcgggacgggcatctagactgtgtatgtcagaaacagaaaattggtgtatgttttttttccttccagtgagtcagcaatcagctctaacagttttgacaaaagatgggattaaaacagatgactgagggacagacatcaatttcatctaagatatcctgtccaatcttcgacccgtcctcctgatatttccgtttcataaatgatgccaactcagccaactggccaggttcaatcgttcggagaaacgctgcttgatcggtagcgttctcgagatcatcgaagagatcttctgcacctgcgccgcctgtcccagaaattgcaaacgaacaagaagcgcaaagaacgcacgaggtaaatatcaagattatatatcacttctttgagaaacggaagtagacagaaaagggcattaccgtcttctttagctttgaatcctcgagacaagcgttcgattttatcaatcaagcccaaaagatcttctaatttctgggtcagctcgctagcaatcttttgtttttcggcttcttgtcggtcctgtcatatagcccaatattaagtgttcccagagtacgagtacaaggaagatgagtgcccattctcttcctaattcttccagattaagagagaagatggaaagattaacatacattccatttatcctgtagagctctttcctctttctcaccccttggaaatccaggcggcgcacccgaagcgaggtctaccgcatcgacgtaccctattggaaaacatttcaagatgacgatgtccatagtaggaattaatccaccgtccggtgagagcgaggttaggcaagcgatgaaaggacgaggttggaatcctaacttggcgtcccatcgagcgagagatgttgtattacccgtgagggtgagataggtcgaactgaaactgagtagtgggggagctccgccttcttttgcttcgagctatagaacaacaaagaaagggggacgattgattcgtcaatattctcatgaagtgatctgacctctgcctcgtgcctaggcaatcctcgacgcactaagaaagaaaagggagttcactcacacgaactccgttcatcccaactttacacccaactcttagtttacctctcttcacagccctcgtcaagcagtcatcgacgttagccttaatcttgtaccacccatctgtcagctctaaaatgggcacaggctggtcccccgtctggtttggagcatgtccaggttcaggaggagcgggtttaccccatgtgatttgagagatacacagaataagagatgaagcgggggagacgacttgttcgtgaatcaactttagagacgatcgatgaccttgattgtattctctttcgtatctggtttcccgattcaatcaacagatatcgaggtaagctcggccgcgcccaaccttgaatgcctcaattaagaagtctgcgtaaattggtctatacctgtatctgatctgccttcctaattcttcccagctaaactttccttcggcaaataatgcaggccggcctcttacaatacatgccagtttccaaaggatctgggaccagtgattctctacccagtctctagtcgccccaacacacccttctcgaatcaactccgatcgcaccaaatctaagtccaaagcacgagactcatcagatggatcgatgaaagagtagaaaggcgcgttgagaagattaagcttccagatgtcttcaggactagatatagcatgggtaattttgaaaaaaaaaaaaaatgagttaaagaacctgaaggaagaaaaaaaaacactagtaaaaaaatagagcgcgacttacacgcccatctctctaagctcttctatgctgttgaattcaggcctgatgtaagcttccgccatcgtctttctaccttctaccgctacattccatgataggaggtcagttgtctttgacaccggcagtaacgcaagcaagaatacaaccaaagcaactatggaagagaaatagacggacgtgacaaatcaaaaactctcttcctcgatacactttgagaaactacgcccacttctccgtttgcctttgttttttctcttctgactcctgatcctatcatccctccagtggtatttaagattccttctctgctttcgcgcctcgaagcttcaccggccagtatggtttctgctgtaacccctgctttgaaaggcgtgctgaaccctgttcgcttggcgcctcgacctccacgccgagcgccttcgccagtaacagaattggcagaccgaggagtcaatcccaagccaccactcacgcctatcctgcgtaaaggtgtgctcgaaactgagttactccctccgatcgaagatgttatatttgaggaactagctggggagccagttgtgtttacaaacgaaggaggtctgttcaggggagatctaaacggaggccgggaggaggtctgtagatgtccggtcaaaaaaggtttccgaatgggcgtgcctgaagaagtcgtggtcgttgagatagaaagaggtaccgaaggtatacgaaacgttgtcggtcgaaccggcgtggacgatgaagggggtattgatgagggattcgtagatgatgaagagggttgtatggaagaaggggctgaagagggtggttctgagagagtgtctgatgggggtactggctgaatcgaccgattggaagaagagagggaagtcatcgtcggccggtgtatgggtcttgaacttgtcgtagaggaagacgaagaaaccagagtggtcgttggaagttgagccggtcgaagtcctgtaggtcggataggctgtgaagaggattctcctctcgagactagtcccaacatcttctgaatatcagtatctaagtcgctctcgatcaatttggcagcagcaagaagagctgcctgcgagggcgctttgaacgctttccctcctccagtttggaacccaacaaatgctgaggcaggtacgtctaccggatctgtcggatgctgcgtcaggtccagtcctaatgcctcttcatcttcctcttctatatgatactcttcgtcaacctttcgtctcttgctctcactcaagtcccctatatgcgaatctttgttctgggcttctccctccttactccagtttccctccaacgacacccgtttgccctttccttttggctcaattacttctagaagttgagatcgctcgttgggctgggatgaaggtagaggctcatctgtttcaaagtcgtccatgtcaatacctgctaataaggctgagaaatcgtgcgcaggtgcagtcctgtccgaaaaggtgcgaggctccttgacgggcgaggagggaattagctcatcagaatctatatccatgttgattccgtgtacaagagccgaatagtcggatggtattggtatattttctgttgccagagtactactcggtgaagcattacttgagcacggaatgatcggaggaacaaattggtgtgtcgacgcaggtagagtacctatcagtggagagtttgactttgggaaagaagagagtagagagtgctcgttgtcgagaggaagagatgatggctgcgactcagaggggctgtctattgtagcgtgtgcgagaagattgggtaggacagaaactcgtgttgggttgggtggtcgggtagatagagcgccttcgtggtttgtagtcgtttgaagaacaggtacaaaagctaaccagagaaagatcaaccatgttgagctgacaattcatttgaaggagagattagatgacttactgggactgctagatgattcaagctgcttctcggccgcatatatcccatcagctaagctctcgctctgcgcttgtttgccagcatccggtttaggtgaacggtcttttggactgttttgaggactaggatgatctgttgccggaatcaactccagatcgacttgagctagatcaggtaggtcatcgcagtccgtcaacggagatgatgttgaagaggatggtggagagggagatagaaaagttggatcctcctgagtcgtggccaaacccactgacggtgacagggctaggtttggtaaggttgtttgaccgggtgaaagggccgagccagacatgcagcagaaaggcagatagaggggtatctcaaacacttatctatgatctctatgttctccctatcgcctttgcctgctggaaagagggatatatctgacgtgacgagcgagattgaagtgagaggtgagggtaagacgtatggtgagttgatgaagaggacgatcgaatagagagcatgcgatgtcatcgcttaggtaatcagtaacgttgattacttgcggttataacatatggttactgtagatcttaggatatatcggttctctcgatcttctagatcccgcatcttgatatctgacatccaacatccaacgtcccactcacacaggcaaacaagcagtcatgtccacgtcagctcaacgaccttcatactcctactctggctggggagcgtccaacactctcactcgtactctcgcccgtcgatcgccttttgccaccagaactattcctctcgcggcccttcaagcacaagctcaggcccacgcggccggagctgccgccgccaatcacaacggaaatgccgttgataacgctcagcaacaacgacagcaaacgttatttgggccgatcatcgggggagaggatgacatggatgataatggtctgtttgatgacaaacctcaagcaggaggacgagttcgtgagtctgtaggggttgacgtcgtcaaaggttgggtggataaaagcaagacagagcaggtcagttcttggcgtttttctttcttgctcatttcgtctgaattctatcttgttctcgtttcctgtatgtttgtctcttctgcccgaatcacaccgtttgataccgagtgtgatggaatggcctttataaaaagaaggtggagctggaaattgagcgatcttgcgatctgaagtgccaaccaaaaggctcgcactacggccggcagacacaggcttttcgtgcatttatgcgctttctctttccgcgcgagacggcggcgtttgtcatcatatgtacccgtcctctcttgaactaacatctgctttatatctcgtacataaacgtccttgcctttaacgaactaggctcctcatccgacaacgactcttcaatctctggtaaatctaaagcgaccaactctgctcctccaaccactacaatcttccctcccggttgattcatcctctccacacgctctccatcttatcaaatttacgtacgatgcctcgacctcaaccacgctcatcaccctcacgctttatactccaactcctacgcaagccaacccactgaatgtggttcagcagattgttcatcactccactcatccgggcggctttggtcggttattcgagcttaccgaggccgaggcgattgatctggctacggcaaagctgatggcagacgaggcctggggaaagtacgagcgtcacattgaaaacttggaggcagcccgacagaagaacattgtcgataacgagggaaagggatctgtccaggcaactggagaatcccgggcggccgctgctggacatgcaagatctggatcgaggtttaatatatttggcaggggctctcgaggttctgccgagcgggatgttgaggcacaagtggatgttccgatggcttcgctcaaccttaacaagactgacggagaagagatccagaagattacaaggagggatatgcgaatcgttgtcaggcttgaagctcgtggcgaacgaggtacgtgtttgttgcttcggtcttttagaccagctgagcggcccaacggcataccaaagttctaaccttacttatcctctgtctcctctatcatacaggcgagcctctgccttcgttgaatgctcaacgaacacacgtcgagctcatgcttcaatcggaagctcaaacgaccgaccgggttccttcagccgaagaacctgttgtggaatttacgcagaatgaaggggaagtagaccttacatctgttccgctggggttggaagaaactagtggatcccggggtggacattggagtgccaaagttgtcaagcgggaagccctgattggatctcacaccttccatctccgcgagatctttggtctcacctcgtcttctgcttcctctaacgacccggtcgccccttcgaacgcgctttcttcgaaccaatcggccgaagactccaccttgaacgactgtatcgtctgcctcgtctcccctaaggatgtggtcctacttccatgccgacatctggttgtgtgcaaagaatgtgcggtcgggatggtcgaattcggagctggaggaaaggttatgagacgggaagaagcagcagatggactgaccggaactggcgaaggcactgctggtgaaggaaccggagccggacagggcgcagaggggacgactgagggacaagcccaggagaccgtattgacgcctgcacaggagaggagaaggaagaagaaggtcaaaggatggttctgcccagtgtgccgacaaccatacacgtctcttcttcgaatcgctctgccttcgaccaagcccggtctccaacagactgtggatgggcatattcacgcttcccatgttgatcacgcggatcctatccctcgtgcgcctagtcctgtgcctactctcccaggtcgagcggcctctgtgctctaccctgcagaggatgaacaacggttctttgccaacgacgatgacgaagaggaggaagagtccgaagggcagaggcgagagagagaacaacatgaggccaacctgttggaggctcaacgaccgacgttcgtgttgggggatgagctggaggatgagaatgagaggacgaggagagcggcttggggatcggtctgatgggctggctttattctctcgttttcttgtccccctttgttgtttggttcgacgatacgatctccccttcctgatcgcctatcttcgctcttgatctcctctcgctcggttttctgtattccaattgatcacgtcttctcttgcctttggttttttttcttcttctttgtcttggtttccggattggtttgtctcttgtatcttgatacgctctttcttctctacgttttgtgcttctggtcgtaaactatcgttttgatccttgttctcgatgtctgctctattctccgttattcttttgacttttctttttcttatgttgtgtagtttgtatcgaatctaacattctcctccttctcccttctgtcgttgttcttaatatatgacacttttttccctttcataatgaaaacctcctcgctttcacagcggcctgatatgcactgatacatgttgaattgctcggtaatcattcaattacatatagatcttacatatatatatgtgtgcaatccgttctatgaagaacggccttgcaatatttcatggtcttttttctcttcttttcttttctttttttttgggagggggggggcttcgttgaagagggagaaagataaagataaagtcggagttgatcgcattcagctcgagttcggtttcccaccctgcgtagccgcggaaggagagggtgaggatgaggatgaggcggacgaaaagacggagaagaaagcgtcgaggaaacctgttcgttgggacatgtccttcttggacgcttctctcgatttctcgtcctggtttgtgtcgaccgacgaggcgagaagcaaataaagaaagaaaatcagatgagcgaggagaactgtttagatacaagtggattaggacttacgactccgtctttacagtccctgtatgcttgaactgtatgtacgtgcgcgatcggaagggaagagaatcatgacgggtcagagggatatatcacacgtgtagaattgatttcagtccggtgaggggaaaatgacgaacagtaatcggtacactgtcaagataggcatgaaggagacctatttagctactgatacatctcgaacggtgaaacgaaagggaaagggaaaccagatgaactttttccttgtcaaactggttttgctccatgcaaagcatcgactgctgggctgcttctgcgcacgggctaaaacaccgaaaggtggaaacgatccgatgaccagcaagatagtagataggttagaccacggacgatatttcctcaaagggtagagcctctacacagcgcagagctcgagagataaaagtgaagagaaagtaaagagaggaagtcgacttgctcttgaaatttggagacgacgtttcgtttctgtttgtaacccccaaggttttaaagaacacataagccttccgtttatttctagcctcgtctctcctgatcctctgatctcccactacattctttctccacaaacatatacacacatatgctacaaacgaaaccacagttgaccgacctgcatctccttccaagtcaatcccgactttctcgacccaggggtcatgttggcctctctttctctgtagttcttcatcggttcctcatccgtcggtttagaatgtgtgcccgctgggaaaggaggaaccggattcggcttgtttgttgatgaagacgatgacattgtagtccttctctctccttttctttgctgatggtgatggtgatggtgatggtgatggtgagttggctaggtgagtttcgggcaggatcggatcgatctctcgtgatcatcttcaaaagaagcgtatttgaaactgtggatttcataaattctcagataagggtcctctaggctcgtctgacgcgttcgtccgtcggtcggactatgtttatacatccaaacacccagtccttctacaacagcagatcaaccctcagagaaatgtcctccagagctcgacagtccgtccgggttgagggatctagatccgggtctggatctaggcctggacttgctaagagtagatctgaatctgaagccgaagctgaagctcaggaaggtccgtcccagtcatcttggcgtacacggcgtcttgtctgatcagaccacgcttaccttcctccttctatcgctcccctgtttcgactcctcatgatcgtcctacggaaacgaacggtggttaatacgttactctgtgatgcaatcgctcacgttcattcgtggtttgcccaagcgctctacaagatctctcagttgatggaaacggggctggataggacgagtctgaggatatgtgtatcgatgatcgatcaaggtgtcccgccagagactctagccgtgagtctatttttctttaaaaaaaaaaaaaaagagtccttttcctatcacgcacatacatgcaccacatgcgcgcgttgttgtttgactcgtttgtgagtttgggtatggaatacctggtccatcgttccttcctctttcctcgtttgccttccttccgggtttcggatctttgggttcgccgtatgaagacggccgtgaaggaactaatggccgaagcagcagcagcagcagccgctgctaccaaacggtgaactcggtcgaaccgttgtcgtcggaaaccaaacaagctgggcgggtcgaggaggaaagagctatcagcaacttggatacccggcctataatcttctgttctttgtctttgtccttcttttttttttcttttttttttacctttctccttatatatatatatgtaaatacaaaacacagacgcgcatacaggcgtataccctgatcttgattctttgttctttccgtgtcgtcttcatgtctctttcacaacggacgcgaagatggagtgagccaggacggaaaaggacagcgcgcgcgatggtcaaacagagttcataagatcgttgataccttgatagagagagagagatataagattatatatatgtgtgtgtactagaaagttcttgtgaaaacacaacacgacagcaaaccggatacgctcgtgggggacaaggaaaccgtccgcccggaaagaaggagcgaggtcagatccgtctgatgaacaactcgtatccctccttgccactggccttgacgacgcccgtgccgagctctacgtccttccaccggaccgagacctcgacggtccagttgccaagccctgccagtttcttcctggcgtccgattggacgggaaacggtaatctgtacgccaggttgggtctcggtgtgtagcccgattcgtccggtgggatcgtcagcggtggcgggacgtgtggggaggtcgcatcggccattgccgtgggcggtggcggcaacggcggcggtgtcggaggaagcggaaccgggttcagtgggacggcattgatcaagacttgcagcgcatacgtcttcttaatcgtgccctccttgttttccccgtcggctcgttcgcccggctcggtctggccgatcccgttgggccgtggaccagaactgggaccgggggagagaacgaggtcgaggtccaacccgacgacgtcttctaggaacgcgacgctgtgcgacctgatccctcttccgttcgaaagtctcatcggtcgggaatctttggattggaccggtcgaagttcaaacgcggagaggatcgggcgggggattcttagcctttgcttcactttctgccccggcagttgggactggggttggggctggggctgaggttggaattgagactgggactgagattggaggtgtgggtgaacctgagaagacgatcggggatagttggacggaagagataatggagaagccggtcgagaatttatactcgataccccgtcttgagtcgtctttttcggcgtaccagccacagcagcggcagcagccgaggcggcggcggtggtggtggcggtggtggtgatattactaacagtagtagaaggaggatacgtcggatatgccgatgtcgaaccggcccctagggaagaagaagacgaagaagacgaattggtcgacaggcccggtcttccctgcgcgtgatacgagggaggggccagatccatcgttgttgttgttgttgttgtcgtcgtcgtcgtcgacggcggcggcggcaatggcggcgggtgtaaagaaccggctttcttgacggacgactttgtgttttttccatattcggtctggccgggatcaaggttgggattcgaactgggactggaataagaggttgggatggaaggctcagaggggttcggatgggccggacggattcttcctggtggatcgatcggtacaggctcgtaggccgttgtgtgatctgtggactgagcatccctcgatcgtttcgatcccggtgctgctgctgctgccgccgaggtcaaggtcgaggcggatggagaagaagacgacagaggttgggctggctcgtcttttggtttcctgttcacgatcaactttatcggaggaattagggacccaggactagctgttgactcggtatcttctggttttcgtttaacgatgatcttcgggacgtgggccgaggattcgtctgtcgcgcttccggtgggcggattgatggatggatgaccgagggaggacgaggaatgttcggcgatgactggatctacgagagaatgaaagtaggtctgtgaaggaagaaggaaacaaccaagagaccgagatgtaagtataaccgaagtggtgcgggtaggacatagaaagaggaggatgagaagaagaaggagaaggagaaggagaagaagaacagactttaagctcgacggcatctaacgcgctattcatttcgaatcacacgcgaaaaggagagagagagagagagagagagagaaagagaagggtttgtttctgcgcctgctgaaaagaggtagaagaaaaaagagaaagaagactgacatctgactgtcgtccaggttgaactcgagggcattagaaaagatgtattcgacatcttccaaaaaatcatcgactagatcgtattcagacctcttcagtttggtctgttcggggtggacaaacatctgtgagtgggtgtcggggaagacaagaggaggaagaggagggaatggaaacgaacgaaaacggtgttgaaggctctgggtcgtttgatggtctcgtaataatcagggtacattgcttttttgggaagatccatgaattctgtcgccagtgtccgtccactgaaaatggaggggaggattggaccgagagcgaacgacgcgggttaggagaaagaaaagaacggagaagacgatacatctctgacagagaatcactaacgtcttgtcttttttcgcgacaactttttccagccggttcttcagcaacttccacacgttgacctttttcggttttttcccaccggaaccttcggtctcgatgtgcgcgtctgggaggacgcgcttttgtttatgaatgcctggtgcggcaagcagtttgagatggacgggcaggcctctctttggtttcgagcttgtcgacgcgattggttgagtgtcgttgttggtattgttgtcgtcctcgtcttcttggtcctcgtcatgttctagctcggtggagactgtaggaggtgggttcggagatgtgagagcggcataagtctgtttcgcgagtttctgttgatgccaaaaggagaagaagggtagggggaaggggagcgagacgggtgagtgaagagtgggtgcgtatgaagaatggagagaggtatgttctggctcacgtgaaggtattttgcgtcttgaaagataggagagcccgtcatgttgactggttggtttgatggatgagagacatgagatcttgtcagataggagtatcaacaggaagagcgaaaaggaagaaaccggggtacatttcttcgcgttccagaatacgcgttcgatctctgctctgatggtgtctagattgggatatgaagagttttcgatttttgcctgtggataaagattgattagaataaggtgtgagaggttggaagacggaagatgaggacgaggacgagagagagagagagagagagagagcgagatggaggagggacgggaaagataattggtgatgagccggaaggagggaaggagggaaggaacaagctggagggaaatgtgaagaacaggaggaacggacctcaatctcttccagacagactggatgtttgatgacatcgtagtagcttgggtactgtctcttgtttggcagtctgagaaagtctgtggcgatgagtctcgcgctaagggatggaaaggaggaaggacaagaagaagaagaggcagcgaaaggaaggaaggaagaaaggaagaggacgagataggattagtgggggagacaactagaggacaagccacgaaatccgcacgtaccctggctctttcccctctgtggccgacttgacgacgttcagcagctttcttcctttctccatcacatcctccgggtcatcccacacgtcctggtggtgtttcgaatggggctttgagggctgtgcatcgtggtcgtcccgtctcttcttcaaccttggctcggagatgatcaacgacgggtcgagtcctgccactcgtttcggtcggtgtgggatattttccgtgatggccagaggttctgtgggtatgtgggtggttggatctggctgtctgatctgattcgaagccatctgtgtgtgtgtgagtgtgtgtgatgtgcgtgctagcacgagtgaacgagatgtactgggtatgcttgttggcagtatggtgatcgctccaaggacgaggaggaggacaaggagaggggagacacgacagacacgcgcgtcaccttaaggtaaggatgtggtgtgggttatttgaatttaaccatgaaagagataatcaaataattaactaagtcgtcgctctcttcgaagacactaccaagtcccaccccgatgagacaagcgacgaggcttccttggttctttgcgctctttcctttcttttcttttctctttgatttttgtgcactagacgcgaacgtacagaagatgattccagagaagacgtgtgtgtgtgcgtgtgtgtgtgtgtgcgtgtgtgcgtgtgtgcgtgtgcgtgcgtgtacgcaagaaaagagagcaggaaccagcctgcctcgatcgaccatctccccccccccccggcgggcgcaggcagaggcgtaatcttatcggacgaatgggctggctgggaaattataaccctaacacggctaaaaattccctcgtcctttttttccccctcggataagattcgatagcgagtgtgttctctgttgcctatcgaccagcacacacaccgagcggtctatcagagagcaagcacgaagcatgtcgtccagccagagctcggccacgaggtatcatattccggaagccagtccgtacgcgtccagttcgtttgacgagttggatcaccgacgttagttctttgtattttttttttattactatcattccttttccttcttttcttcttgggggcgggggcaggcggttttttttttctctctcttgttcttctcttgttgggttctctgtcctgtggttctcttccgttttcttcggcgttcttcgagtggtctgatctttttgtgctctgtgcgagcttggatggccatctgatgaacgaactcgaggtgatatgtgtgtgagtgtgtgtgtgtcctatcgatcgcacacactcacacactcacacacgccgaccactcgagggaagaagaggggaacaaagaaaaacgagaaattcggcctatcgtatctaaatcttatcggctcgcttttctcttgcgacccggcacacacaccgccggcaggacgtgtgtgttcttggtgttcatcgtctttcctctttcgtgtgtgtctctttcgtacgcacacacacacacacgcacacacacacacacgcacacacacacacacacgcacacacactctctggcacaaggctcaagagagaaaagagaatagaatcattcatccattcatccatcctggtgtcgtctgtctgtgctcccccccctctctctcttggtcagcaccgccttgttccctggggtgctatcttttttcatcctcattctctttatctcttcccttctatcgatcggttccaaccgttctctctgttggtcgctctgttggtcgtgttgctgtgtcctggtgttctctctcactcactctcacacgtaccatcctaactgatcaaccctcgctctctccctctctctctctctcgcacaccgctcgctaatctcctttaaaaaaaaacacccacacccacactttcaaatcttatctctcccatcaaatcccgctcggtctcttccggctttcttttctcttctctcctcgctatcatccatccattcgttcgttcgttcatccactcatcctttccccaccatgttcgccatcgatctcgcacgacgtcatctactaccatcagtcaacccacagtcatccctcgcagtccatcatccatccatggtcgaccactcgccacccaggtccgcacacaccgtctttcccagacctctcgacagatcaaaccacagagaccatccatccgctaccggcaccatcaacggtacgcccccccttcgtcctcctcctcctccgccgcctgccgccgccaccgatgacgacagcaaacacatcgctagcgtcaccaccaccccaacaaactctccgcctaccaacacctcgctcggtccatacccgcacgggccgatcgaatcaaaatcacccgtgaacgcgaacgtgaacccgaactcgaactcaaacttaaaccctgtccgttcaccgaaacctgtggtgtccccccgaccggcccaatcccgtccgtccgccggaacatgcccgggagatggtcactgcaacggcaccggcggcaaggccggttgtaccggttgtccctctctcaacaacaacccggccggcggagagccagacggaggagcctgccggtcaacctcacctctcgtctcggcgatcaaccaagcggccggtcaggccgtcaacatcccaggcatcacctgtatcaactgtggtaccagtaccaccccgctctggagaagagacgccgaaggaaacacgacctgtaatgcctgtggtcagtgcttcctctcgtatctttcatatcttttctttcaatccccccttcactcgttcactcacctcctctttctacatacgccgtcctcccttcgcgttctccaggcctctactttaaattacacaaccaggccaggccggtcaccatgaaaaagacagtgatcaaaaggcggaaaagggtgcctgccgctgctgccgtcgtcggtatccccatcggaagagacgacaccatcgttagtctttcctcttcctcttctcctctctctctctctctctctttgtctctcttcctaccttctctcccatcttcccctacgtcttgttcctccatccgacatctgaacactttcttctttacttcttcctccctcttctcagcacaaggacgacgactcccaacagcaggacgcggccgaggcgttaatctcggtctctcggtcccagtcctcccaacactaccaacctcaatccggaccgacccccccaccgccgtcatcggcccacccctcgatccaacacgcttcctccttcacctcggccacgcccagctcgaacggccgagggacaacatcgaacgccagaggtcgaaaacgaaagtctcaagcgatgctcgacccagattctacccaacctgctgccgccgcctccgccgtcgacgatgacgactacgacatgctcagcgacacagaagattccattcattccgccgctcatcctccgcccaacactcggccgacccctccgccctctcttccttctagggacagggattcccaaacgggtggccgacagagaaggctctctggtggaaacacgcttgaacttccacccctgatcggcggcggcgatagaggttcgttggccgggcgagagcccagtccgttcggcgggccaggcggacacgaaggtggtccccagtcgagagcaaacatgaactcctcagggatgagcgccaggctacctcctccttcgaccttgcttcgatcgcccagacgtcatcagaacggtccgctaccttcgctgagcggtggtggcggaggaggaggagcaggtgccggtggcaccggtggtactggcgcatcaagatctagcacacctcccatgctcgatcttcaccaccggcatcatcaacagcaacagcatcggcattctccaccgccgatccttccatcgccttccgaaggatatcgctcgttcaactctagtcactactccaacaataactccaacccgaacgcccctgggtcttcatcctcaataggctacgacagaggtcctgccgacctgtccagacatcacgttcactctgatctcaccaggcaggatctcgaatcgttcagggatgaactccgtcaaggtctagattcactcgagaacctcctcggccggacgagccgaacgttaagagctgtcgagctcgagctcgaacggtccgtcaaaagcggcggcggcggcggggccagcataggcaaagatctcgccggtggccaggacgactcgtacgagggtcccgggaccaaccgatcaaaagacctagggaacggcgcgatgctcatccagattcagagaaaacgagggcagaccttcggtccggccggcacaggtggaccaatctgggggatcagtccggtgtctgaggctcttgaaggtgcttaactctcgagtttcttcatcttctctctcttttcttctctcgctctctctctctctcttcctccctctcttcagccgcgaaattctcctcctttcctctctctttgcttactggttctgtatgtatctatctatgtatgtctgtctgtctctgcgcgggggtgtgcgtgcgagtgtgtgtggtgtggggttcgtttcgttctagaacaatttctttttataaatctttttctctttaatctaaatccaagagggcaaccctatacctcctttatcaatgtatcggctctcttcctcctcctcctcctcctcctcctcctttctttccgttcccttcctgctttatggagtcttagaaagaaacgtttgtttgcttcctcccaaccttttgatctggtttcccccggagaggtcctccctctctccttccggtgatggagggtctctt

SEQ ID NO: 2328 - DNA, 27570 bp, Xanthophyllomyces dendrorhous
ggggggaggtaacccaaaattcgaattcacatgtcagaaccggcgaaagagcggtcaaaagaaagaaaaagaaaaggaagggcagaagagaaactcggagggggaggaggacgaacctgccgatctcgagcatcatccttcgtcgtaagtacggcgcatctgttcgtgaccgacccaaaggaccaaaaagaagaaaacgaaacggataccccaacacggtcagccttcgtcactcttttcaaaaaaaaaaacaacgaacgtaaagcaaacaagggacggactcttttgagaaaactcccagatgccatgtcctaaacctctcgaacaggattccatgatctgacaagcaaacaccccacagtcatacccgtttctctgttgcggcgtgatcttttggtatcgttcgttttcgaatttcaacaaggaagcagacatcatgggaagaggcaaaaaagatcaggatgagacggtgaaacgggaaggaaaaaagaaaagaaaaagaaaactgtaaagagaaaaaagggcgcacatcatggtttgtatagtcgacccaaccggtaaaatcaaagtcgaccttccttttctccatcgattcctgctgaaggtaatctctcaacagctagatgccacgaaaacagtaaacacttgatctacatctcaaacggggcagaaagaagaaaaaaacagatcaaggaaaccagacaaacccgaaacactcgtcgagcgatgccttcacccatcgaatcataagcctctattcgtttgtgccttagattgacaaccgcgcatgtccaatgggagtttccgatgtttatcggtacgagaatcatatccttttccaaaatattgatctatttcaagccaggactggtcagagaagaagaagaaaaagaaaagaaaagaaaagaagaggatagaaaacaacacaaaaactagacaaaccttcttggtccatcgagcgagtctagctttcacataccccaactcttcaagttttgcaaagaagaacgtgttaaagtaatgaacgtcgtagccctcccaaccgtcctgtcctcctttcccctttccctttcccttcccgttcgtgcctgcttcccgggcgatttcccttcttgcatcagcagcatccacaatcaatcgcccgtaaaaattgatgacctcgtcgttaagccaacactgaggtttcaacctcaacagatcgtcgtatctgacttgttcaggaccacacctcgatgtatgggtcttgttactgagaaggttttcgacctcgagcgtttgagagggtgtaagttctttaggaagttggacctgtgtattttcgggattgcgcatttcagtcagttccaaaatgtgagaaaaaaaagcgtccagtgggatctcagaaaagaaacaaaaaagagaacggaagggacaaacccgtttggcagcatcagctcgctcgagtcgagctttgatcttcgcatccgagtcttcgtcctccactttcagatcctcaaacgatggcaagaacggaactgaatcagtcgtcctccttcgattttttttaaacacccccgcgcgcacagccaaatgccaccaagaatgatagacaacagaaccacggtgagaaaacgctaagcatgattgagcggagagaagaggacatacgaagcggcagaccgagcttcattcaacctcaatctctctaaaaagttgagatatgtcgattgactcgagggctttccatcgtcacaagataaacgtgtcaagccaatacgggtaaggaagccaattcgagtagtttctgtagaacaagagcgaaaaatagacccacatcggttcgtcggatctgctccttaatcccaccagagataaacctatccctgttagacgtatctcccaaagctcgcctcatgctgttctctaatgtaaataaaacaccgcgtcgtactgttaggcagaaggactcgaacaacaacataacagagaagatagatcaagggctcgactaaccggctaccagattcttcagagcctctagcgacgcgtcatccaccggattatattcacctttatctgccaaccattcaacccatagcctttccttttttcagaactacctcctatatcgaacatatagaaaaacaaccagataaaggtcttaccgtcggcttcatctcgtgctaaaacgctccgaaccaaagcccttaccaactctgccttccttcctccgcctgagcctccaccaactggcgtactgtctaaacgtgcaagatccccatagagctgtctacccgcgtccaacttccttcctgccaaccctaaggatttcttcttgttcgactttgtcagaccaccattgaggacagttcgtctggtcggcgtggagcccccagagctgatgaggtcagatccgggtctcagcttagacggcttggattgaatgtcccctaaccatggacgggatcgtggaggtgtcggcggaatgtcgtcatgaagtgaactatcgtgtaaacgccgagctgagaagggaaaggagacagaggtggctgatgtcggtggtgtggatgatattgaggagtcagatgtgcttctcagatgggatgctggtatctttgttgtcatcgatgatgacgacgacgatgcggacgaaggataaaaagacgggcgggatagtgctacactctccattgtggaacgtgacgacggtttaggtggagagtgagcggcagaaggcgagggttgaataatctctgcgagtttgtcccagacggacgagaatgattgggcccaagtagcctggtgtctgggttccttgttgtaccggtagagcgccgtaggagaggaggggcctcggacagagaggtgggaggacaaggattctaacgtggacgggcctgggagaacgtcttgccccgagtgagggtgtgtatgtaagtatgcaggcaacgggtgataaggacgagaggagagcgggagatgaataaacattggccttccaaccctctcttgaccaacgggagcatgagactaaacagaggtcgacttaccagttggatccagaaaggttgtagagagcgagacgcgaccatttgaaggtgaaagagcggccagctgccgtctcttataggaagaggtaccttgtggtgtattataagaaggcaattcgtccgatgtaggcatatgttttctcttgaacgggttcaggatggacattagatcgggagggactggtagcggtcggtgttgatggtgatggtgatggtgatggacggacaagggaactcatagtatagacgcgtaaggagcatgttagatagaacggatacgtcttatgtagatatttgaatatttcatctataattatcggtctttgccgtacccactcttcctcagacctaccgtccaccgacactgatcattgttgcccaaatcttgctcattcatacagctggcaatgaggctaatcggttgggagacagtgatcggtctggagcttcatatccagttcagatcatcgaaaaagctgtttagtggtgggtctttctgttcgacaagcttcttcttcgtcacgcgctcgctcaatcgtttcaatctccctctctcctacattccagcctccaagactgtatgggactcaagcccaaacacaaatgtctccgtgttggaccttggatatcctggaactctgccagtaggtttagttgagaatctaccgctgcagtatgttttaggaacaatgcgcctctagttacagcgctcaaatctttctgtcgaacacgtccatgggactcacagatactctcgcccgggccggtagagctcgcgctccagacggctcttgctctaggatgcactattgtaggctgttgatctatctgatctgagaaaatatttcgtccttatgttgactcgaagtctgaacgacgattgatatgccgtcactcacttagcctcctaggtcgatgtttgatagaaaacattatcattaccacgatcaaccgttaggctatcagatcacccagcattatcgtttgtctaccgctcttcataacaatcaacctggctgaccactcgatgctgacatagatttgttcgacgacatgttgggatcagacccccttgcgctccgcggatcattggcgattccgacaaaaccacctaaagagattcggatccagcagatccaacttgaacaggacacggcaaagactctaggctcactcacgaaccccaaccattcacttatcgacttcaacagagcaggtgttggcctgatggaggttgttacagaacctgacttgagatcggctgaagacgccggagcattcgtcaagacaatcagaggtgtactgagaaggattggggccagcgacgctgacatggaaaaggtgtgtcaatcagtatcctatacgtttttttcctcctgattcatgcatctgcaacttacactcgcattcaaaacaaaacagggctctctcagagtagactgcaatgtatcgatcaatagaattggcgaaccccccggaactagagttgagatcaaaaacctcgcctccgtccaaaaattaactcttgctgtagaatcagagattaaaagacatcgagccttattagaatcagggaataaagtccttcaggaaacgagaggttgggatgaaggcgttcagggaacggtagcgttgagagggaaggagtcattgaaggactacagatatatgcccgatgggaatctgcctgttcttcaaatcgatcctgtgggtctgtttctttctagacatccaattctttccatttttttgatatcgcgctgacatatctcaccaaaggcctacatccaatctctacaagagactctccctgttcttcctcttcagctacttgcgaaactccgagaagaatatccgactgtcccgttatcggatctagagactcttcttggtctagatcccgaattttactctggcgtcacatacttcaaagaccttgtcaagaagcgctcatgcatagattctgatgcaaaaacaaaagacaacagtgagcataagcaaggagaggggagagacccgaagacatgttcgaattggatcatcaatgagctgctcggggagatgagatctcaagggaaggaatggccgtccggttcagatttggagccgagtatgagtgcaggagtaagtgtagaagagatggggaagttgattgacttgttgggtgaacgaaaactctctggtttgtctaaatctctctttcgtgatgtctttcgacctcttattgatgatgctggatcttattttctttctgcattctattctggaatccctgtagccccctctgcaaagactctcctgcaccacctcgtaaaatcgcctccatctccgtctcgggtctccgtcctcatccaaaaacacgacctcatttcccccgttcttacacccgcctctattcgcttggctctgagcgctttaatatcctcccatccagacttagccgaaaccattaaaagtagacaaaagccagcggtgctgatgaaactcgttgggctggcaagagaagcttttggaggcaaagttgggttggacggtgtcaaggaagagctggaggacttgctagacgttaaaggtgtactggaaaggtttttagaggaaaagaagaagcgaaaggaaagctcaggaaaaagaaagcgaggtggaggtgcagagtaagaatttggctcaattctatgtatcttctttctacgttacaaatcagcgcgcaactgaataattctgcacaatcatctccattcatcttcttcaatgttcatctgtttcaatcaaacttgctttcttcggataagtgcttaaatctactaattccaatcctgtttctgatttcatctttatcttgttcttggatccttaagctcaaccgacaaagcggtacatggctgatccaatatagtactattgatttccatgggaaaagaagcgacgagttgacatcgcgattgatgcatatcagcatataggtcaggtcatatgcaggacaaaggaaacgagaagagtagcacaacaaactttgagcccagcaccttcaacgctactatcaggcagcaacaagaaactagcgtgaaacgcccttggtaacctctccacgtcatccggcgtctttggtttcttgtactctgtcacgttctgaggaggcaagtttctggtcgcttccaacaaagaagaagcattgggtgtaggcgtagaggaaggggtggagggaaagaagtagaggacagaaccggtagtggtcacttggagtggagcgggagctacgaagcaccgcaattcaagaaattaggagaaatcaatcaatcacaagacaatccgctgtagaccatagacaggagaatgagacttgagaagcagaacatactggttcccaagacgggatgaacgtcgatacattgaatatcatgtcttgactctgggagtttcccaaaaaagtcggcaagcagttcaggcgcgagcggtgtgccgttccatgtagttatcgagcttggtcggtgtaatcttgggagaagctttatgttgccaagtcaaagatctaaacggctgagaacgtgagagtgatacgaggatatgatcgagaagagaatatatgttctaacctgagaacgagcctccgagtcgagcgatataaagtaagtgcgaacaaagctagtcggttcatataattcaaagaggacggtcaggattgagcgtcaacctggctgaatatcgagcaaggaaggcgttcaaactttgcttattgactcactctctggctcctctgcatgcgatatcaactgttgccacgtccgtcatggtgtcaggtaagtgtatatgtaagtatatgtgtacagaggcagcagactgaagaaggtgtggcctacaaacgacacttaggcagtgctgacgatacttaagccagatcattcaaatatactggatgacgaccttccggcactctaactctcaactctcaaaccttcgttaagaggaaggctcttaacgatctccctctccatctccatacatctcgctcctactcctcactaattcagatggatccacagacagatccttcatctccgacccagtcgcctgtacttccaaaggaaggactcagtcttcgtacgacaaggtcaaaatcatccctggttgagttcggatcgtcatccatcagtggactcagggacaatatctcgacagggatcaacacactctccactggtctcaagacccaagttgagaagagacggaaagatctcccaaaaggaattgaaataaagtacgtaaattttcttttctatcccgagcatgcttctccctctagcttcctattgccttgacatggacggaaacagcgatgtccgcccgatgtgcatagtttattgtttgaccacaaagaaaggaacgttatgtgggacactcaacgctgacaaccatctcaaccaaatttcctcattgctgtgttgtatcgtatggttattctttccaatctataggtttgcgcccctcaaaggcatgtaccatacctattaacctgccccccctctccttcatgcatcgaccgatgttaatcttctctttcttttatcaacacacgcgcttcctctgtgcgcaatctcgatggtccaaatcgcgaccccaattttagtcccaagaaaccgttggtttgacgtccttgccttgacttatgtttgtttttgccgagaaatacacttgcttgatgctgatccacagttgtatggggcttttgccaatcgccgaacaggccgtttacaaacaggcgctggtcagtaacctttctttgcttttcctcagtctaaggactccgtgtcgtctgatacagatattcaactcttcaacaacgatcatctgtatttcagtggctctctggtcaacccttcttccgtaagtattgctactcaaatggtcaaacgaagttcgaaattgaacaatctcctttgatttatcaacccatcaggatatgcacttctatctttctctggatgtggttcgttggatgaatacttgttgtatcttccgcaaacaagacaataattccttatactgatcactcaaacactcagctctatcccgagactgtggcctctcttgattccttatcttatctgggtgttctacatcgaccgcgcgcccgtactcggcggcagacccaaacgatggctcagaaggatgggcatctggaagtgagttttggcttggctttgctggtacgaattatctcaataacagattctgatcattaacttcatttctacctggcccgaccagacactttgccaattattatcctgtctctctagtacaagttggacttcttcgcttaccgctctcgtacaacgcacagtagttgactcatcattttgcggtccgcctgtgcactcttcaggaggcttccctgcctttagacaggaagtacatctttggatatcacccgcacggttagttattagctctgcgcttgaatcgctttgcttcatgttctgatagctgagatgcttgttgaacgttgaaacttatctgatataggtgtcatcgggatgggagctttcgccaagtttgtcaagtcttactttcttatctttttcaatggttattcccaacaaaaattttctttcccttcaatcttacaccacagctttgctacagaaggtaagaggtcactgatatcgatcctttcaagcatgtgtgattcatgctgacaatccccctttacctctctcaatgttctgttttataggcactaacttctcgaagatatttcctgggattgaaccccaccttttaacactcgctcctagtatgtcatatcttcttcttcattgacttgacagcaaattgagtgcctggttttcatgttgacgtcacagattttaagataccacgtatgtcgtctatgtgttgatggctctctctggttcacatgtcatgaagacgacctgatgatcaaatctccgaattgacatgctgcctctctcagtgtatcgggacttgcttcttcttctaggaatgtgctctggtacgcgtctctctccttctcacaccttctggttccgatgcaacaagctgatatcaatatatacactcttggttctttcaatattcaagtttcaaaacgatcatgttcctccatccttcgtaaaggaccccctggtacagccatcgtgatcgttgttggaggcgctactgaatcgcttcgggcccacccgggaacagccgacttgacactcaagagtagaatgggtttcatcaaaattgccataaatgaggggttcgttgtggatacaacatctcaatccatactggtccagttgagaatctatcgcgctcatatacataggaagctaacgtgtatttcttctatcttttcatttcggtgtcttatagcgttgacttggtaccggtgttttcgtttggcgaaaacgatatctatgatcagctgtaggtctctcaataggatttctggatttgacttcgtattttttctgtgcttacctagtaactggtgcgacgaacgattgatctggtttagagcgaatgagagagggacacagatctacaaactacagaaaagattccaaagcatctttgggtttactttgcccttgttccacggaagagggtttgtccatcgacgtctgctagaatactctatcttcttctgcgaattgggctgaatttttatttaatcttgcgatctgaaaatctaggttattcaattgtttgttcagtttcttcttagagtgactaaagaacgatctttttgaaaaatttctattaattgctctgttttttttttcaccacgaaacgtccagattcggttggtctgatgccatataggcaacccattgtttctgtagtatgtctgcacaaattttctttcttgagttttctcgttcaatgattgccgcatctcacgtttgccacttgtctgtattcacatcaggccggaaggccgatccgagttgtccagtgtaacaacccgacatcggagcagttgcaggagacacaaggacggtacatcgaggagcttttacggatctgggatacatataaggtaagcttcccctctcgtttgagttgttctaggcgatgatatagggtttgattgatcagcctttctgaatatgtctttggtggaaacaggacgtgtatgctaggaacagaacaaaagagttgacgcttgtggactgaactcttcaatggtctctaccttctaggttcaatatgcagattcggatcatccatagtcccattgccctttctaatccactcatccactctctgttttgctgaggcattcatgtaggcctcatcctgcgcactttgtcttgctattctctgtgctgtaccatatatcaattcgtttgacctctatctcacgcttttgcttcgtatccatattcacacacatatatagcatgtattgcatcagctggttttgtgtttctctctttcaaagagatagaagggacctagagctttgaccagccgagatctcgtctgttcctctggaagaaggacgaaatccatctgaagaaccaatcgacccaactccaagccccaccttctctcactctctccatcccgcgtctaccgacagattccccttcccgatgaatagctcgaagatcatgaactctgaagtcaaatggaccttgttgttttccaaaatcagatcgacacatcaaactgattgaagagatcgaacttgggtctagaggtttagcgtctggcggtgttcgacctctataacttggtttgaacgagtcgaaaggaatgaacactggtttggtcgtttgttccttctcggaagaagacaaggaggatgaagggatgtataagatgttgaaagaagggaggtgaagttgagcttcataagagacggtagaagatagacgaccatcaggcctttgtgtcgcttcttgggttttcagtacgagtgtaagcgtctgaggtatctcctctgaggagggtgaagcgggcgagatggaagaggatgatggggtgggagaaagagagaccgagaggccagagtagatctcgatgggtagttgcaacgggtcggaagagggaaagatgtacgtttgtgaggcgaagcctgctccgcctagagtattgatatctgttcgacaatccgtgtttgccataagaaactaggatagatgaatgaggagaagaccgaagacgaaccaagggttccatagaatctgacacccgaaccaacactcgtgatataggattgcgatgatccacctcgaactcggtcgtcgactgctttccagtgatcgagttcaaaaggaaagttattgagagcatttgctggagatttctctggcgggtagaaagtggatcgcatgttgattgtgatggtttgatgtcaaagacgatgaaacctcctctgacctcttgcatccatcatctctccagcattctaccccattctcctacatttgctattgcctcgtgagtgtattacgtatcaagcgtgagcgtttctctgtgtctcagatgaatctgtacagaaactcgctaagtatggctcgatgttgaaatgttcggttctcgcagctgaccgagaacatcatcaacacgacgggtcctcaccaccatcggatctagtcatctcatccgtgagaacatagtgatcaacctctttcaactcaccagacctcggtcgattatttgaggagatatgagtgaaccggagacgtttcaaatccatcggctacagattagtcctactcagattccattaccatcttcaccggaagaaccataccaggtccgggctctgtctccaatgattccctcatccgagtttcctccttctccttctccacttcaatctcctttcccgtttagcaacgcaattagaactaaacgtccgacttatgaaagaaaagattcttcaaaagtctggagggacccaaacgacacattcaatcaacaattggccattactgtcaaagctccggtcggatcaatgtcgatttctccggctcatagagagtacgttctatgccatgtataactccgtctattgtttctacattgctctacttctagaacgttagaactaacgaacaaacaacttatgtgattattttttggtgtgtcatttcgtagcgttgtgttggccgcaagacagggattgtacatcatcgatctggaggccaccgccagggtccctcgatttcttcctcaagggggccttcgtgttccagccgatgtacaatggcacgtactgtttatttgaattgaactggagtatgttgctcaatctgatcagaggtgtatctttctctcaaatttgtcctgctcgaaatcgtgatccataggtctccgcattcaagcatggcccattctatcgtttcaacatccgcccagaaactgttagtctggaatctcggtctaccaagcgagaaaggtattgagagagaggtggaagcacatacaagagcggtgtcggatgttaattgggccgttttccatcctcaagtggtcgcgacggctggtatcgacggatgggtcaagacttgggatatccggaccacaatgagaagagattcggggagagtcagcgcttggggttggggatgtgagtctgagtcttccatgcttggtaagaggagtgaatgagaagatggctaaaatacactctcctttttgcgggtcgaataaaaagctgtcgcaacacaggcacgttcttttggcggaccatggccctcgactttgtactgatcgcctcactcctttcccgctcaggtccgatggaacagaaagaaggagcatatatttgccagcagtcacgacaacaaggtccttatctgggatcaaagagtaagtcttatcattcacccgcatagctcgtttgaatacgaagctgtttgtcgattaaatctcgggctgtcattccgcctctctagatggggtctattcctgtgacaaggttatacgcgcattcatccaaaatctatggaatcgattggtcaagagagaatgggcatgagatggtcacttgctcattgggtcagtctttttcactcttggcccagtccaagtttgctatatatacacattcacagccactgagacatccatcaaatgtgttctccatatattttagacaagacggtcaaagtatggaacatacactccttgaatgaatctgccactacgcccggcacagatacgttcgaaccacctatctacgcaccaacacctttgatgtccggcacatcctggctgtccccccactctaacgacatcaagaccgatctcgtcgaaccagatcgaacgatccggaccaatgctccagtatttagagcaaggttcttgccatttggaagaggaatcttgagtcttcctcaggcaggagagacaagcttggagatgagaagattgttggatcatactcttgagggtcaagagagagaaaaagtgatcactcggttcgaagggcacacaggttggttaaattgtttccatcactctcactctgcctcctgcatcatattgttcttttgattgaattctgtttttggatctttatcacaacagataaagtaaaagaatttgtgtggagaattcgaggaggcgagaacagcgatgacgacgatcggtctttccaactcatcacctggggtacggatcatcagcttcggttctggcctatatccgaaagtgttctgctagtgtgtccgctcttatgattttcttctgaacatcatctgatattttggctaactccactcgcttccgtgttcctcccttcaggatgctggccacaaaccacattcgcctatcaaagtgatcatgacccgtcgaggcgctccttcaaagtcttacattgatgaacccgaccttatcttaactcccccctcgacacccatcgattcattcttcagcccccttttaacatcctcctccggggcgccatcagttgacggatcctctttcaatctccgcccgatgcctcatgtctcggccccccttcgaggaatgaacataatcaacacccttcgaacaggaaacaatcatcagtctcaacaccatcagcttcataagagacaacagttgcaaaggcctaggttgcatcatgtcaactccgggctgagaaatccgatggaccactctgtcgatgcagatgagacagagccgagcgaggaagggggctcccaactcataatcgagaggagcgaagacgatgagcatgggagtaaaagtatgccggaaggcttagagatcgaacagagagagaaggagagcagactgcagaagaagagaagtagagcagacaacctgagcagttcaggaccaacggctagaacggtagtgccgatgactagggggacaacatttaggggaccaattcaagagccggatggagctaaagctgcaatgaactggaacaagtgcgtcatactcttttctcatctctgtcttcttttcttaccattcctaccggttcatgcttatcattcggtctcgttacaatagcaatatcgaggcgagttttagttattgctcatcgaaaaaaaaggaaacatgagacgaggtttgacaacgataagatctgacctattatgcatccgtgttgactaaaaacagtacttccaaagtaaatcattgaagacatccggcaaacgccgtaaaaactcttcccgatcttcttcccttgaaaaatcaagatcaggcagtcgatcgaaatctaatagtgtccaaaatatctccagaggctcagggttcatcgatgaagacagtccctaccaatctgaagacgacgaagtgatggtcagacttgagacagagtgagttgcaacttgatcacgagcatcgttggcaagatactaaacattatctgcggaacgatgttttgatctactttcagactcaaggaagttatacccatctataagagagaaatcaaggtagaaacgtttgacctggccggacgaaagctagtcatgtctctacaaggtccttggggtgcgccaacactagccaagattcctacacccactttcatccgaatcgggtttacctttcctaccaactatcctaaatcttcttcgagacctttcattgacacgttcgaaatgaaggaaacgatacccgcgaaagataaagcccggctcaaaggtcgagttaaattgctttgtgacacatcgtcaggaaattgcatgtataaagtcatgagtttcttactcggctacgatctggaggatgaaactagaggaaggaggagggacaagagactcgaaatgcaactgagggaggagagttcggattcatcagatgatgacgacgattctgtagcgattttgacatctctctctaaacaggatctccaaaggccttgtggagctacttttgggcccaacggtaagtcttcctttgtacagtctgtcaaatgttcgctcattctattattttatgaatctgtaggtgaattggtcaccttctttggagccaatccaacgcttcgaagtcgattggtaagccaaagcagaatggcttctaagtcgccttctcaatcgaagacttcgtactccgcccgatcaacatctacgtcaggtgctggtattgatcggcctctatctcatctgagcgaagccatgctgcggttgtcgatgacgatcaactcggaggacggacgtaaggcagcgccaatgatgctggatagcttgccttcctctcgccctcgaaacgtaattacttcatgattcattcttactctgattcaacattcgtccaggattcttaaataagaaactgacttgctaactgcaaacgtcttttctttgacttccttcacagaatcgccttcagattcgagaactcccaatgcagccctcctctcggtctcactctcgaacgcgcaaacttttttccatccaaatacacgatgcatcctccctgacgatctcctcgaagaagctggctgagcggtattggctgtctaagcgtccggcgcatgttctttgtcagaagaataagtcgattgcacgctctcacggaagaaaagatcatgaggttgcctggaaggtgctggaagagttgctcactccttttgctgaatataggaagaataaaaatgtacatgggatcaagtggacgcaactcgcgagagatgacattcaacgggaggatcttttaggtatgcaggccactcaagatcaagttgagctttggttagcaccccttttgtcttaagaaaaggttcccagtcatgtttccaatccaagaaagctgctctgaccctgactctcctcaaaatctcaacacgtcataggctaaagcatttttcagcccatggagattttcagatgctcgctactatgctatgtgtcttgcgccaatacatcccccccataccaggtatgtcacataattctgagattgtatgttttcgacagtcagagagaacatttcgagactaatctaccattcctacagatgtatatctcgcagaaaaatcgatcgatccacagcccccctcgcctgactacttcactatatttcgtccggctcctcctgtacctgctcgatatctgtctaggaatcttttatccgacgcgcctacaggtcgagaacgtgcaggatctccacaatgtcaaacactcgattctccctgtataggacagaactcttctaagccccctgcaaacaaagataccaatagttccagctggtcaattctgaatcttaatagcggattcaatatgcttggcagctatggatctggtagtgtagcaaattcatccggtacatcccccttccagatgagcggatcaggaatggtttctggaggattaggagaaggaagaagagaaagtgtagagagctcatccagatctccacatcgatctagtattcctgaactctctcaattatccacctccaacgagaaggactgtaagaggaattcaagccggtttctcagtcctggcgttaatagtacgtcaccgcggattcagtctgcaagtcttcacaacggaagtgggatcaacacacggccaaaggtggccttctctaaggaagatttgagacatccggtctcggtaagcacataccctcccttgaaaggagtagaagaaggaatgagaaaagagagagagaaacccaaagttggagtccgaattcgttttgagccatccttgtacgtgtctgatttaccctttgattctggccatgtgctgattcatgaaaagtcttttgatgagataactaacgctatccttataaatatatgtatcacacaattttagcacccgccgacccgctccgatatcgcatttgtcatcccgttggttatcgtttgccgtcgtctgccagagagcgtatgccgatcttctcctacgctggggtttgatctaccatcgaacagaattgttgaaggttacattccacatagatcatcttgttcctgtcgatccctccaaacgattagagggtgctgaagcaactgaatttggggatgggcttggtgagttcactgatcacatgttgaaagaagtagactgccgcctatctgtgctcttgatctgacgtaagtgaatatatattacttattccttgcgcttctttcaacagggtttgcttttgttccaccagacggagaagtcaagatactgaaatggcgaaataagaatttcaagccagagaagctacaaaaaatgcccacatcgtgtgcttattgtggcatcttatctcatggtacgtcttcctgcatcttcctcttgaaataaccatttcctaaatcaaatagctccggaattgacatgttttcatgtcatgtatggggaatcttggtaggagtcctccatccctgccttcgatgtggtcacgttctccatcttcagtgtgctagagactacttcctctcttctccatctgcatcagatttagcttcggatcattcacgaatttcagacgagaaagaatgccctgccgggtgcggatgcatttgctacgagaaagtgtccaacttggatgagcttatagaatcgagggtggttggttgatatcctgattctgtcaaggttgctatatgatatctatgtgcgtgttcaacaagacagttcgtaatatcatgctcaagcgtctcgataacgtcaccagacacctcatcgacttaagaacggaaagagaatatcataaatatacgcatcactctggactttgtccgatcactttactcctgacccactcccttcggatccaacttccgatctcgcctccagtacacatgactcttccactcaacctttccataatgcccgtctccacgccatccgggttttgctcagttttcacacccaagctcattgctacacgccagattgcttcaaccgttgcagaccaggcctcgcccgatttaataccgccaggaaccaaaattttctctgacgtccaaagctctccttcttcacctttggctgtaacagttgaaggcttgccggcgagcccggcctcgaccaaatgaagctttgagaatagctccttattcaccttagaaactgtggggttcgatggctgacttgcaggtagtagtgacaaccgaagaaggacctgagatgccacaaagagcgcctgaggtgaagatgatgagccgatcaacttgaagattagagcaagaacttcgcctctccacgatgcttttgggagcttcctttgctcttccgatgacgaagatgaggcaactgctcgagcgacgtcatcttctcccattcgttgaacgacattcaccagcaatcttaaccaaatttcctccatctgcaaggtggttccgttgtcttcatctaaaccttcgaccttctgaactagctttttcgcccgaccattcgcacctgcagcatgagatgataagatgtcctggtgcatgagtgtgaaaccaagttggatatgtacccaggcaaggaaaccttctcgcttgacaagggaaacacaagcggtcgggttatgagtcatgttggcaaagacttcaagaatcgttcgacgagaggggatgtcgtgagtagactggaagagagaagcaagaagcgaaaatgttcgtcttcgttgaaggattctccagtcctgagcaatcagatatagacagacacaatcggatcgtgagttacattgagtcatgtgccattttagtaacaagagaagccaatacggaagctcacctcagctgatctcataccatctctaataaacctaaggatccaagtcctctcttgcttccattcttcgtcgcccgaatagagcattccgtaaagcaatggaacatcctttgtgtccaactgagatctttggaggagaaaccgactggccaacgggtagaggaacgaagaggggttacctatcgatctcaaagtatgcgcaaagaacagactgatcaaaggaggtgatcgatggggaattcggttttcaagttcaggggctcgggaagaatgctgaaggatatgaagagtgtaaagaatttgggattgttcttggaatggagtagtctttgtgacatgatgacaaacaagagacgataacaagttcagcagtcatttcctctacatagaaaacacgagtctttaggttcagcgaaacacatacatggatgtaggagcaagcctttgagatcaagaacgaggcaaatgatctcatgtcgtccattctcgaggatagggcacaaacggccagacctaggatgttactcctaaggatttctacccattccaatccagttaattcattcccagatcctagttcgctctggtgaagcaaaacggcaaagatcgacaacaggtacagcggatcatacaactccgggtcaacttgcttggaaggatgcgatgcagcaggttgaaggtcaaacgttctcctcattgggaaagaagaacacgttttgagcactcgatttgggtccagagcaagaatgatatcaagtgatcgtctgatcgagcctgcagcaagaggtccatcaggggaccagcaggtgagcagagaagcaaccgaaacccttcgatgtcgttcgaacaagtggaagatagagaggatagtctcatctgatcggtccattgttcctcggtagagagccatcaaaggctcgatatgagctggctgacaacaagtggcaggagacatatcaaagagtgctcggatgacggctatgactgcgattcggagttcagcgggcgtttcagaaaggtgaagagagttgaacgatcgattcgcgagaagaatctggagatgtcggaccacgattgcgggctattcgattgagacagaacaaggggtaagcttcgcatcctgatgaaacacgagatcggatgatgaaaccaaccttcatgttagttctcgaagtgcaaactcgaaccagttcaagaacctctttggtatccatgcaatcttggagcgctacagtaaagaagggctcaagcaaatgacctttgagcgagttacctttgggctggagcgtaacaagttcagctaagggcaacagtgaacaatgagttgtcagcattgcaatggcggtagactctgaagattcgagaacttactgaaggaagtcacaaaagataatccggcagaagaatgttcattatctccagaaagctgtcgaactagtcgttcaaagccagaatcgatatatgcagcgacgatagactcgaggtgagggagacgaagcttcgcaaaccgaactattagctcacacacggatgaggtgaatgaagccgggttattgagcatggaagagaaggtggcggcgaccgcgggttgagcttctttgctgcaagctgcgagcaagtagatacactctgtgagagcgagtcgactattagcagagatggccgctccagcgaaggaagagataaccaagaacgtagagatcagccgaggaagactctcctcacacgctttccagccggcaaaggatgtatagttctcctcggctgatgatatatccaagaaggccgcaatcggagcagcaagaacgggaagagaaagagctggaagcgctttgagattttgagcaagccaggcggaaaatccttctcgagctgagcccgcctggtagagcaaaggagtgatcagttcggccttctcgctcgaaatgcctccgacgaacaacttgagatccatgggaattcttgaagccgacgtctctaaagctgagaaggattgaggtgcagccgcatcaacggccagggcataatcccggatagacatagaatcgttggcactagcaacttcaaatccggggagtagcgacgtcttcaagagaactgcaactgaatcgaccaatccgagaggaagcagaataggaaggcttcgttgagccatagcatgaaccgtcgctgaaggcggatatcgcttgagagcagtgaaaataacattgaggagtaaggcagactcggggttaagtttaccgctacttttgatggtaccaagaatccgatcggcaatggccacaagggcatcagcctctaaaaatcggatccaaggagcagtagcgacagaccacttgtttctaatgtcttcactagagtttaatagcaacgtagcccaacctaggtaggaggaggcgatttttctatccgcctcagacgcaggattgagggaagaagcaatgaggatggcaagcgcttgtcgagtggtaccgggcaagaatccagatacaaacagctccttcattgcctcgtcggtgataacctccagcttgagcgcatcgtaagctgtcttgtcgttcctatcacattttgataaaaggtgtttgaggatgttcacgcagcctgcgagagcgatacccattctttcagaaacgacaaccgccttagggtcgttatctggggatcggaggactcctttgactcggtgaagaactaatcgacaggctctacgaattaatggaacagaagcgtgtgatggaaggaatcgaagcgctcgagctgtcttggcaggatcggaaagaaggtcgaacggaagatgcaggaacacaacggggaaggtggtacccgcagggagcgcagcttggggcggaagattagaccatatgttgccatggaagggatccaagttcatgggatgtgtggcaaagactattaatggaagaaagtcatgattaatgaagtttcttaactaagtgatgcaaaataacacaactcactagcttctgtgctcagcttcttctgctcctgttgctcggctatgtaatggaagattccggcagtgctcaaaaacgtcaattgcttcttgagcaatccaacctcggcattcttttcctctccttctaaatctctcaaacaagtatctagtctgtaagaggtctcgttagaccaatccaaatcaccctgctttccgatcatcaagaacgcgagccgtctgatataaccacctatgatgaccgcctctgagctagatagaatcttaacatttatctttgctttgagctgctccagtacagtcatgaacagcggtgagggtgcctcggacagcttcctatctttggggggttggtttctgtccgccataggaacatgaatgaactccaacgagtcctcgatgtatttgtagggcgttttgagacatcgacgaatcgaatcatccaagaaagtaagaagagttgcttgcgcctcggacagactggtaggatttaaagatgccgatcgagagacgccttgcatagctttcagccagacttcgacttctgagggatcgtgctcgaagagaacagacgaggacaatagtcgagtgatcagtatcgaggtgtatgcccgggttgttttgtgtggagtcgagaggtatagagcaagaaggtggtagatgtatgtgtgtggagaggaacctgtagtgggagggaggttgagcaaggtgaaatcgaaccagacatatcttgaagaagacgaacataccagccttgctaccccatgctagatctcctccttctctaagcaatcttagcacatgcaactgacttaatgcctcgaccccaaaaacttcacttctcgcaaatccccaaccctcgatctccttgtcgtcgtcaccctcaccttcaccctttcctttaccctttccaccatccccagagacaagaagtttccctacatcgaattttccctcagcaatcaacccaggtagtgtaatctgataaagactgagcaatcttagaatagcttctgtcaagatagatgctcgagtagactcttcggatccctgagcttcaccgctcgttcgagtggcggctacagcacaacctacaacagtagccacatccggaactctctttctgatttctctctcgagctccttccttcgagcagtccacaagccgttgacaccctcttctaaagaagcctcaatctccttgaagacattgaaaacgttctgaagtttagtaagacatctagagagagtcaccacggtagtttgttgaacaagcgggtgagaagagacaagacctttggcggagaattgtttggggaaaatagaggggagaatattctcgactatagagttgaggggaggaggaatagatcggtagggaggctgagtgctggcagaagtagatggagtggatgaagaagacactggcgcgaggaatgtctccacagggataggaagagagatgatggtcgatagatgggcgcttgagatcaaatatttggaagatagtcggggatccaaggtaataccagagccagaccagtagcttatatttcacagaagatgaagcgatcagtctcactgccataccatgggacacagatatgaaaggacacgactaacccagcaaccaactccggacaactagtcagaatccttctaaccaactcttcagcttcgctatcctccccaactaagcccaatccaccagcaactcgcaagatctccttgatcgccttgttgtgaactccacctccgtttctcctttcgccaccggcctcttcgaaatcgtccaaggtagcatccatgttgaagttccgagggtaccatcctttgtccttgaaacaaagcccggcacctggaagcgtcaagattgaaatcaagaagtgatgagccagataccgggaagagtagttctgttcgccgttgaccgaaggaggagagggagaagtttcgtagagctttaaaatttctcctacaacatcgaccccaaaggcagacgccttggttcccctcgagattctcttttctaaaaaccagacctcccaccaaccctgtaagagacgctgaacgaccagggggtgatcttccgcgattggtttgaacatcgagtgtatgaccgaactctgattaaggatagcgagcttggtgggcaagtgagaagatactagacaagaaaggaggaagttgatggaaagcgttcggatgtctggtttgaccaaagggttactggcacccgctccgccaggcagacttctcccgtgttctaccagaggagctttcctcttcatcccgaggagtttcccccaaactttggagttgattcctcctgcattggccaaggcttcccagactttcgcggcccatcggtcggcgaccttgacagtctctcctaaggctcgaagggcggtgatgatgagatcggctctagtgccagcagtatattgagcaatcgctctcatgatcgtgctagacaaaattttgttcaggataggagtcaaggctgaatggaagaacgataacggagatagaagtgcaattatggcggtcaaagtcgagagcgggagaggaagaaggagaggggtgtttgtctgaaagcaaaagatgtggatgctcgccgtgagtatctaatgcatgaaatacacagttcatcaagaggaagggcttacggaaatagccaagtcccaagcgccgaaaacctcaggtgctccagggctcttttcgagatactcgtgagctagcttcactctagaatctgtagcagtgacaacctcgtcataccgaacggtaatttgatttcggaagccgtacagaactacagtgatgaacagaaccgagagtaaacaaaacagacgtcattgaaaaccgtccagaggatcaaatatatgcaagttgtatacgcctagaaaaagctacatactgtctttggtcgcttctggggaagacgcatctctaagagcgtctctaaactcggaagcgttggagaacttcatagctggcgcctctgtgacgacaggagcagttgccccaggtcttttcctcttcaaattgtgagccattgaggaggtttgatttagtttcgtttgtgttgcttgatcgtcgccaatcagatgaggaggtcctgtaagagtcagaaaccccgaaagcccaagggtgatgctggacgggttgaactggattgaagaaatgaagtttccaaaagattaagtcgaaaaactatagggcgtgactgtggttacagcactgctttgagtttcgcgtaaccctgataagagtagataagacattatagtgatgtccaaaggagctctcaactggatacattgacaaagtgttcatcaagaatactgacggaagtcaaatatcaatcgttgagaggatttgaacgaaaagcgaccgtactgaggtctgagctttagcaagaaagggacagcaacaaattgtacggggagggtagtttgaatgagaaaaattcgaggggaaataaacaactagagatctcctccaaaattattctataacgacgctgaaccaattaatcccgacgagcctgcctccctttagggattgagcgacaaacttctcaatatcaaagtttcgtctgccttcaggctttgagtttcgcaagggatgatcgctggggaagcaggagacttcattggaaggctgctccaaaagaatgaaaactggcagaagggtcgggtatgatatcagactttcactttctgaatattcagtattaaagaaagcagggataaagagaacaaggctcaccatatcgatggataccagttcctttgccaggagcgggtgcaagccaaggcatcaggtcatccttaggaacttctacacaagaagttgttgtgctaggatcatcctctcctgattgagcaagttgcaagagaatctctggatcgattgtcttcaaattaggtttgatccagtgtagaaaagatcgtgaagtaggggatgttggggaaggagcgtctgcgcgagatggcgggcatagccgttcgtcagatctttgtacgtcaaacatcctcttgaaacgaatagatgcccacaaacctggatcctgcatcacgagcgtgtatagcttgtcaggttctcccataaactcgacatgagtaggtggttcctgcacaacacttgattcgaacttgttcccgtacgcgacaacctcatttctaaatgagatctgtaagtgaataggaagttcttcctcaggagcgagactcgagctggggaacaaggcatcagttagagatgggttcgattgtctcagagctgcaagtggggacggattaaaaagaggcattgtatggagagtgcgaaagatggtgatggatgagtgtacgaaacaagaagagaagaaagagataacgacctatctagaatcaggataatttaacctcaccgacgtcatcgcgtgagtatcagccagtaaggaaacataacagtagaactcgagaagatctcgatattctttctgaaccagctgtcaacccaaaatgagccgttttcctggttgtttgcataaatattcattatctaccactaaaattcttccatcttgttcccttgacgagtacaacttcagacccgtcctccaccgcctcatcgatccgttctcgagattctaatatctttactgggctcgagaaatcaagcggaatatacaacaagtaaatatactatgccgaatgagtgaaaaggagtctgtggtcaggatggaactaagtatcaaatcaactctacaatgacactcactgtctctggacttccagcaagggggttgtatacaatcgaatgtttgttgacgagtgtctgaacgatctgcccaattgtcgtgtcctggcgatgttcgagtgcagagactcctcgagattagaagtttggactaaactaacaattgagaacagagtgagacgcactctttcgtaatataatccatccctcttcacgcctctgacatcaagtcctcctaagtctataccgaccttcaaatgccatctttttgctctatctctgatttctgttcttcctggcttggctgtctgtttcagcttcataagttctaaagctggcgaaacctttttgcgagcagatgtcgacttcgtgcttaaggatgtcgaaattggagagaaggaggcttgaataagagacctagtctgagctttgtcaatctcagctttgcttaaaggtggagcgcatgcatgtgctgatgagctccgatggctagagtcgagattacagcgagagtcaaacgctgtatagattggtttgaagacagaaacaaatcaaaagagcgactaacgatagacagagtgcctgcttgcatccttcacaaagcacatccgtcccttcaccctggtcagcttcatctgatacattccaagt

SEQ ID NO: 2329 - DNA, 9250 bp, Xanthophyllomyces dendrorhous
gatacattccaagttctcatccgcggatcctcacactcatcgaccatacatttctccactattctcgctcgtttgaggtcagcgagatgaactccattgtccgatcgagtacatgaatgagtggtgaaagaaatatgatgtctgcaaaatacctaaagtcctcaggacaagattcagccgttacttctgtcgtcaggaagagaatagcaaggtttgaaacggatacccgtatctgagcacatccaggacaagctataggtagaaaatccaatgtttgacaatgcttgcaatgagctccgataggtgcgagatccatgctgaacgtgtgaggtgacgtttatcgaaggtcatatatcgagttctataatattctagggttatgttcgctctcgatctaatcttagtccttccatttacacaggagagcaacgtcaaaccctttgttgttgtacagaatacggagaacaacaacaagaggttatgatagcagaacaagatacctatacaacagtcaaaaaatacatccgacttggtctcaatcgtatgcatatacgtatgtttatgcgtatgtatgtatgctcctctgcttttaagtaagtgtcttgcattgggaggcgttgtgagtgtgttgccccgcagtcacttgtcgttggttacaatcaccgtaacctcttcacagaacattagtagaattctcagaaaaaacctatagagttttatgaagaactatagttttgactgaaatttccttcccaggaccgctttccctcgacgtcaatcctctctttctatcaccatccaggttcctttccatccttttcgccttctcctccttttcgtgccttcatctgttcattccttcttgtatcaagcttgatcaaaagaggagaaagactcacacctgtttgaatcttgggttagaacacccggtcgacatccaaatcgaccagtctatctcctctcggcattatcccgatgatcctcaaggatgactccccggttggggtcctcacccgacaagtctcttgccaagagctcccctcgacatccctaccctcatcaacgttcctgctgtatcctccttcatcctcatcagcatcctttcactcagatcaaacttcccgcgaacggatcccttcttatcatccgccaacgtttcccccggccgctcatatggcagtcgccgatcctaccccatggtctaggtatccgcctcctaagtacaagttcaagactcgaatgagcagattcatccctgttcttctcgtcgtaggcaacagtgctattgtgcttggagcgagtgtgactttcatggtcgagtctgtcatccgaatcgctaccacacgttagtcttcgttgtttttatcctttcgtctttcttgtttaagcctgacgttctttatctttctttcctgacgattacttctgttcgtctcttcgtcttccaatttcgttctaaatacgaaacaaaaacaaaatacgaataaaacagacatcaaacttcagatgtttgcagtctttagaaacatcgtcatcccttcgaatattctgatcgctgcttcggtgtcttctctcatactttgcccgattcatcatctactaccccttccgagtcctgctagacaatccttcttcaaagccgaattctcgtacaaattactcaccattctccgcgcattgattcctatcatcaccacactcttataccttatcggaggttgctggttctttactgtcgctctcaccaaagatgtcgatgaagacaaggacgactcttcggtaccagtcgggaatggtgtcatcatccatccagaccagaattatccgtccgatggcaagttctgggaaccttggttcttctccgatccaaacgtcaagttcatcgtgttctccactcttttcgcagtgctcacatcaatcgtgtttttattgaacgcgttcgaacacaacattgttcatcgagtgttcactgggacgccaccgaagaagatcggagagcttgaacaaagagtcaagagattcttcttaggttcagaaatgtgcgaggaggaacttagtgcactcgaagtgatgcttcagactcaagatggggacatcgatggtgagggtggatcaagttctggatctgaatctagactagaatccatcgaatcaaccgagaagaggcgacgtaggagagagcgactggcaagaatgggcattcgtttcggcaccagagcagaagaggaagaaagtgagatgggtaccggtacttactctaggagatcgaggagcgatgatagggcgaacaatatgaagcagaatttggtctcgtggtggaagaccaagaagggaaagcagcgggaaggtccactgtcaatctgagagtcgttattccttttttcctcttcttcttttctttgtttattatccgcttcttcattttcattttgtacccttcacggacatatctctgttctcttatcttgtttttgaatcaatcttgttttctcttcctcatgtttttttttcttcccctacacatgacctttttatccttattcatcttcaatttcttttcatgtatcttctggttggccgtgcatacattcttcgcctctttcctcctgtcctcactcttcactttactctccttctcatcagctatccctgacttctttcttcttctttcgattgtaatgtttgctctctcttctcatcttattccattctctacttcttcctcctcaaaagcatgcagtcggaagaaggaaaatttggcccaagtcttctttattgaatgtatactacacggatgtggtgcctttcctcttggttgactcatctagaaccaacagctacagacattgaaccatgaatcgtaatcgatgaagatgtttatgaagagaccagctcttatcgggagtgagaaacgaagatctgtcaagattggagcctaaggtgggagaacaaaacaaagcaactgatgaagcgaaagataaaagagagatgaggaacctggaatacctagtatgcctatggttactaggaagacaatttaacaactggcacaagttacgccttccacgttgtccttgaattcgcccaagtaattgccaggtgggttgtaagagcatacatctattgaagataggatttaggaagaaaaacgagcagtcaaagttagaaacagaggtcagagcaccagcagaagtaagaggaaaaatgtgaggacttgcagaacgtcgcttccccactgttggcaccgaatgcatcaagatctgtgcatttagaggccgaacaaccaacggcggtggtgctcttccagacgacttgagtgaaatgatcatattcacccgaagactaaatccgttgggttataaccgacatggagcgagacaggatgagtcaaaatgatacggtattagtccggtggctttgtcgttcagataccaaaggaggacgcacaaagtcgtatgtgttagcttcatccgtccatgctttgacggccgatgcgatgggatagttgcccgtcccggccgctaaatctgatattatcatcgtcaacatccagagatcaaaatcagtcgacgatcttgatgcacagcagcatggatgtttgaaagtagaaaagcacgtactctctccatactgtccgccagaatgtttgaaagaacatttatcaccccacgcctgggcatatgctgccaatttagcatcccaagtcagagcgcgtgcgttgtattttgatcggaaatcgttatgcgctttcaagtatgcagtgatatcagcctctgtagctccagatggggaagcgggagcactagaactttgagaagcggtagcagtagtagtagaagactcagtaggaatagaggcggcggcggcggcgacgacggcggtaatcgaagttggagtgatatgcgcttgggaggaactcggcgccaactgagcagcgctggtagtgatcgaagcagcactagattgagcagcagcagcagaatccgaagaaggcaaggcggtagcggttgaggaaaaagcagaagaaacaagttctcactcatcttcctcgtcacagaaaggaatctcctcctcttcagcgatagtctggtttgcactgcccatggttgcttcagctggagcagaagagtaggcagccgaaggaataggagccgaatagatggacttaacagttcatttggacaaggtgaaacaaaaaagagaaaaggcgaaaattagcttcacagcctactcgcagagaagatcaaaggaaggatgcctacttcggatgagttggttgcacaaagagactctagaagagtggcattcatggagccaccaaaagtgtcatttccaactagacgagtatcattagcacagattgtatcgactaaagtcccattcacgagaatggtttcattggtggctgatccggatagtccaatagaggcgagctgcgtggcattgactccatgaagtcgatagatccgatcggaatgagtgtgtttgtgatggtggcgatacctatcctctcttcggaccctgatcatatcggcctggacagaggtggcgacaaggagggtggtggcaagagtgaggaaagggacgaacatcgtaagtgagaagaaacgtatagtataggccgagatttcgagtgcccgaaggagaagatatataatagccgagatcggaaagagtgaggaaagcgcaaagctacgaccagcgcggattctttcgtgagcttagtagacgagaatgagaagaagcaggaggagagttggcgaaagaaaggaggatgataacgagaaccagaacgaaaacaaggataggagaagagaagaaaaaaaagagaagaaaagttggtgtccatgatggaatgattccccttaaattctttctcgttataggggtacccgtttcgatgttttcttccacttgaaaatggactgtttattaaacaggcgattcaatggatcgatttcatttcgaaattcgaacgtagtcgagactggcgtttcaacatttgaaacagatattggtgtgccaagagaaaaggggtaagctaaacgcggattgtaagccataggcttggtgcgaacaatcctaaccggtgatggttgatacatggcttcatcggacttgggcgccctcagactacaaaaacccaaattcccattggtcatgggtttaattcgtaccagcctcaacctcatcctcaacagtcatggcagtatcaacatcagcctcactagcaacggcgtcaaactccggcatcctcgccctctgattctttctccggtggagggctagctgcagcatgttgcgcaacacgttcacatctctatgtaagggcggaaaagcccggcaaccgatatatcgcaagtaagtgttatggttaacgttttgtgtacggtttgctcaggcttagatgtgaagctgttccgatgggttagaaggctcaggctcaggctctagaggaattgtggaagtgccaaagacataggcgaaggcatagtgagagatgggacgaaatgtgtttcgaacgaagatgaaagaattcaaacttgagagaaaagagaaaaggggaagataactatagaaaaaacaaagaaacgaagtacttgtatctcttcgtcttccgagcatggatacaagatggaaaggatgcatacacgtatcgaaaacgcgagaggtacgaaacacatattgtctggatggtatgcaaatatatacaaggaaaaagcgtccgataaccgaaggctctgcagtccacagacagacagacataaacatgcagagacctaggaatacagggacagaagacacagagaccatgaaacacagagatagagagatagagagatagagaaatagagaaatagagaaatagagaaatagagaaatagagaaatagagaaatagagaaatagagaaatagagaaatagagaaatagagagatgagatagaaagttcatcttagctggcttgatcgttggtctcggggtagacttattctgcgctcgaaaagatagtagtcaccactgatattgattatgatatttacttgactcgacactcctaaacttttgttgaaatttcctatatattctttgctctctccgatcaaacaaactatacacatcaatataccatgactaccgcacccccaccttatcaacccaatggaggggctgtcactccagatgactacatcaagtatcaaccttcaattcagcttcctttaggggatcacaggcacgtcgggttgcttgcttgccaacgtaggttttttattctcttcattcatcagcagatcttccggcgtctcctgacatgagtcatcttctgccacctcatcactctcgataccacgttcaccgtatcgatttttgatcttgtcaaccaggcgaccctcttctacagaggctgtctaccgagatcttctcgtccaaccttttcgtactccctccgccgacaaaaggtacaaagtcggcaaagactcgaaaggcagcaaccgaaactccttctctctcgcctacctccgacacaaagatctacgagattgaatgtctcgatacttgcttgtttcccgagggtggaggtcagccttcagactcgggagtcatgattgttgagaatggactggaactcaaggtggctcatgtgttgagaaaagggcgaaaggcgattcatttcgtggaagttccagaggggaagcagttgttgattggagctggcagcaaggtcgagctcagagttgattggcagcggaggatggatcttgtgcgtgatctcctgcttattttgcgtgcacactcagttctcctaatcgtcacttcatctatgaacgttacagatgaccacccatacgtctcagcaccttctgtcttcattgctcgacgccatatccattcctacactctcttggtcattgactccataccccaacccgtgctacatcgagattcctcgagcacccaccttagaggaaatcactcagattgaactcagggcgaatgaactcatcagggaggccactaaggtatgggtagaggtggaagatcagaaccaaaagcaggagacagaggaagcgagaaagagtagcaagtcgatgcccaaggactatgaaggaggtgtcgtccggacggttgtaatcgatggggtcgatcgaaacccgttcgtctatctctcttccctctctgatcttgaagataacctcttggttgtctgaacataggaatcaagctgacagaatgggtgtctgtctagttgttgtggaacgcacgttccatatctgtcgctccttcaatctctacacatcatcccaactgtaagtgggcttcactggaagcctttgacattcaaccagataaattacaaacaagcttatagtacgctctgaccaccatctcacaccaatatagacgacgcctcattcgtcgaccactcgtcggctgtactttctcacttccgctcggttaaccctatacattcagaaatcgactcttcttctctcatctctctcgacagtcctaggaggagcttcggccgagactttacctgctcgcgtcgaggctcttgttgagtctagtaaatcaacagacaaagcgctgaaatcaataaaaaatgagttggccgggctgatcgccaaggatatcaaggctgatcgaaagggggaaggagagtggataaaagtcgttcatagagaagctaatgaggggacgacagggcttgacttcttgggagccgtctccacagcgatttgggatgatctgacgaaaggagagaagggattgttgatccttagcgctatgccgacgcctttcgttgttcgtttttgttgttttttctctctttttttcttcaattgttcgagctgagcctgacctcgttcattgatctccaccaataccgttatgatcaccacaggctacttctacatcaacccttcatctctcaggcacaccagaactggtgtctgcttttggagaagccatcaagcaggtcgatattttcaagggtaggatcaaaggaggaggcgcaaaaggtcgatggcaagccaaggttgaaggaaaactaggggaagaagaggtcgctgtattgaacaacgcagcgctgagtttgagaaaatagatcacctatgtagagcggatttcgtcttgtatcggtttctccgtcacgctcttatcatcgttgtatagtttgcctccatttttcttttcgtagctttgttctcctccgaattagtatgatcgacgattctcggctcgtcgccgttttcaactttcgggattttatattcttacggtttgctatagaaatagaggcaagatttgaaacgtggaagagtacacacaattccccgtgagaagaaagcttcaatttggagccgagagtcaaataaagcatgccgatcacatccaactataggaactggaatagatcagaatcacaaattcaacttgtctccttctcaattcactctcttccgaatgagtttttccgaatgtcgatttctccggttcagacaaaagtaatttaagaaatagagaaagaagactatgagcacaggaaatatttataactgattgcatgctaccgtacggtccgcgccttatccggttcgtgacgatgtagaaaatcccggaccgtgggagaacggagggaaagaaacaagtgttgaaagggaccaaggcgcgtgttagaattatcttgatgtgatcggctaatgcggactatctttcaatccattattgtcctcaaaatttatacagagcaacaatggagacaacagcgacaagggcgcatgcatttacttgagtgattcttaggaaaacagaagagatctgaccagtatggcacattcaatcgagacagtaaggtaccaagatcacagaaggatcaacggcaaaacctcggacttgaggatcaatcgcgcagtcgccttgaatcctgctgacctcacagatcacgtccggtaagtatcagacatgagcttctaccaaaagatgcttgattcaccagatcgttcgtttcaagtctattcggccattgcgatcctttctggagagccggtaaaatgatcaacacctccaagttctatatagagcgatcgttctctccctctggcatttcctcttcctatttcccctgtatttgcaagaccctttccgtcctatcacagtatacgtcaggccttcttgacttcatttcgtcttgctactaccactgctgttattatcaacaccattacccccgctgatcctatcc

SEQ ID NO: 2330 - DNA, 1231 bp, Xanthophyllomyces dendrorhous
atcctatcctatcgcaaggatgtcgatgaatcaacggccagtatatacccttgaatccaaaacagggagtgaagaggtcaaacaagagatttctcacgaggaatatagttcggatcaacaagagcctcagctagactttggtacattcaaagatgccaaagtggtcgaagtctgtgagttcatagaccttcatctttccatctaaagatggatggaaatacgtcggaagggaaggatttgtgcgagtcggagacacccgaaactgatcgcgtcccgctgcttttttcggatgaaaagttaatgcacaattcgctgctgcaatgaaagctgagaggatcaatccccgatccagggaatcgttcatgctttattttgtgtgcgccgtgtgttgtatgttactttctctgcctggccctcttatttgatcgactactttgagcgcactaagtttacatgaccatcttggctttctcctcacgtcctcgtctggccgatatgtttcccagtcctttgcgcttgtacgaatggttatgatggctgtgagtatcaatcccggccatcctcttgaatttaatcgcgcagaacccttctaacgtattttggttcttcaattagcgttgatgaccgctattcaagccatgccatactacaaaagccagtgagtatacagttcttatcaagagtctttgttccgctcggctgatatctgagcgtgatcggtggggtttttaaaatcagattcaatctggcaacgactggaagctccactggtctcgtcttctcaatctataccatcgggtccatggtcggagcttttacagctggtaagggccatctgtttctttctcgtcgtctgatattcgtcgttggatgctgatatattctcgtatcattcttgttattggttgactatccattgccaggacccatctctgatcgattcggccgaagagtcggcatgttctgtggtgggctcgttatctgcattggaatggctgtcgttagttctgctcaccagatgggacagttgattgctggaagattcatccttggttggggttagttcattctcttctctagtccggtcagctttgatgctaattatatccattcatcggactatgcaggtgtctcaatcatgacggtcgccgctccagctatgtgtgtcgaagttgctcctcctcagtgagtgcctcgtatcttcatcctcatgttgtgaacatcattgacc

SEQ ID NO: 2331 - DNA, 27848 bp, Xanthophyllomyces dendrorhous
gtgaacatcattgaccagatttgatcatcatggcgctcagatggcgaggacgaatgggttagttgacagactctggtgcatgaggttgatttttgcgccttgaatttgacatttcgattattgttttaaagttggaatctataattgtggatggtgagagagaatactgtcacttttgtatgagacgatggtcggatgctcactgttcctggctatttctgcttttatcttccatcaggttcggaggaagtgtacccgttcgttttcagtaaaactgcagtcaagtttctcgaggtgtgcaccatacgaataacattttttcttccttcttctcctactttgtggattaggccgctgccattacttttggcacaaacaacatcgcaagcaacatgtcctggagattgcctttgatcttccaaggagccccttgcttcatagtcatgatatgtgttttctttatccgtgagtcttccctgttctcgaaaagatagtgcacatatcgtttctcattcggagttggttcttctcgtcgattcaatagcggagagtcctcggtggttaatgcaggtaaccagttgagctgatacttcaaacacgtatttccgagccaacgagattcttctctttgacgttgatcatcagaacggcagaaacgaggaggccctagcgttcttggttaagtaccatggagggaacaatcgagacagtaaacttgtagagctcgagtggaaaggttggtctcgattcttttcgccatcattgaatattcagaaaatgacaccaacctgtgtcttttgaatcgtctctcgtcttcgatataaaacagagtttcaagagaatatcgcgctagatgcttcagataaacgatggtgggattacaggccattgatcgtcacttcgaacggtcgatggaggatgatgtgtgtgctcttgatctcggtatttggacaattcagtgggaatgggttgggttattgtaagttcatcgatttgagcagtcatcatcatcgataccgctctacaaggttcaatgagagttgaccatcgatataccatttttatacaaatagtcaacactgtcatctatagtacgtcatcctgtctattttcctaaagttcttttttctgattttccctaatccgtgccctgtttctgtgtaaagacaatttgggatatacttcaccttcgatacagctcggtttgaacttgtcaaaccaagtcgtttctgctttctgcgctgtgaccgctgcttgtttgagcgataggatgcctaggtaagctttcgttctttacatttcatggctcttcccctatctcttcagcgtgatatctaaccttctgacatatttttgcttatgatcataatcgttgatagacgaccagtcttgatctatggaaccttcggtgccgcatgtgagtatgacgtccaatcaagctccggccttcagatatgatttgagagttatcaaactatcatcttctgaatactcgtaaatctacttctaatcttatcaggccttcttgctatcaatggatccctctcctataaatgggcccagcgtatgtctttctagctaatgactcttcccttctatacacgataagctgattaaattcgtcactgatgtcggattttgatagagcctaccgacgccgaaggaaatgttattgaccccaacttaccgtaagcacaaaaatagcctattagaaatgccgagccagcccttttgttgatttttatctctatgacctggcactttacagaatcgggcaaggagctctcgctgcatacttcctgttcaacgctctcttctcattcacatacactcctctccaaggagcttaccctgcaggtatgagcaagttatcttctacttttctcgctgtctatttgatcttcactaggtttctgatcttgacatttgatggtgtctttttccgacatatggtagagtgtctggagtcgacagcgcgggcgaaagggatggcgctttctggagtcatcgtatctgccatgtaggtgtttctgagctgatctttttagtccttagatatcagaaactgataaaaccggttcttgttatttttgtagtggcttcatcaacatgttctgcggaccaatcgcgttgggcaatataaaaaacaactatgtctttgtatttgtacgtgcgacccagtccacttggtctttttctgtatctacgtcgtgatatgcttgagctgacctgtgacgcattggacttttaaggtcggatgggatgtggtcgagacgatcatatggtatttctgctgtgtcgagactcaaggtcgaacattggaggtctgtacctccttctcctctgtttcgtccctcctttctgcgtcgtgccatttattctgatctacgaacattgttatcaatcacaggagctggattggatcttcagtcagaagaacccagtgaaagctagtaagaagcgcgataagattgctatctcgcatgacaaagtagtcgttgtcgatgaagcctgaatgggaattctttttaagcacggacaggatctctttcgtcatgtatcttcttgtattactttagtcgttgtagttttaatattttctgctttgccaggtttcttccttagtttcctgtttgatctactgtgaatttgacttttgctgccagagagcgaccctaaccgacggtgatcgatacaagatctgtaaggactggaatgtccccagaccgcaaaccaccaaggtgccagggatgtgagctggatgttacatgtttgtaacctacgaattgtagatcccctgccgccagtcctcttgcaatgcatcagcttccaagtatatactcgtacaacgcatgtgctcatagcacactctatgatctgttcttgcctgaaattcttttgtgcagtatatcattttaacataccgcctgtatacagtgcctttgtactctgagaatcagatacaagacggaccttctttgccatccatagcatagtatcctaagcctgtatccttcttcagttcccctatcgtccttatcctcactttctgttatccctgttctcaacctctgtactttcaatcttattttctcgcgcctctgttctctctggtctcagtctcagagtctgaacttccacttctgcgctcattcccgtatcgattatacctcctgcaacacacacacaaacacttcctttttcttccttactacctgcacagctttatatcatagcacaactgaacccattacccatgagactttggcagtttgtggtctgaagacactcaagtccagaagaatcatacatcgaccaccattggttgaggctgctttcaccaaatctaaggcttatgagctatggaaactacaaagtcctctcattttccatctatctaccaggaagttcataactcctcattccaagcgcacaaagcatcatcgtgaacccaacgatggaggcgaacacgaagacggcgtctatggaagttaaataagccaacactgcctctttgtgaacatctgttggaagagtaggaaatattacagagggccgcttaatgatcttttttgtattgaatcagttggccgggcgaaaagagatagttgtcagatcgaagaaacttttgatggggtggcggtatatggagagagactgacctctggaattcgactatcatgtcctaaccgattccccaagctccaggataaaatcccctgttgtaaggctcttgttaatgtgacaccgaggacctgaccaagacttctgaacatgtatgaggcggagatcgatatcgccatgttttctttgtcaaccgaggcaataagagcggtaaggaaggtcgtgatgactactccgcctgttacatcgataagtttccgtagccagagttttgagcggacccttcagttggtccatgttcaaacaggaggagacagtaaatgctaaacagttaaaagcaaaaagaactagcctccccaagaggcgatggccgtctcaatccacatccgatggatattcgtatctaccccccacgttaagaaggataaactggcgtaaaggggtagaagacaagaccaaatgttgagggatcggtacgatccggtatggcgcatgtaccttagttcagtgtgggagagattcatattagcctttgatcatagagatttagagaaagaagttaggacataccatcctgcaaagagggagccagcagatccggtgatggaagagggaagcaatatgagacctgagatgattcaaaaagcggtgagaacgttgatgaagtgagtcggcgctgattaaggtagttcagttgtgcatccgaaagacgtaccagtctgagagccattgtaaccacggacaatatgcagatacatgggtatcatgaataacttttgtttgataacatgcacacaagattatacatacgattcagcctatgtataagcatcgttggaatagaaagaggatcaaacaggacgaacccgggcaaacgtgctcatagtaagcaacataaatgccagcaagactaatcctggtgtcttcatcttcaacagactcagtgagataagcggctcttcagccacgtgaccctctacataccagaatattgcggtagagatggcaaacacgataagtagcgaataaacggctggatgagaccagggcagactggatgaagtatgtagagatagcgagaccatcaaacttgtgatctaatgatattacacattcttgataatcagttagtctatgtaatcatctggaactcggtacaatttaggagaaactatactgaccgaagtcagaatcgagacgaaaccgtaccaatcgattcgtttcaggagctgaagagaagtttcgttggtagactttacagggaccctgactttccataagatgagaaggaaagaaactgatagaggaacgatttgcattccgaaagcccatctttgtttcaggaagcataatagaaaagaacgcgatagattttcaaccctgttcaagtgataattattcgcgtaaacaagacaaacctccagccaaacttgtctgccaccgatccacctagaacggcacctgtagctgagcccgcgccgaacaagagatttacatatcctgtaacaagaaatcagaatcagaatgaatcggataagtcattgggttagaagagcattaatcatgtgatagaaggacggattgaccttgatataggcctcgggattttaaagaaaccaggtcagatatgatgatagcggtgatggttaacagcctgttatcattcgcccacaacaaacgaaattcaattctacacactagaagacgagattgaattcatgcaaatcagacaaaaataaggtacataccccccaccaccacatccggcgagtagtcttgcgcccaaaataaaagacatcgaaggagcaattgcacatcccaaagtacctgttgtgaacagtagcatggcacagatgatagccgaccgacgaccaatgatatccgagagtcttccccataaggctattgaatcgaaggccgtgttcaatttttgagtcttctgtttcttgatactgaatatttgatgtgaaatacgacttaaaggaagaacgtacgcgtcagagccgcaactccgagaagataagaaccacccaaccatgaagccagatggcctgctttgctactcgataaacatcacgtctggtgtgttagttttgcggtcaagagttaagcatggtatgtccgttaatcttacaaatatgatacgatatcaacctgaaggttggctgtaatactagcattcaaggccgagcaaaacacgctgataattgatcggacggagcaagatcagcttcatatactgaagaagaacgagacacatcataaggaaccgacctggtccaaaggccggagcaaagaagtgcaatctccctaaaaggcttgtccttttctatagttggttggctttttactatcgatgggtctatcaaccgcgcttcgatatcagtagcacaacgatcgtctgacactgtggttccatagtttggagtagcagatatgttcttggcctgctgggtcgcacctaaaagaggagtagttactgaagaggacatgtgcgtttgggaatcagtcgttcaacctgtacacctgcaacccgctttacaatgatgtaagatgttgtctgaagaaaagaaaaggaaagaagaaggaaaagaaaaagaggaaaggaggaaaggaggaaacataaaagaaaaagatgaaatcaaccaaaggcgctagattggcatggcggacaaagccgacggattaggccgataggatcacagcttacgaccgagctgtaactctggttacttccctggcaggaaggagcagtctcaacacgtgattcaggggatctcggtcgtttgtggtccggggacactccagttcacaggggtttgtcacgatcactatcggctagggttggtttcgcgcggccaaggccatagagttttgcaactgtgaaactgtgaattacggaggtccgtgcggccatcaccctttgcacatctcgtctcctgctttcaacgcccatcatgagtgactttacccaatgcatgctagacagatacgtaggtacaccaggcaatcggcgatcagatatacacaggttagttgatcttgtctttttctcaaactccaaaacaggccaaggatgtcaaacttgcgaccacggctccgttcttggagaaatgtggaaaacacgagatttcgaccgaggttctatctgactatctaactcaagacaagtacgttctcattttcccgttcctttctgaatcaaactgtggctatcatgctgatcttctctcttttgtctattgttcttcaggatctacgccttcgagggatgtcagttcccattgatcactttatgtccaatccagatgtcacagtagatcctgatcaattggaatctcttctgttgctctacaatgtagacccaaagttcattggtaagcttttatcgctcgaaacttacaatcactgtcttactgtcggactcagctgaccatttcttatcatttccctgcagcccaactcatcactcggcttcctctttcttctccgtcttctcgggaaaacttgaccctattctcgtttgctcttcaaaatgtcgttagagagaccggctttttcgattctctgggcgaccgttttggactcaacgttcatcaacctgtcagccatcttcgaacgaagaatagtcaaaagaaggatgatgcagaatctgtggctggatcaagattgaatgaaaacacaaaagcttatgtggactttttgatcgctacgggtgctgagggtaatctagacgaagggattgttctcctatgggcaatggagcgcgtgagtcgtcttgtatcccttatgacctgctggtttaatctagctatctgcgctaatgttttacacgaatacatacacttgaacagctttattttatggcatggactcatgcaggcgaacaaacacctttcgatgcgccttccgcttcatcatcatcagaacctatcaaagtagcactgacggaattgattaacaactggacgtgcgacgaattcgaaatttttgtgtctgactgtgagaaagcggtcggtcgacttaatttgaaagagggaagtgaagaatggaagaggtgtgaagaggtctgttcttttttgagtttttgctgcatatgtcttttctactactcagcacttaaatacgttcatttctttctttatctcgcttcgatcatgatcaagaccttcaaaagagtcgtgtacctagagaaacggttctggccatccatttgattctcacaagagaattagcttcaatttgatatgaaatcgcagtcattgaagatcatcatgcatagatattcaattaaaggaataaaattgcgtgaacattcgtaattgcaagcataagatcaacaaacaataagatagatcaagtccatgtctcaattccaccttcaaaatcttcgtcatatcacacgttctaccaagctccaccattcgagttctgaccgtatccagagtcataattctgatgagggggtggaccgccttggtagatttgctgctggtacgactggtgttgctggtgcggatcatgatgaggttgcccatgaccggcgtagcctccatggagcggaggcggacctccaaattgagattctcctccacctccactgtaaggcggttgttgatactgaaacgaattctgatgagacgcaaacgacggaggcgcgccatattgatcgcctcctccaaacgaaggttgctgttgatatgactgctggtgatattgttgagcgccagggtatccagagtcattctgataagatggatgtgggggacccgaggtatgaatgttctgatcaaaaggcccatctctaaacacaacggggttagttgattggaaaccagtcaccgaggacataaaggccgttccttggttcaggtaggtcgctccggggacatgaacgttgtgcgtagcaagaacacctgtcaaggggtttcgcaagtcatgaatcgcgtcagtcgtccatgtgttcgggactctcgttagaagaccgcacaactgatatttctgagaactaaccttgcaaaccttgcgaagggacccctccctaaggatcattatccaagacgtgacaatcgataaaagataattagctcttcaacagtcaacaagaataaatttgggataaagctcaagcccttacgtgatcgtgagagttgttacttccgctggtatcgccgatccgtcggttattgttcgatcggacactagccttcgtcaacctgtttagtatctcctgctttttgggctgagtatcgatccctaagtagtcgtccatacgaaacaacgaagaatctataaattgttggatcgatctgacagaggtttgagaagtttactaacactgtttcatatactagggtggaaaagacttggtaattgtcagtctactaccggtcaaatagaaggtcgtatacctggaaggatcacgaaccgccatcatctcgctttgaatttgagatcggctgtcatagaacatcgggtggaagaccgactcccaggccttctccccaacgcctaatcgatcatcaaagaaagtgatcaaccaaggaaaagaaactagtcggattgatcttcaacagagcacgtacctcgagcatcgatgttcgtatcgtcccaggctgtatacaaagatatataagaataagcaaaaccttgacgcgtatcaaaagagtgaaggaacgattgatgatagatggaatacatgccttcaacaatgagtttgacggcatgtgtgatgttgatctgattgaaaaggtgccgaaattagcatctgcttgctcagctgacagtcaatagatcatctacgtactcgagccaagttgccagcaggctcgttcaagattaggcctgagaacgcgtagtggaggaatcacatagccatcatgtcagatgatgtttctcaggagggcttaagaggactggttggatctaattgacgaaccgaagtggtccttagataggaacgagtgcgtgggatcatccgaattagggttgtcgaaaacctatacatcgctcacaaattgctaagttttagcctcaagattgatacacaatgaggtttgatgagatgaatacctacagcgaactgatctattgtaaacaaagatcatatcatcttgtcatttaagagttgttaaccggaaaccctgaggaaaagtacgaaccaggatcattgatcacctgctgggatagactagagagacccgaggtggaacttttcagaataggacccaagaaaggctcgatggctatcggtaagaacgagaacgaaggacaaaatatcagtaatctcagtgcaccgccctagtttctgtatagagtacgaatctaactgactggtaaaaacgaaaacgttgagcgagtttgtgatcttctccacaagagaattaagacccggaatcttctcgatagtaaccgaaattcctttggagactttgtctctgaaagccaatattttccaaagtgtcgcatgaagctgaaaacctcaaaattaagtcagcgcgccgtactaaagcccataattagaacgagggagagtcccgccagattagagatagtaagcaaagggacaaacttgctgaggagacatgttattgggatctcccgaagatccgtttcggatagaatcaacatctcgactcagcgcctggccttctccgcctggcatttgtagtaaaaggtttcgaagcccagaatccgaattggcagggtcggatcgagccttgttgatagatcggttgaggtctgagatcgaagcctcgcttaggtgatccccggcttctccaagctaagatagttgtgatgcacaaattatgccaatttaagttgtagaaaacaccacgacaatgcgaacaagcgagacaactcttactaatgagtgaatgaagtccgaacctccaaacgttctgtacaagatcatatatcaatatgagcttgtctcaactctgttgtgcaaaacaccatccggcttacccagtaaccaaagggggaaccatctgtccattgggtgccttaatgatcgcattttgtccaacgtgaggaaagacgtcatggtaacctaaggagattaaagctagctcgcagaagtttgaatgctatgggaataattgataaatttaggatgaaactcaagagtatcagtcaaataagacaaaaatagaaacgcgtaataaatgtgtatatgagcttacggcagtaaagtcctccagggtatgcatagcttgtcctaaaagcctataagcttcgtattcgtcgtcgtcgtttcctatcgatcaaaacgaatagagtgcaagttctgttggctggcctctccttgacttttacaaaaaaaaactcgtaactagttgtacctcgtgctcggctcattcgtccatgatgaatacactgctcaatcgtccttcggactagagctttagatgtatcccagtttccgttctcattggcgatgtagttcttcattcctgttctgggtagaaagtgagcttcgcgcggttgtcagcttgaatcctaggtcgatattagatcaccaacgaactcaccggggatcaatttgaagctcttcaggattgacaggtggtcgtagtcgaggatcgtactgcatttcaagaggatatgtatcaattatgattatacagtaccaagatcaaataggaatatacctgtcgggcgtcttctccctgaatcattagaaatagcagcagataagcagcaaattagtatatcttcaggcagacaacctgacaaagaaggtatacctcagcatagcctttagggtctacaaatgatgagggacatcctagatcagtttgtatctacccatttgtaggatgggacgagattagatactaactatcaatgtgttccacctgatacaaggtccgaaaaagaagatcgcgatgtcagacaaatgctttcggtatcgagatatacatctcatacaaagtggcgtcgtgatgatgatacgcacaggcagatagactcccagacgctctttggtaatctcgaactcctcggtcgcatatcccatggccatgaagcccaaagccatcaacaagttgataatcgtctgtacattcgtcttcttcaaggcagcaacatcgatggcctgactatagtcccgaagccctatataattccaatcaagaggttaggatcagacacacaaaaggaaagaaaaatcagataatcgaaggaacgggcagataaaggagggaagagtgatcttacagttcccgaagtaaacccttttgacatccagaccagtaaacttcgctgctcctcctagccctagaaatccacctcgaccagatttcttggctagatccaccagaacatcctcaatatcgccatgtctaaaggctttaccttccaggaaggcgaatctgtaaggatgttaaataagagattaagatcacagattggctgtcttacgcgagcgcttgtgcacaattgatgaacgaaaagaagattgggacgtacgagggaatatttcctgctccaaatgctctagcgctatttccaaagcaaagaagacctagaatggctaggatgattatgtacgttgctctcgacatcagagatatatcgtgattacctcgggatagtgtggtggtgaagtggtagtgatggtggcagtgatgatgtcgacgaagaagaacgatactttatgtacgaaggaacgccaagtgatggctgtgcgttcaaagctgactgtaaccatatccctgacacaaaccatgtaacaatctaatctaatctctttctctgtttctttgtatgtccatgtctgtgtctgtaaactaaaaagccatcactggtgatacgcctcaagacagcgtctcgagtactcgtcgttctctccaatttctctgcttggtcttagattcaatggagcaaggatataaacgcgtctggcaataaactcttcttagctcttcacctggaagagaacatggagacaaaaatactggtgtttgacagggcttccgccgctgttctgactgcttacgctgccactaaaattgaagctgccacatcgatgagagcagattagacccaagacctatgggggtttattagtctgaggtctaacgaggcccgagtctaacagagccatgcatcgaccaccatcagttgaggtcactctcaccatgctttttgcactaggtatcatatatgtaaaggatgattaggcagtcttgaaaaagagaggtagagagagtgcttggtatacagtgtgatgatgacgaaagcaggactagatccaaagcaaaagagagtacagatgtggagttttacatgaagaggatggccttaatcttaccattgtatccagagccatccatcatctggatcatcattcttccgctttttcaaggtcagagtagagatgtattccatggctcttccatatcgcgcctctatatctgataagttccattgaggccttgttgggattggagggcatgccttcgtgatacagatctcttcaggctcccttggtgtctctggatcagataaaaaaggtcgatccaaatggttaagaggaagagggagagctattgcccgccgtatctgatcatcgaccacgatacagtcgcccgtcgaagacaagcgtggctgaagttgtctaggacgagatattctgcaagggtgattcggacaagggggatcgattgcgcggttgtgatctctcaagaagatcagaggaatcgtgaggcgttcacatcttctgagagtagagattcttcgcgagccaggagtcgacaaatctgtatgcaagagaacagatcgtggaagctctttgatccttgacacaagatctgggttcgttcgttgatcggatattgtgacatgcgcataatgcgccctgatgggtcttcctgaacgggatagtcgacaggatgattgaggtacccttcgaagttgtctagcgaagcgatctattctgtcagactcatacaatatgttttcgagctcatctgaacgaatcaagagtaattttagtatgtgtagcgaagtactcaaagtcaatcttcatttgggacctgaacgaactggttggaggaatatgagtgactgtgattgatatggaacaaggatgggtgtgagcgagtgaagaggtagagtggcactgacccatgagaagtcgtcgttacaacgataactagatgagcagggcaaagaaagaggaagagagtgaggtgataatggtcgatggatttggttgatcatatctctatctatttgtctctgtctgtggactgtacagcattcactaaattgttcactatgaccgatggcaagttaaagcgaccaaaggggggttcctagcaaacaaggaggcataaatctcaacagctgagaagacacaaagaaagccaaggtgacgtagacactcgtcagtggtgctggtgtttgtcactactgattctactgttccgtcaaagagggcaaaccaggctcatgccccatgagatctggactgtttatggtctgagggcaccctagtccaaaaggaccatgtatcgaccaccatcggctgaggtaactctcaccatgctttttgcacaagctgccacactgacactgtagactgccatagtaacctcggtgtgatatcgtagctgcttgcttcggcttcttcgttcagatcagccagtctcgtcggtctctgcgctgttctcgactcgcatcccgagtctcaaccctggctcctactgttctttgctgcctggcgctgaaaagtctttgctggggtgcgcacatcagtgggggacaagcgtaccacgagctagcaccccgtcagtcgtaaggatatcatctattctacaatattccagcctacgaatttgtcttgtttattatagaagcgagaaagcattgccacgtctttggtaattccagtggcagagaggtgttctttgtggtttgatcgacatcgtataatcgataatatatacataaatcgtgtttagaagtgaatacttggacaactgtccatacatatatgaagcgaatcgtcacgttctcgtttacagacggtgcgctatgagagagatgcctagttgcttgtttaaaagagaacaaatgaatgatttgtgaaaggtatggaatagaaagtatggttgtttaagcccgctctcctcgcagccgtcgggcaagctgcaggtccttcggctggatcgtcacccgtttcgcatggatggcagccaggttggtgtcctcgaagagagagacaaggtaagcctcggaggcctcctgaagagccatgacggccgacgactggaatcggagatcagtcttgaaatcctgggcgatctctcggacgagccgctggaagggcagctttcggattaggagctcggtcgacttctggtatcgtcggatctctcgaagagcgaccgttccgggtctgtagaggagcaccgcagaggcatgtcagtctgaggttactctgagcagaagagcagaagagcaaaagaccaacctgtatctgtggggcttcttgacacctccggcagcgggagcagtctttcgggcagccttggtagcgagctgctttcggggagcctttcctccggtcgactttcgggcggtttgcttagttcgggccattgtgttctaaggttaataggtataggttggttggatagtagtgtgtggctgagtgcttggtgagtgcttggtgaaggtagctaaggtgatgacggtgagtagtaagaaggaacaaagtcagcatacacccccacacatgcccactctttatgtctcagctcggtcgaatccagttctcgtcccgatcggctgctcactcagacagacgcgtcgtgaggatggcgagcgagcaggaaggaggcgggaagcgagacggacacggacacggacacggacgcggaatataatgatccatacggaatataaaataatggtgtcgaatataattgacgcgtcctcgtgtttagcgtgagacgcgagtcgaccaggtgactacacgatcactacgcgacgactgtagtctggctctagcttgattaggaaagcgactaggaaagtgactaggaggctagctaggagagcagcaccagcccgtcgacgcgtccggccgacgcgtccagacactcagacgcacgtcgcgaccatagagaccacgtctccccgagtcgcgtcggcctgggtgcctgtctcatccgtcgcgctcgcctcacgcgtcagtcgaccacgcggccggctgggcgcgtcagccggacgaccgaccggatggtcttaaagccagccaattcttcgtcccttttcccattctcttctcttcccctcatccaagccttcatactcagccaagcaaccagccagccaacacccacccaccccactcaccaacaacaaacagccatgtccggacgaggaaaaggaggaaaggtacgtgtcttcacctgtgtctctgtcgatcggctgtctctgtctgtctgtattctctgatcctgacatgtatcctccattcgcccgttcttctgatctgccttctcgatctgctctaccctcacccacagggactcggaaagggaggagccaagcgacaccgaaagatccttcgagacaacatccagggtatcaccaagcctgccatccgacgacttgcgcgacgaggtggagtcaagcgaatctccggtctcatctacgaggagacccgaggtgtcctcaagctgttcctcgagagtgagtctccttgtcgatcctgcatcgatcttctgtctctgtcgcttgatccatctactgatcgctggcttatcgcacgtgttcttttctccccagatgtcatccgagactctgtcacctacaccgagcactcgaagcgaaagaccgtgacggctctcgatgtcgtgtatgctctcaagcgacagggtcgaacactctatggtttcggaaactagacaaaagtttcttgaaagaaaggattaaataggccacctggaagaactgttcagctggtcttgattcttgcttttactgccttgtctggtggtcctttctttgcttctcaaaccattcctcctcgctttataatgtcccgatagctttgttctactcaggagatcagtcgggcgtcttgacagtcacctgacattttgaacctgccattttatactttcgttttttgctcttttttgctaccatgcacatctccctctaaaagttgatgattatttatgtttacttctaccaagaaaacaccttgaaggaaaggaataagtcatgaaaataatgataaaaaattccataggaacataagagcgagacaagaagcacagaagaaacttaagattcagaagagtaaagagatgttacgggaagaaatgaatcagtctttggtatagagaacaagagaagatatccatacggagttacctatttctgagtggtcttgacaatgggaactgaaagatgaacgaaaccatggtaaattttagtaatcataatcttgagagggttatagaagatctggtggtttttgaatgaataaaaagagaaagaagactaaccgacaatgatgacactatataaactcgaaaagacatatctacgatcagcaaccgtctgtttgaaaaataatttctcaccagatgaagacagtgcgtacatcaagatgacaattccacagccaatactgatcaatcacagagatattatgaaacatgaaaagctatcaatcgactgaggactgctatacatgtcaaagaggaaagattgactcacatgatcttcatcttggtatccttccaccacctaatagaattggaaaattaggagaagtccattcagccatcatagtttacctctgctcttgaacaagagcagactcgtgagacgaacacaaaagaaggcgaacatacattgcttttcgcactttgttagctccccttcggaaaccctgggcggatacggctaagttgtcgctttttaaaagattaacgttttaaaaataagagccattcagaagttgaccaaacggatgttcagctatccactctttgctataagacgactcgcttttacccgggaagaataatgaagacagaagatcagaagcacgtgtctcatcactcacgtcttatcctgtaaagcatccaaccgttcacctcgctcggcaactcgttgaatattctctctcatcacatcctgggtctcatcgatttgtttctggatagccgccgtctgtcaatgatggtgttcaaacaaaatgatgtatggccagaacggtaaaagtctgattcagttgagtcttttaaaaaggtgttgcggaaacaaacaagttcttcgtggaagatgaaacgatacagaagacacaaaccttggcattcccctggtagccagtggcgccagaagggttggaagaagatccaccttgggggatgtaagggtcgtactatgattacaaccgcgtcccatgaaagaaacccaatttatgagaacaaacaaaagttccataggcaaaaacaacgcaactcatttgagcttgattaaagagggaaggggaaatgatgatgaaaagaggggaaagagtcgtacaggggcagacctgaaaatgagagaacaagaaaccaaggaaacagaaaggtaagcattccatgaaacagtctcttcttctgaccgaacaacccatcaatcccatccatatatgcagatatctgaaagaggagatcttccgggacaatagaacatcacaatggatatgtaccgattgtggaagtagagcactggtccaaacgaggagatctgtaatctcaaagtatccacctgttctacccgattttctctcaagccgatctacttgatattgctcttttcctaacaatacatgttctctttataggtcatatccgttctctagtcaacaggtggtgagtcgagacgtgcacttacatatttctggaagtatatcaaatataagaagacgaatgggacgagggtgaacgtagaacggaaagaagtccaggggtgagaggaagtaacacggcccgactaattgtgggctgtgcgtgcgtttggacattcttctccgcatagccgagccggatgacgcacacgaatacaaaactgctcttgcacacatatcattgactgcaagcttgtaccacaaagatgcacaaatcacatggaatagcaatcatcataaatgcagagatagcaaaagatagcaatgatttagttctctccgtcctctcctctctgagagaacaaagggagaaggtctagggtttgggtatgatgtttgattggaagaaacgaaagactgggatcagatggaaagagtgcatataggctagccaggtcaggccggtctatagaggggcgataggtgggaatggatcgattccttccaacttcaaaggtttgtcattcaaaggagggctcgtactttgaagtggaggataccttgatatggaaaccaagaaatgatttgagctccacaagatctataacaccagaattagaacacaaagagaaacgaaccggcaccacttgtcctcgatcattgtaaccttccaagttccctcagaagaagcgtacattgagtatgtgttctccaagatattggtgacagtctgtgttcacatgcgtttatcagtcagctgatcacacctataaacatcaaaagaatgaggaggcgcaagggaagggggggaggaggggggacatacatgctcttcgagcacctgtccagctcgaccaagcgaagcaggctcggaacgagtataagtaaatgagaacggagcttctccctcaaacgaaaacactatttctgcttgttcgcctgagaaaaggggagaggaaggatatactcagtataccaactctgctcaaacagacagaaaaggacaggagacagaggacaaaccttcttcgatgaacgtatcgcccgcactgatcctagcagatgggagtccatggatctccctcgatatatcgttcacctcaactttacatgggttcttctcatgcgcgattgagacgatggcgaaacgtccgggctgatcgcctaacagagaaaacttctgatgtttatgagtcaccgtctttggagttccattccagtcgtatctgtttcgtccgttttgatttgtccaagaagagtgtggcccggtagatcgtcaacgatttaggacaataagaaaggagagcaggacaaaagacctttcgggaactcacgttagcttccaaggtgaagacccttgaagcaagaagtccaacgtctgccctacacaaacatcctccgatctgcctatgggcacgaccgaagccgtctccgccacttcaaccttcaactttgccagctcaggatcgatcatatcctgctcgcaccctgatgaatccctaacagcatcgatggtgattatgtgtgctccgacacgatcgaacacgacgtcagggatgtccaaagtccattccctggaagggatattcttgattcgtctgatgatcggttgagccactttggcagattgaattgaaagatcaagctcaaacggcgcttttccataaaggatgactcggcctcgattcaaaggattcgcttgcgggctaagaacagcgttagaacaaagagaaattggactattcgactcaaaaaccgcgttgggtcgaccatagatcacttgttcaaccgtgagctcattagaacctggaggatggctgatgcctttgggcaaaggtacatagttggcgtccccaatcttgtggaatttatatatatatgttccgggggaaccggtctcaagatggagaatcgtggagggttgaatagcgccgagagtgcgtaggtgagaggtggatcgagtgtccttaccttcaggctggaacgctgtcgtgtaatcgatgtggaacggagcttgacctgagagaattaaagaagcaaccgttctcgtatcagcttgttctatgtccattcaaaaagtgaagacgctggaagagaacgaactagggacttaccttgcattttcaaagctatttgatcatcatcccctacgcaaactccctgacgtatgtatataccctttcgggtctcgaatcggccaagctctgaagtaagacttaacgttggtctagggatatgttcaactgtaaaaacgtcttctccaggatggataactccttcgcaatgttgacttcggacctgttccatagcagagaaagaaccacgcggtgccacatttcttgaatatagtcaggcacaagcggcgcaagaacataagagacaagtacagacagacctcgagaagtcggtaagtgccagcttcgttcactttgatctctgcattgatcgacttcaggtcaatagacaacggcttcggatggttcgaatttgcgtacttgacagtccatggctgtgtggcagaataggtcagaagaaagaacagcgaccgacttcagctagacctgaaagttatgaacttaacaagagagggacgtacaccttcaccaaagagcctaagagggatcttcacgtcggcaccagctggaacaaccttgcgtctatcacccgtctgggagtatatcttggctgacggctgtttgccacaaaaacttcaaaaatcagaaatcagatgaatagaaaagcgaaaggacaagaaaggacgaaccctccccctccggagctcaatctcaactcctttctcactcaaccgtctcgtgcacccatttccatcagtcacttcaccgagactaacagagaacggaccaacgtcggctaaccagtcctttggaatttgcagcttgacccgctcgagtgggccggtgaggttcgttaaggttcgggtgattactgatttgggcgaggcagtgagaacggtgagggtgaacggtgctttaccctggaaagagagttgattttatttttttgatttaaaaaacaagattgagagggcaaagcaagatgtatcaaaattcgaggttcacgatgaagatttgggaaggaagaggttcataccttgagctcgatatcgatatcaacatccccaccctggcactcatagacgactttcttctcgcctcttcctctaagtcttgcttgcgccagcggatgaacgaccatctccacgcttcccaactttctttctccagtcagagagatcccatcggtgtagattgaatcggcaagggatatccattcatagatgtacgtgccttcttcttctggttgaaatggtcgaatctcgtgtacggaatggaagacttcagtgaatgatttctgtcgagaatgggaggatgaaggagatctgaactctcgggtatatgagagtttgaaaggaggactccctcggaaggagaatgaagcctcaaatccctgttctccggcgctatgtttcagagaggaatcacgtatgaagaacatagatgatgtaaggaagaaagaacgtgtaggcacacaaatagaaagagaaagagagagaagctggaacagaccattcatccttcaatcgtttcacatctagtccgacttccggcactggaataatctctgctctacattcactcggttctcttacctctcctagacatcttcctccagtaacggactccaaaaaatacgttccttccgagccagtctctatctggaccaatgtctctttgctgttcatcttgatctcttttttccaacctgcggtagatcccgaggttgattctgaggcgctcgatccaagagtggaccggagcgggatgtatttcaacttggcgacgaacggatttccgtctgccggtccttgctgagcgatgagctggagaaccggtggtgaataacgacttggagcaaatcgtgaatctaacaacttcagcggtctcgaaggcgaacaggctgaagaaaaggaaattgagggtgatggtaagatatcaaaggtgagtttggtagctccctcgataggatggatggcgattggcttgatgtgtggagaggaaagagcagtgagggtgtaggttttggagccagtgtttgggaagctaacaggaaacggaactatgtaggatccaggaacggacgcagtagaagaggaggaagagggattctgttcaagaagcaaagcagccacctcgtcttcttcaccgataccttccaaccagccgtcctctttgttcccaacggagtctatgctgatccaaccaagcctcaatccagtatgaccggcagtactgattttgatatctaagaatcccttctcgccggcacacctaagcgtactaggaggaagggaggccgatgatgaagagtgtgcgctcagggagactgaagacggagtgagaggaggcaaaaatgtaaccttgggacaggcccagatctgaatcttctctgaatcggatcgagacagccggaaaggagtgcccgtctgagaccacacccgtgatagtctcaaagtggctggctgatcgattggaaggagaagggtgagcaactttgcgttagcactggctttcgagttggtagagacagccgtctcaggccgttgaacattcgccttcttatcggcaaccgctacagttttctctgcagatatcctctcgtcgtttacgtcgagtgtatctatctcgtcctcgtcttcctcatcacccatgtcctcaattgaactgtccagggcgtctattccggtcaggtggcgccgatgacgttttgttggcttgagctcctcaagcatggaggctgtggcattaaatatcaaggtctcgcccgtggagggtagggtgagcgtgtactcgatgatttcaggtcgagtggtgttgaaggtgataggtatattgattatcgggtttcgagcggacaagcaaggcagaggatgggacaatggaatctgaggcagtcgcgccgtgctaagattgatatgaagagttgagaagaacgatgtctgaataaagatgctaggaagagtgaaagttactaaagagatgggcatacgagtaaggggtcacatgaagggtgtactgtccaagaagatgttttccaggctggacaacatctctgacgcgtgctcttgtagacgagatcgtgggatagtaagtcaatgcggccgtcagactggaaggtacaagtgaagaaaatggaatctgaaaaggagtgaatcgacaaacagaaacattgtaagcaaagattgtgacaacgattcagagagataagaaagaaacagccttacggatctccaaccacctagtagcaaccagtcgaagaggagcaggagggctataatggcccacctcgtccgtttgtcatacatcaatctggggatccgcaggagtggaacggcgtacacgaagattgtctgagcaagcagcagaggagctattgtaccatgtgacgacgatgatgatgtagaggtggaggaaggcaattgtgcgatcacatagagcttgtaggcttggaggagggtgaaggcagagagggcgtagagcctttgttcggtctggtgaaagtatcttgtggggatgactggtgaaaggggagatgacgatcctggtggctggaccgacatgacttctgaagagatacgctcggatcttattattcgctcttgtcgtgtccagcagacttgccttgttatatggatggagagcagagcggacgaagtgaccagaatgagaatatgaaggtgaagagaaaaagtcggcgaaaatcgtcatcgatcggaagcattagggagattttggaaagcattagatgaattctgtaatcaaccattgagaaaagaagacgagcgctccagatgattacttcttctctcaatgtcacttattgtagccttaccacgaagttaaccagtcaacacggagtacagaaagttgttcgtacgtcagacgcaagatgttctcacacaagcatcagctgaatctgtcgtcgatagcttcaacgaactcaattagtattgtcagacccatactgatctggtttaacctcgaaccgcttgctcctctgattgtcgactaaaaagagtaattaaggtggatctgtctgttcgcttcgttccttcattcgtctttctatccagttgtgcatctgccaaaccaacacgaaccatttgacttccgatcgaatttgatcctctagtctgctgtttaggaagtatgttgccgaggtttgggtgactaaccatcaacaattaaccctaactgctttgagaataatttcaagtctgcacaccttcagctttactcaaccaggtcccagccaaaatcttaacttccacacgagctcttgccctgataatcatggtcagtgtatactctaacttgctagtatacgaagacgagaagtgtacctactgactgaaaaatattttctttgtttattttgaaaaaaaaataaaaattgatagaaaatcaacgttatcaatcgttcactagatacccaccttcctactacagctggtgcgtccgctcccgttcaccgaaacctcgaccccgccctccatccgttttcaaagcaaagagagtacaccagagccgtcaatgcggccaagattgaccggtaggtctcttgtttccacattattctttgcttccgtttatatatctgtactggccggctaaaccttcctttgataacaattcggctgctttccgttttcccgcctccaccccttactagtatgttcgccaaaccattcgttgcagcgttggagggtcataccgacggagtttatacccttggtagagatcctcgacgaacggatgttgttgctggtggaggtggcgacggtggtgagtggctaaacaatctcaatgtacgcgtcgttaatgagaaacttacgtccatcttcgtcctggtcattcgctcttacttaaccttaccacagaaatcatccttcattcactttctggaagaaaaccaattgtgaggattccggacgcacaccgaggtcaagtcactgggctgtgtttctccgcgtgagtttttcgtgtcatggggggtcatgtctcacttcatccctttccactcatacttccttccctttcggatgatctttttacagcgataacaacgtagccgaacgacgtctgatctcttgtggtcgagaccaaacaatcaaaatctggtcttccccttcactcactcagactggaatctctgaggaacagcctgccgcgtcttcgtcgatcggccgacccccatcaccaacaccggggattaccaccgacgactttgatccaaactttctctcttcagttaaccttccccctccccctcctcctctcttcacttattcttccaaatatgccttccaatctatctcccaccatagatctgacccggtatttgctacggcctctaattgcgttcagatctgggacgaaacaaagagttccccgttgagcacgttaaagttcggagcaactatggagagcgtgttgggtgtcagattcaaccagagtgagcgaagtgtcttggctagtgtaggaagtgagagaaccatgtgtttgtatgatatcaggacgggtaaggccgagaggcaagttagaatgacggttagttctacaatgctttcctttgtgtaattaagtctgatttgcgcgttactcaaaacgatccctcactttttctaccttttctgttccattgcttcaagatgaaatcaaactcgctctcgtggtgtccaacactgcccactgtccttctcctcgcttcagaggatcataatttgtataccttcgatatcagaaatttagcctccccaacccaaatctacaaggatcatgtggctgcagtgatgagttgcgactggagttagttcctttatcttcttcttcttatactccattatttcttcttttcccttcttgaatactgatttttgaatgctgttacccacacgcaggtcctaccggtgaagagtttgtctctggaggttgggatagaagcgtcagaatttgggatcgaacggagggaaagagcaaggacgtctatcacaccaaacgaatgcaacggttagaattttctcttcatctcttctgctcttttctttccctctcttcctcaccgcaaacgacatactaaaagacaaattgtacgatccggaaacagtgtgatggatgtagcatacacccctacttcgacattcgtcatgtccgcttctgacgacggaaatatcagactatggaagtcgaaggcatccgcttcactaggagtggtcgactcgagagaacgagctagtagagagtatagagcaaagttggtcgacaagtggggcaagacggatgctgtcagaagaatcgaaaagtatgtgctctcatgatattccgtccgtctcttctctctcacatactggcatgaactgacgcttttcttctcaaccatgctctcatgaacagacgacgacatataccttcctccatccacaacgctaccaagctcaaacgggagatgatagatgccaggaaagcaaaggaggagaacaggaggagacatacgaaggctgggttgacaaaacccaaggccgagaagaaaaaggtctatttttctgtttcccctccttcgtcccttcaacaagaacttgaaaactgatactctcatttcgtttggttatgtttctgcaattgacatgttcaccggatgggtagatgatgatgggcgtggacgaatgattgaaatgtctctctttttgctctctcgatacagaccttgtttgttgcttttgaaaagtctcattataaacaaaatctgaagcacgaatacatatcaaagccctttttcctatttgatcctcatttgattccaagaattgagccaagaaggtcatgaacgagcgtatggcttcccgctatgtttggctcccgctttggtttccgttttgatcttacctaattctgagcccgacttggatccaaactttaattggctcgaactgacaacgcttggttttcttcgaagatatggtgtggagaagcaggcgtcacattgaatagtgaacgctttcaaaatatcttcgaataagcagtcgtcaagctgttgattcagtacgttcgttcgttcatccgtaaccgtagatttcacagtatgcgacattagttgattgaaacgagcaagatagaaaagtgaagggtgaggagacgaactgaaccgaaagtaggatgtttgctaagtttgagttcccttactcgaggactcgtaatgccaaacgcatatttagccaaaaacctgaagttccaaaaaccggacgcaataacctgtatcagagactacatatatatatata

SEQ ID NO: 2332 - DNA, 4183 bp, Xanthophyllomyces dendrorhous
atatatatatatatatatatgaatgagggcgtcacctagggtcgtcccttacagggttatggtccaacacagctaaagttcagagaggcgaccacgacggaagaagagaaggtaagccttgttctaaacaacactagagaagcatgatggcttcattgaatcttacctttaatctttgcagccgaggggggagcaatatttgtggaaaataatggtcttggaaagttggttgcccggccggttgtacagggtgtacagttcccgcatgggccaatggcgtcaccaaactttgcgaagtaatttcacgagttgagtcggacataagatgatctatgaaacttgcaaattggacgtacatgtttagataagaactgagggatgcctagacggaaagataaagatgatcattacagtacagataacgttagccgacctggttgtcgaatgataacatcacgttcttcaaatacataggaggggcttgacgcttacaagatttccctacagccatttctacgactttatgaattcttgctagatctttctcttctctccgaacagctagatcgtatatcttatcggcaagcatctcgatctcctcccgatctgacggcaacggcttcacaatcgcgaatcggttacacacctgagcgactttacaacggacccaaccactaagagaataggaaataacacattcagaccatccgactgtgggtcttatatatgcattcaagcagactacgatagacactgacttaatctcccatctgttaatcctcttctgaattaccgaacgtgatacatcgccctgccgggcagtcgagttgatatcaatctaaattatcctccaaacattgaacaaattcagatactccaattcaccggattatagattgatgtatgtaccaacgtactgtgtgccaaacttttcctactttccatctcttccgaatcaagattgcttcgtgtgatcgatcggctattacctccgcccagccttgactggaagttgcttgaatagcgtactcgagatagccgggggtcaatgatcggatgtatttatagtctagttcgagttgagcattcatgatccctaactgagtcggtcgaagatcgtgactatcataaccggggcagaaaaacataaagtctctcagcggtatcggtggaaataatggcagatattatatgccaaaactcactcggcactctgtcgatagcccgagatagagatgacgcctatgattttacgtgtctaggtgagtgagggccctgtatgagcagttgatgacagaagcaaccaggacatacctggatcacaggggttgtcacctaatgcgcacatttcggttagccagctgatagagggacattaatcgaatggagcgaatgagcgggcgtaggttcagtggttatgcagctgaacatgggtgttggcttacgaatgcacggatcgtcgagacggcgtatctcctcgagcaaatccttccatgacctacgcaggtgaagcacaagacaaccagttgtagcgtgtatacaaaaaaaaacaacaaccaagaaccatcgagtacgtactgccagatcgggattgtggaggaactgttaactcgagagagacacgaaaggttgcgattagcaaggagctctatcaagagaatcagactggaagacatagagaaatgatggtcgtactagataacaatctgatggaaagccatctcgaccggctctacccacttcctggctatgaacaaagaggaaataagtcccttacgcttcctcttcaacctgttttcttgatgcaatggaacgatacctgtatgactcgagcgctaccacgccaatgagacatgtatttgatacaacatttaaagtcaagtcgagtcaatttgaacaaaggaaaaatagaaaacacgtagtccttacattgacagaaattaaagtgagctacgattcggatattcgacttgtcgacgcccattccgaactaatacaaggcccagtaagaaaagagaagaagagggaagaagtctcaatttgttagttattacatcagattctaagacatatatactaccgtctggcttttcatcagaacacgataggacgggtgctttattgtggaaaaccatactaacggcgatggtagccacaacaatcagatctctaccttgcatgaacaattcttgttcggctttcttctgatcgaccgtcaagccaccatgataacatcttgcgcccggaatgccggcagagtttaagagatctgcaacctcttggcaattacgttgtagggaaacatatatgatggcagggctagtgtttggacgttacattgatctttagcatatgtctttggtcatatggaaagataataatgatgacactcacccggtacgtgatcgcaaaatgggtactatctgagcgatcttatcatctagggaattggcttgcaagaccttcagattcagattcggtctgaaagcaggttgtagagaattactgagtttgacattcgagttgagaacaggagttccacaaaaagtccataccggaagacagcagtctagcaagagacgtgtattgaggttaaatcaacacttatcagaaaaatgatgagccagaaagagattattcgaagtacctactttaaagactccagaattataatcaatatcaaattcttcacaaatatcctttgcaacctaaccaacagatcaagacaagtaagaactgatgtgttctcacacaaaacttgactccactactaggacaagctctttacaaacctctggtgtagcggtagctgtcaggcataaaacaatatcggctttaatttctttaacaaatcgcgccactttgaggtattcgggtcgaaaagactagagaatgagggaacggttattaagtaagtctgtcagtatcattttgtcagaaggatggagtgtcgtccacagcaaaatatggggacaaacagctccccactcggacacgcaatgcgattcatctacggccacgcagctttgttgtccaaaatccaaggttgggaggtcgatgagccaggagatttcttgagcgtgtaacctcactgttactcagccaatgggtgcctacctgacatgcacatccgctatcagctcatggaatccttcattgctgagccgttctggtgcaacataaagaatcttgagagatccgttacgaatggaatccttaacctggttggattcctcccatgtaagcgtagaatctagttgcgccgcagcgacacctttctgacgtagtgtatcaacttgatcctcttgaagaggagagaaagtggtgtattcaggaacaaaggctgaagatattgacatgcatctcgaacgtgctcactcattaaactgatcaacgggctgacaacgatagtaaggccgggcatacagagtgcgggtacttgactgtgttcattgattcatagaaaacactcgtccagtgcaaataacccatcagcagaccgagctaatagacttttttgtctgtttagttgactgacgaggaactaacaaacataaagacttccctcctcctgtaggaaacaagaccaaagcgctcttcttttggactaaaagctgctcgacgacctgtaattgaagcagccggaactcggaatactagagaaccatttaaacccagcggcgagagtcagctttctgaacttcatgccactaagaatgggattggaatgaacatacaccaaagacattatgcaagactttctcagcctggattatcgaagaatgttttgtcatcagatgatcgatagcggcttcgttgtgtcaagccatgcatgagttagatactctgttaagtcgaatgaaagcttacagagagacattgagagaaggcgcataccaaggtcattttcagagaattctagaacgtcaaactcgtcgtcggacatattctgttcaaaaagggagatactcgataaggaaaaggggttgaatgagaaagattaggggaacgggaaagctttaataaaagaattacacgaacgcgtctattacgcgtttgattgcaatgctcggcctacaacgtaattctgatcaatccaagtggccgttggatatgccctatcatcatctctagtcatcatggaaggagtaaaaataggagggaaataaaaattatctagtcc

SEQ ID NO: 2333 - DNA, 38305 bp, Xanthophyllomyces dendrorhous
tatctagtccatgcatgcattgtggtttttttaatctatttaaatcttaatctatctcagaactcaagatggacgctgcaaaaaatgttcaggagaggtgtttcaaaagagaaaaatgaacgaagtggggttcgaacccacgcatccgaagatagggctgtttaggatcgtgtggatcttaaaagcaccgccttagaccactcggccattcgtccacattgtacatactgaaaacatattttcctaataaggcaaaaacttagtcaagggttgttggagtttcagcagtcttgacataatttcatctgttatttgtaatctcttcttgagacatcatctgcccccctctatttgcgcgaagtcccaaggctttctttccgaagagctataaattttctagcgggtttcccttctgttatcctggtttcccaaaccatatacacaccacccaggtgtttcagtaaaatggattgagaaactagtgaggtttggattggaaacaaatgataaggcgaaaagttcattgcacccatgaagtccagtgaggttttaacagattcaataatagcttttccctctcattctccccatttttccaagctcatgcgcttcatcatcaagtatttcccaggtcatagtaaaactcatagttataacataagtgaaaagtcaaatatagagaaaagaaagagattgtaagttgtccttgctggacaacttacatgcacacccacaccaataatcgcaaacaaatcatccacaggccatatctaagtccgtcatgcctcagcttgaacgaaagcgtctaccggtgtgagaatgtcaaacacggccgttccattcacactgggtttacccatcacaatgtttgcactaggcgacttaagatcatcaaagtctccgtgcaatgtagcttcagacaagaacgccatagtcgtctcaaacgaagccttgagaagcggagaggactttgaggagataccagttcggttgaatggcttataacctccctcgtgagtctagtgcgttgcagaaggaaaaacgagttctgttagtgtcggttctagtcctaagggaataataagagaaattcaccatgtaatctgctataagtgacagatgtcggaagttgatggtgatcgcatagacgccgaatactcccgagacttctcggatgatacttgctcgagcggcctcgactccataagtgtgaagaatggcggcgatatcattcgatcgaatatagttcaaatctacgagctcatttgcatgctcccacatcgcttggaaattcgatccctcagtcaaaagcgttcgctacataaagagaaaagcggataagcttcggtctgatggaacaagggtagaagccagagggaacttacttttccgtgctcccaagcttcatcgtctccgcttcccgtacgtaacctgatggcccgagagatgtctggtacctgatgaataaccgcctttctgcaacatctctccatcacatcgacaataagaagcttctgagagtctccggggaactagaagaataagagcgccaagctgttagtgtgctacttctttatgactcaccaacagagaacaacaattagaaatcgataaggaagagtgaatagccttacagaaatctggaattcacacgatcggccttccttccggtcaaagctgaaggatgacacatatttggcaaccgtgatgaattgagtctgaatctcctcgtatcgggcggacatcgccgcgtggttctcggcggcggcagcagcggcagcttctccttcatcctcatctgcagggaaggcaccctcgatgtcgtctaaatcaggctcagacccggactcgtcgtcatcttcgtacgatgtcatctccttagacttcgaagccctcttaacatcgtcggcatctccgtccccgatatctgactcggcatcatctccagcgtcttcgcccttgtcctcgacggaggtatcgaggttttcatcaacagcccccttaggaattcgaacggcggagcccttaccaacaccttctaaatcgttcttcatcatcttgctcacatctttgagttctcgaagaatttcatttcgaacatgaggagcaaaggaggtaggtagagcctccagaatctggttcggagtcaaatcatgttcttctaggtattcctctttagggaacagatcaagaagcacggtgtactctctggatcgggagtatccgtttgattgagtcttgtttgtcagtcgttctgtgactgtgaccttctcgacaagttcggaaagagtgaccttcttggtgttcttgataaacatgttcaggtcgtcgtctcgaacagcgtcgtatatcggaagcttcatcgaaggcgtctttggttttgaggacgcggtcatgaccaactctcgtagacgaggaataccaagcgtaacgttggcggctccgtgaccagctaaatggaaagtgttcaatgtcatttgcgtcgacggttctcccacactatatatacacagatggcaatgatgttgataagcgatactatacaattcagagaacgataacagaatatcttcaggtaacacagaatagaaactcacccctgagcagcaagtaaaccgacagcttctcccggatcaatcatcgccttaatgtatcgaaggttcatcattcccttgaatttttgcttctgaatagcccaaggagactgcttgctcgcctccgctcccttcttggcctttgtgatgatcaggttgttcgggtttttctcgatgtactcatcaacagaagcagcatatttttctcctgtacttccgaagtacaacgacggggagtagatcgagagtgccgggtcgtactttctaggctttctagcggccttcttcatgtgggccactgcggtctcctcatccattcgaccattgagagcggcggcgtcatatcgctgaaggagggattcggagttggcgatgttgaaggcgaactgcttagggtcgagatgagcctgcttagtaacatcaagcgaatcctctccataatggaactggataacggacgagtcggaatctcgaacagtgtgatcgtagtgaactcgaataccttccaaatgtttgatcaaacatcgctgtaggtaaccggatcgacttgtcttgacggctgtatcgatcagaccctctcgaccggacatacaatggaagtagtactcctggggtcgaatgcccgtcaagaaccggttcgcaacataacctccggctcgggcggcggtctcaaaaggcttgaatgagggaagggtctttccagacaccatagtcggcactcgacgaccttctagagactgctgaccaagcacagatgaaatcatagtagcgttcgtagcagaacccttggctccagacaccgtcatcatttgcatgttgttgtgcgggaagggcttgaccaatcggtgagggttaagtgtagcattgactttggtagtggtttgaccaaatcgagcctgcatcacattatcgagaccagccataagtcggtcatcccgaagaatctcttccaatcgaatctgtaggttatgcttaacatccggatcctccggatcagcgtcttctccaagtccgacataagagatagcgaccttctttccgtcggcatcaatctgagaaagcagctccttccgctcgttttctccagcagcggtgagtaccaaatcgtccattcggcaggaaaatgcgtcatgctgaaggtatttagtgaatagtcgactaagaacactaagaaccttcccggcggtctcggcaccatagacttcaaaacaagaatgaacaagaccataggaagacgctccgaattgactcttgtcaaggataccaataaggagttctccatccatgaagagcacgtcattatccttcgagtgaggaccccaaagctcgttcttaaccttgttcttagactcaaggttcagacccttagcgttcagcggtttgatattcaagaggagagtagtaataagttgttttccggtccagagaggctggggcttccaaatcgtaggaggaacggtaacgatctttccagacgagcagtagtcctcctctgtcctgagagcaccatatagcaactgatgatactgctctcgagtgaagaaacttcccttggagcacatccatgtacccgcaacgacatgatcctgaatcaaacctcgaagaggctgaccagatgtgggcaccaagtactggttgtcggtgttggcgatgttataggcctcagctcgggcagtttgagattctaaagacggcggtgtaatatacgcgcattgttagttaaatcatcgtgtccgtcttcgcaaacaaatgaaactcacgagcaaaatggatgttcatctcatctccatcgaaatcggcgttgtatgagttactgcaaagaaggggagacaagacaatgaatgctcagttagatagccgtacgtctgacccacatctgagacgacaacatagtgactgaccaattggcgtagtgcattcggatagtcttttctcccaacaatactctggccttatgagccatcattgaaggcttgtggagtgtaggctgtcggttgagcaataatatatctccatctcgaaggtgtctgaaaacctttttgttgataacttgagttcgagtggacagtccaccttgagcgagtgagtaggaaccttcttgaggggtaagcagctgattagccaaagcagttcgctgctcgagggtcattcgatcctacgaaggtcaaaaatgagaagaaattgagcttccaggttattataagagaaacgcaagaaggaacagaaagtagagaaacgaacaagtgcaattcgagttccatcttcgtttacaatcatggaagcaccaggatacgtcgatggtccgttgatgacggcctgtctcatttggttaatgttgtgaatggtcacaggctcagggaaggtaagcttgatggcaaagacaggaggaacaccaatttcattggtctcaaggttgatatcaggagaaatgaccgatcgagcagcgtagttgactcgtttaccctacagatagataatggctcacggtaagctgacaggacagaacgataatctcgattgactgaacacactcaccatcatgtgctttcggaacagaccctccttcttttctaagacctgcttgacaccgttaggcgggggacctcctccacggatgattgtcgggttcttactgctatcgatgaaactgtttacgtcaatctgtagttggactaaagcgcctaacaacaaaccatacactcgggttctctcctctaaatccatcaataaccccacggtctcccctgccttaggcttcgatgtaccggccgtgagctgggcagtcaaatctcttatgcgataagaagtttggagaatcttattgagatagtcgttttgagagttttcaaaggtaaggtcgcccattttggaggcaggacggaaccgagtcggaggtactgggactagcgacatgaagaacatatcagccgacgccggagggagcgccttgtaagccgggatgagcttggctgagggagctgtcgaagtgaccgtcttcttggtgaacggaccatggcctccatagatgagggaagtaatgagaggctcattcttgaacagcattcgaaggtgggccctagcctcctcactagacatcaccctctccttcctcttcttggacccggcctccttagctctttccaactgagcctcctcatcttccatctcaatatcttcgttggcttcctcagcttccgattctgaatcagatccagcaccctttccggtggagggaccaacctggtagccagcgtcatcatgaatgatggccccagatttcctattggcaatatagcgttcgatttgaagaacattgggtcgaacctttccggtagcggcgtgaatagcgtcgttcttagcaccaagctcgtactcgatgatcttggtggatccttcctttcgataggtgtgagcgaaactagaagaatagagcgcatcctcacaatcccagtcagaaaaagatctactaatttgtagcaaccagaatacaaagaaaagtagacgacttacgctttacaactgtggcacttcttataacctctcttagagaattcagaaatgagcttcttcctttcgttatagacaagatcgtccttgtaggcgtcccgcttgtttccactggaaggagccttgacagtcgccaaactggctcgaacaaactcctctactcgcttaatgaacatgggctcggtctcagagacctttccttgttcaccatcttccgactcggaatcatcggcagtcgacttgcccttctcattcggagcgacaacgacagcgtgcatgtttcctagttggattgcctcggagagaagaccatgatcaagtaaagtcaaccggccgacaaatctagaaatctggagaaagtttgagcagaagaagcaagatgtaagtctaatacactgcttgataagaaggatctatcttggtcaaagatctgacctctgcagccggattcctcagcttgtggcagaacatgcacgtctgtcgaatgaggttgtagcactgtgtaaaaaagagagggtggtaaactggagtggagagagtgatgtgaccaaaatgaccaggacagtcaaaggaagttagtcggcaagtagagcagctggtgccaatgtgtccaagcaagaccaacgtagtgatgataaaagaagtgaagagagcgttagagagccagtttcctatgacgcgaagaaagatttgtgttgggacgaagaagagagatgaaagagaacctacacgtctcccttctccataggaccaagagcaggatcgtagaggcctccaatagtcggccttgacaggttatcaaacagaatcgggttgacaatctgtttgacggaaatcctctggatatcctccgtcgagaggaaggagaacgagatcgactggggcgtcgagggaagggatcgagagatatccatttttggctttccttttctttttttagagtagagaagtcctccagcctttgaagaactggatcaagggacccttttttgtgatgtagagagaaaaagaggagaaggggataaagagagcaagggtcgagtgaaagagaaggagaaggcgaagaaattgggaggaggaaagattgaaaaaaattctggaactgacgcgaacctgacacgacttctactattgtgagtccttgcttattctcttcaactatgttgtagaaagcccctctcttctttcagacgttgtacatcatatagactacacaaggtgacagcataggagaccgagtagaaattgagattagtaagaagaacaataaagagtgaaatcaatggatgacaatccgagagaggttaaaaagcgagaagggaaaggtgtgattattaagaatacagagttgcctatctggacgagtccagaagggatacaagataacgacagagcgatggccagaccaaaagagaagagaagacaacaaagcacacggacaaaatctcacaaaaatatgaagatacatgagagaatcatcaagaaaaatgaagaaaagatcatgagatgacaagcagagaacataatccgtaggagcttagcctgttagatccgctcttattctcgtttcgtcacaggtcgccctcggtagttcgtcataacttcccacccattgtatcgagaacatttctgttatctgcataggctgctaggagtccggttatatcgatcggtggttcttgccccggaccaaattctccctgtagggggtgcgacatgaatatgtttgccgttcctggtattgagttgactaattgaggcgactgtattgtctgttgggtttcattgttcgtcgtcgatggtgaagcatccatctctgatatgctgctgtttccaaattgaggaaatatcgcgctatttgttgggaatgatggattgtttccgtgcgaggtagattgaataggatttgaaggaatcatgttggcaggtaacgtcattgaccgcttcaacggcgagaccgacgtgcttgacctagagctccctccgtttgatgaaggaagacttgcatacgaagcctgatgaatttgacccagtcgattagcagctgcagaatacggatgatgttgctgttgttgtagctgctgttgaagttgttgttgtaactgcatctgccgaagttgagatttcagtgagctcggtctaactgccgagtgtgattctgaagcccttcgtcttttgtctgaaggttgttccgctccttccgtgctttcgattatggctatattctgacgaggcgatgaaactgacgaaacgttagtcgaagctgctgtactttgagcaatagaatatccgggcgaggctgccgccgatgacacatttagattgacgttgacaggcgacgaatttgggtataagttcgtgctgagcactagatcattcaaagcctgttgctgttgtctcaactgttgttgagaaaatactccgccgttgaaggccgaggaaccagcatgattatgagagtagctcctgtacttaaatgctgactgtgggtttcctgaagtaggtcgtaaaccactcggactcgacgcccgggctgtccgttgagttcccaaaccgccaagattctgaagtccatacgagatgtcagtcgctggagattgagtcccagatcctgatcgccatggggacggcgctctagactttggaagcgttatctgggcaggattcaagttcgaaagcttgtgacttaggctaccagaggtaacagatgttgtgaccgagtcccgacggcgtttgaatgatccgtctgcaaatgatgtaagaaacacagataattcagtcatcatgattacttgctaaatggagaactattcgaaacttaccgtcggattcgaaggagtttgttcttgactccttcagcttcgtcggagaagttatagcttgttttgaaaagcctgaacccgtggatgatttttgctaaatacacaagaattgacgcaaaccgaacaacacgtaattgagaagcctttcctttacagaatattaaagaggagttagtcaagaccaaacgaacctctgctcctctccccaccctagcaatactcgcttggtttctgagagcctgttgaagctgctgctgttgttctgctgcgttcagtcctattccctggacttgacctcgactgattgatgccgagaatgtctcttgtaatctagatgaacttggtaccctggacgcaaagtttacttgccccattgtgctggtcgctggactcgaactcggattatactcaggactcgagacagacgaggtagaggatggggtagtgaccaggttggtgtttggtattggaatcggagctgggtttgtgttcatattcgagtttgagttgtttaaggattgatggttggaaagccgtcgatccgaggaactgctcggtagaccggcgatgggtcgagttggtattgaatttagattaggcaacaggtcagggggagcagacggcgaaggagaggggaaaacgggttgattggtggcttgcacgttgccctttggaaatacattgtttcctcctcctcctaaatcgttcaagttgaacccggtgttgtccgtcttgattataacttcatcacttgattccgtagaggcaacaaacccatcgatttccctcatcaggttctcaaacgagacatctgatagcggaatagaaggatcaagtgctgacgtagattgttgagagaatgagaatggttgcgaagacggaaacacttgctgctgctgctgcggttgttgattttgttggttcaaacccatcttttgttgttgctgttgctgattcaactgcaattgctgcagaagctgaagcttcttctgtgcatgctgggaagacattccagagaaatcgaaagacgacgcggttgacgacggtaaaggatgcgtatcaaatggcgcgtatgactgcccactgagtatcgacggtgacggcgcgaatgaaagaatgtcgtctaagctgatcgggattgcctggcctgtcatggatggatctgtcaaattgagttgctgcagatgggatggaagatgggtctgttgagaagaatgttgagagacgttggatgagtcacgagacatatgcggagtaacgactgcgtgttgactggatgaatgagcgaaagggtgattcgaaggatacggtgggggttcattctcagtgggatcgggcagtcggttagtcacacctgctgttgacgacgaggaagatattcgtagatggctggaacctatagggatatgctgagagcccgatgggtacatatggctgctacctggactactatccgttgaatggtctgtcataacaacatctccatagggtgattgtgattgggaccgttggctcgatgagctctctcgacggtcttttggtcgcgcgttctttccgacgttttgcttaatactaactccctgggacggatcaagaccgacgcttcctagcatagatgtcatcttatgactgttccgggacattcttcttgtgcgtgatcgctcagctgcacgagaagctaaacgctcgtctgatccctgtgaaagtagctccccgaaattgaagtaggttttcattagttggcacagactctcagatacataagaaagagttaggcccactcaccgatctcggcttatagtcaggcatcttgaggtcttccaagctgatgcctctttctcgatcaaacccatcagctacaactctggagaattttttgaactccttccgttgtttcgatgacgattcgtctaccacgagagaatgcagataccaaagtctccactgtgtttacgaagccccgagaagatgacgagaaacttctatgctgtaagtagacaggtcaagataggtataccacaatgaagatagcacggacagagaggttttcgagtcggcttccagggaaaggaaacgaagatatggaagcagagtggtatcgcaccaaacgaggtttgaagttgatcaatcgtctgaccggctttcgccccgggtaaccgaaaaagagtagtacttgactcactgtccttgttccaggtgctttgccagatggcgaacgtcaatatcggaatatgtctctagtcagatgataatacgacctgagatgaaccagagaattgaaggtctagaatccatacctgagacactttggtgcaaaccttccatacacgcataagattgtcctcctttatggacgatccaaggtgtggttcgaatttcagcacccatccgtcgaacatttgtgtgaatgaataagataaagaaggattaatttaaaaactcttggctaaatctcgaaaacaaatcttcaagtgtttacaataagaagagaaaaaaatccaggccgatatgagaaggggaaaacagaacagaaggagggtagggttttacctctgatatgtttgagaacggagagaacgtcttatttcctttgaacttgaggacgaaggggttcgctttggagcccatgacggtcgacgtggactttgcgggtgtacgactaagtctgatcagggattatataaaggaaaagagggctgtataacacagactagatcagttgatggaacggatggatcggtgttcaataaagagagctaatgtatgctgaacgacaaccgaacgacaacccaacgaatggcccggccgaaacgtcttcccggtcaattcatctgtgttcgtcgcactcccatctttcctatctctcactctctcatcaacatatttctaacaagaatgaaagaaccatatcataataactcggctatacaacaatcaacaaccatgcaagtcttcaagcggaaatatatgaataagagaaccgtttaactaccccgataggtagtgtagctgtgaggactcagaagaagagggatatgataatgctcgtccgggctaccatttagaatcacacacactcagaggacaacgttaacgatgataccgatgctggaatgagatcaacacaggtagacgactaactttgagtacttaaataaaatctatatcgatgtacacatctcatccagaacggaagtggacgccgtcagtcgctatacatatcagacgaacacgaaaccagattccgaggatcatcccatcacgcacctctactttaggatagaaacattggatattgttctctgagaaataagcttctgtctggaagaccatcttgtatgtacctacagccagcggagcaacccccgccggaaggagttgagatgctcgtccatcggcatctgtcgctctattcaagttgttctcgatcagaacgatatcaaaaattgagtatttcttggctattccggtgtgcaaaaatgaaaagtatccctacttaccccttggccaaagagataaattctccatcttgggtcaattgctcgagctcgaccgctacgaactttgctggtttgcccaaagttgagtcgaggactaaagaaaaaaggtataaattcttaacaattcagaaaacgtacagcatatgacagacataaacgtcaccatgagcagactcaccatggcaagttataggtgatttgtgagacattctgagtgatcgtgatgcacaagaaagtatacgaggtagaacaaaaggttgattgatattcctcccgggtagtaacgtcagatatctgccagctcttcaaccttaccatccttttaattcgcttaagcgtccatcgtcgatcgtccatcatatatcttattgtcctggtcgtaacagggccgtgatgacatcagctagagctcatgctcctctcagttcttcatccttccggtcatcgttatttgctgatcctcaacagaccgcccggcaggaagcctttcgttctgttcgtttggctcttcttgtttatagtgatcgagtcatacaggctaatctcgctctatacatctacattcatagcttaaacctggatgcacgttactcctcacatgctcgcttctcaccccagaaaacatcccttctgcgatcaaaagcctttctcagattcatcatatccttttcacacttccctctccagccgagaccttaactccttcgcttacgtcttatgtgttctttccaattacgcaactcctccaacgtaatcctccgagaagcgtgccaccgcccatcagaataggtgttctgcgtgtgctcactgtattggtcagatactggtctggggagggacgggcggctgtccgggaacagatttggaagatggctgttagctggtggaaggttggtggattagatacagaggagggtatagacgcttggatacaaggtctcagagagttcgcactcggaagctcttccggagaaacggagctcgattttgagagagaagaagctcagctggcgtcgcaactagagttggaaggtttggtagcacgagaagcgttcctacctgtgctgggagagacgctacatatcatgatacgtatgtgttttgtgcccattgtgtctcgttcttaattcttgtacttatacgatttccttacatgacaaaatcaatggaaaaccatcaaaggcatcatatccacgacgcccattcctttacgaatacttcagacttttcatgctattcttcgaacgtatcttcctaaccgctcccgaataaaagctacaatccttccgggttgcgtttccacgttgaccaaacttctttctccgctgtcatctcgacagagtggcaagggcgtcaacggagatatcgtggttgagtcgctagggataataacccacctcgtcacaggctgcttcagtttggctatcgtcgggcctatcattggtcacggagcgcaaacactcaatgatttctcccatcgcagggtatggcttaccgaggaagagcttgcttcgacgtcaggttcagaagagccccttccaacttctaccccatccccgccatcaccagcctcttctgatgcatcattcaaaactacaacatctgaacaaaccggcacatcctttacatctacccaatccgttgctgcttcgcctctggtcacaatcacttcttcctggctccgaggcaatgcatcccaacttcttccagctttcatctcactttcacatctcaaaaaacattcgaatccaaatgctcgaaatgcactagccgacctttcttctactctgctccttacttgcctcgacccgttagaagaaagcgtgcatgtcctcctcggctacctactgacgctctctgtagatacattccccgctgtaaatcggtcttcccgtcaagctctgatcagtctgcttgatattccaggaaaccggccaaagctaattcctatcctcaatcaagcacttacgacatcgctacaaacaattccgcttctgcttcaatctcctcaacaggtatcctctgtgaaagtgactgaacattgtcaacagatcactgctgtcgctcagcttggtccaacatctgagagtcttctccaaggtatgctgggtccaataggaggcgtggaaagatggggaactggcttactcgactgcatggtgtttgagccggacgttgtcatgggttcttcataccaaaggcctgtcaatcggattgccgagcttgcatggacagcaacgaagagttcaacagtcgatccatcattggatggtaaactagacgacgtgccatacccccgaatctgcttgagtaatttggcaaatgctgaaacggaggatgcattcgcaggtatgctggtatcgttggggagagcagcaggagaagaagctatttttgccgtagaacacttcatcgctgttgccaaagcaggtgcctcggacgggacagtgataggtttacggagaagtgtggcaggtgtgtgggtggctgagagattgcttagagggattgtttcttcattgaataattccgatgatcccatcaaaggcatagagaagacgaagactggggtggataagggtaggcggacaagaaagacgatcaggagattagtcaagaccttgatgcggatggacgcggatcaacaggatgaagacccaacagcagataatccgaccaattcatctggtggaacagaggaaaaaaacttgcgcgcggatcgaaatttaacggacatggtattgaaacctgaatacataagaggattgaacccgttgactactctgctcgatcaaccatcacacaattcatcaacaaatcctgggtctggctcacgtacatcagctgccgatcgattgatttcacagtcgattctctcctgtcactcgctttctctccttgcattctctgctcagacgttaaccacgtcatttcggccactcctcctggacacaacgtactacctccttgcccaccttggctcaccttctgttcttgttcaacaatatgcaagtattgccctcgatcgaatagcatacgaatcaggatacgcctccgctcgtaatcttgtatttgacaacgtggactatgtcatcaatgtcgtctcccagagattgacgagtaccaagttggacgcgcttgccccgcttgttctgatcgaaatgattcgattggtaggagaaccaattgtgccgatggttcatgatgtagttgatgagatatttgacgcgttggacgcctttcacggatatgaacttgtagcttcgacgttactggcggtactggatacattaatcaaggtcatgcctgatgggaggagggatgatgcacggagtcgaacaatgggaccaggagaccaaggagcaacggttggtgagaaaatgtacccagatcggcctcaacccgaaaaagatctccattcattcaggtcttggcttgctcagcgacatgatcaagcacgatcaaatctagaagagctcttggaggagactattgaaccaactcctcatcaatcatggggcagggataagtcactcccttctgtagaagcagacgaagcgtcgaccagcctacctccgacggatggaccactcgatgttgaacctgacagatcccaatcaatttgtgctcagatcatttcccaggcgcttcctttcttgactcatgcgtccccttttctgagatcgcgagtgctttctctcttcgcatcggccatcggtgtcttggctcctgcagggctggaagctcaacttctaccagtcgtcaatcgggcctggccttatattctcaataggacgaaagacaaagagtactatgtcgtcgttgaggcagtcggcgtgatcgaatgtttatctaagttggtgggtgagtatgtaggggtaaaaatccgagacgaaggatggcctgtattgaaacagttagcggcagatcttttgaaggatcaacgaaaggacagcctcatcactagaagagggaataccgctactgccatcaacactggaagacagccgcagagcaagcatactccaactcataggctgctccgatcgcttctttcaactttcagacatgtcgccgtgtcggtcccgctgacatttaagcaaagatgggacatgctcctattagtcagggcttttctggacgaccgaactcatgaagaactccgaacagaggccaatcttgtctatttgactttgggatgggctgatgaagatgcggtttgggcagggctaagagggtctctcaattgggcggagaatgacaaaagctcaaagacagaacgaatgggatggctggtggaggacgattcagatctgaaggaaggaatctctaaaatcttacaaaaactagaagaagcgtattagatgacatatgtgaaactgtttccccatgagcgagagccagttaaagccaacagaccagactttattgaggggaagtcagtttatgtcttaatgactgagttgagttagcttcggcctcaaagtacactgtgagctaacatttaagcaatcgtctatcacgaagcctctcggtccatctacgattacaagaacactcttctcatcattacaatctgagtacattgaaattctatactcatctcccttcccatctatatcaatcttcactcttaggctgaaacttttcatgaaacctgacctgccatgggctaggcagaccagacttgaaagtctgttttgactgtctcaacaccgtcaataccggatctcccttctcaagcgccgatcgatcgagagattttttgatagtcactgcctctgggtgagggagagaaactcgggcaacaccattcgaaagaatgtaggctgctttctcctttctgtaaaggacgtccctcatatgcttccggtgaaccgcaaccaaatcgcctatcaattgaaagaccaattcgaaagacaagtgatattttgatcaaaagagaaagagccagaaacgtattgacagagtatggtaatcagtcgggatctctgaagtaataagtctgctagcaggaacagaaatgatataaaaaggtatggaggaaaaaaatccaataaatcaagacatacctttctttcctagcctaatatcatcttccagcaacttgatcggaatgctgttctttgtctctagcttggtagggttggccaccacaatttttcgacacacatttcgtcgctatacgatagaacaaggaaaaaagaacgagagagaattccaatgacatgatcaaattgagatcaaccgataccatagaaacgttactcaatcatcatcatcagtcaattaattcctttctgttgaagacactggatgtgttctcacataccaatgcacgtaagcttaagggcttgattgaagtagctgttcgtaatagggtgaacatgatgatgggtgaacaaatatacggttcgaccatgatcatcaacgtaaagtcgacagtagcggataatgttctctcagacgacttgccacattctgggctgtgtcttccttgatttctacacttttcaactttttggaatctgaggtttgttgtatctatgatgcatcaaatgattgaggtaaaatattctaagaagacgccgagcgagccgtaaagagtaccttaaacaatgcatcagaacatccaaagggcggaaacaatatctctagtgatcgtctcctgttcctgctcctcctctccgtcatcaacctcttgagcacttcgctttttggctcccttgtctctaattgagcttgaaggaaacacaactccaggcgccggaagggctaaagctggatcgtttcgtatctttcgcttcgcttcagtatcaaacatctgttgaatttaatgacttgaggtcaggcttcgtagtcatgacaaaagtagattgatatctatatgtagaaaaaacataagtacgaacggtaacgtaggtgtgatccaaaaagtcctccatgccatatttcggctttgtgaagacctcggtgaagatctttgccagactggagaccgaagacacataatgagtcctcaaggaagcgatctcccagagggatgaatcgagcgctcgggtgagcaacgggtccgttgttaaggcgtcgtaagggtctatctcagtcaaccagcgatcaggtttagaaacaggcggatcacgtcaaatcaggtaagtcaagcaagagagaagtaagatttgttacaaacctttagtaccgtcctgagccaaactctccaacgttatctctccctcagttccgccaaagccatctcgatgaatcaacagcatgcatcccggatgcattttgagcaggttgtacacaaacgggataacaattaccacagctgccggaggtgccgtcaaggcgagtcgcgcgagtcgcttgatgaacgacgcgatgagggaagaaggaagaagtctgtttttcaggattttttccaaacagacaataagatttgttaagacaattcattgggtagctaaagggtagcaagggccatacgttgaggaaaggaaagtttccgtcagccggaaaaaccgggctcgatacttgatgtggaggaccgatcgatccaacatggaatacaatttggcgtagaagtcagggtattctctaacgataggtacagccaatatttgatgagtcaattgaccagaaagctcgaagaagagacagaaagagatcacgaacaagttatactgcgtcatgagaatgaacagtccattgagggccaatagtccaaggggtccacctggtcagcaaacaaaaaaaactaatcagtaccttgcagaatcggaaaaagaattggagctaggaaagacctttatcaacccattctccaagccagtcagccgtttggacaacccgacctcgagtcatgctaggtaagacttgatgatgtaggatgacaagaattcgtctcgcctgcgacgcgtccaatctgggagaagaaaagaaaagaaaaaccagaaatcagctcagactcaattctttgagctcaagttactaaattattgagattctctatcatcttaccgcaacgaaaacagtcctagccaaacggcagtgaaggcagatttcgcacttgctaaactccagattccctcatggatggtcatatccctcgtcttccctcccgccacttccttcttcactccctttttggccgagactttctttccatctttattgattaccttggtcgatcgaatctgaacctcagcatcgtcatcctcctgatcagaatcgaagtatgccctccagtcatcttcctcatccgttgacttgggcgcttttggtcctgaggagagggtaaaaggagaagaggcgaaaccgggcatgagcactggaagcctctctagcgccttctgagtggtcgggaaagggggaagagactccaacaagttcagcaggttcagcgacagacatgcagtagctggtcgagacgtaggtggcaagaatggacggatgaccacactaatttctttgagaatcgaccatcgaacgtcttttttctcctccatcaagctgactaccttctcgaggacatcgttttcaacggaaaggccctgcattccatccgaaacgccttcctgagaaatcgagtatagtgtagatgcacctcgagtggaaggtgtaggaagtagaaggaacttgacgagctgccgaatgtacgaagctgggtaaaaaggagtggatttgaggtttaaatcattgatgggtgcgaggagagggaggaaggagagcaggtgggtcaaagcagctgactatgaaggccacaaagggtaaaaaataagtttgatcaataaaattggggttgaaacgaagaaatcctgcacaagaatacttactcgcagctcagtctctacgtcctttaataatcctccaaggtactcgatgtaatcattgaatctagccttcacccactccattaccatcacctccctatcctcttgctcctggcccttagcttcgtcgtcgtcagagccagctccagctccaggtccgattcgctgtcggttagaacgctttctgagctgaaagttgagtctgttctgagttaacaacgcagtaaacactctgccgagcgcgtagactcctttgtggacaacctctggctcgggcgatgtcttgaccaagctgagtaggtcaataagtggatttaaagacgaggtcgaaggaagaagtacttcctcaaaggcagaaatctgtgagagcttagcgatcaacagagaagacttcgaggaggaagagtctgaggatgaggtcttctgtttcttgagtttgagaggtgccatgatggtctatattagagtgtatatgtatcgtcaagacctggggatgtatggaccagaatgggaaggtcaagaattctcaaaaatcgttgatcggctagttatgtaagcaacagacttacgtaattgagtcttatcgacttacacaaaaaggtcctgatttgtacagcgtgtcgcaaacatctatcacctctactctctctgctcttgtattgatattcttctcggactttgcccattatgatgaaagtcagtttaaactctaacgtgcaactattgtaaactttccagacttctgacctcaaaaatacatatgtcgatcttcgctttcagatttggtccatgaagaaggattctgaggcggccgcgaagaagaaacctaaagtgaacgccgctcaacttcgagttcagaaaggtaattttctttgctctctaatggaaatttgcgcataggaagaggtgatagtacttggtattgattccatatgtcatctattagatatcactgagttggacttgccgacgaacatcaagacgatcttcccggatccagccgacattctgaatttcgaactaacgattgaccctgatgaaggtccgtcctcaaagccttcattctccagatctgtctggaaacaggttggctgaacgaatcttctgaaactcattccaggaatgtacaagaatggacacttcaagtttactttcaacatcaaccagaactatccacatgagcctccgaaagtccgatgtactcagaaggttcgtacattatctatactttcattcgatgtattcatctatcggtttcatctggagatgaaaatcatgggccatctaatcaaaatcatactatcttaaacttcttaagatttatcaccctaatatcgacctagagggagctgtctgcctgaacctggtttgtgttatcgctttccctccttgacgccatcagtgctaaccacattgatttgtgttcggtcgcgcaactaaccccaatgtttccaattttcagcttgtaagtcaatcatgacgtctctctcatcaaatttcggctcttttctctagttttgtctagatacttataggtattcggtttgatcatcctgcttgtcttgtagcgagaagattggaagccggttctcactctgaactcgatcatgattgggttgcaatacctctttctggagccgaatgctgatgatcctctaaataaaggtccgttaatatctcactgtatgtttctgatattgcaaagctgacatctcatgaacaatcatctcatttctcagacgccgccaaggaacttcgaagcaatcgggaattatttgctcagaatgttagaagtagtttgcaaggccgatcgattcggggtgagacgtttgagagggtcttgaagtagttacctcaacagagcagtggtcctagcatcattattgttgttgttaagtttgtttagtttgtccatgcttctaagtacgttaggtgtcttagacgtgacacaattgtatattctgcgacttaggttgttcgacatatgcaggcccgacacagcttcgtttgatcgtctaagtattaaaaaagaaacattaaatacatatatgcacgcgatgacaagacaacgaagtctgcgatgtgaaagtataccaaaaaagaaataggaagatgtcaaatgactgaaggtaaaccaatgctgagggggtaggccgagatgtgaatataggaaacgaagccaagatcaggtttgtctagtttccgaaaccatagagtgttcgaccctgtcgcttgagagcatacacgacatcgagagccgtcacggtctttcgcttcgagtgctcggtgtaggtgacagagtctcggatgacatctggggagaaaagaacacgtgcgataagccagcgatcagtagatggatcaagcgacagagacagaagatcgatgcaggatcgacaaggagactcactctcgaggaacagcttgaggacacctcgggtctcctcgtagatgagaccggagattcgcttgactccacctcgtcgcgcaagtcgtcggatggcaggcttggtgataccctggatgttgtctcgaaggatctttcggtgtcgcttggctcctccctttccgagtccctgtgggtgagggtagagcagatcgagaaggcagatcagaagaacgggcgaatggaggatacatgtcaggatcagagaatacagacagacagagacagccgatcgacagagacacaggtgaagacacgtacctttcctccttttcctcgtccggacatggctgtttgttgttggtgagtggggtgggtgggtgttggctggctggttgcttggctgagtatgaaggcttggatgaggggaagagaagagaatgggaaaagggacgaagaattggctggctttaagaccatccggtcggtcgtccggctgacgcgcccagccggccgcgtggtcgactgacgcgtgaggcgagcgcgacggatgagacaggcacccaggccgacgcgactcggggagacgtggtctctatggtcgcgacgtgcgtctgagtgtctggacgcgtcggccggacgcgtcgacgggctggtgctgctctcctagctagcctcctagtcactttcctagtcgctttcctaatcaagctagagccagactacagtcgtcgcgtagtgatcgtgtagtcacctggtcgactcgcgtctcacgctaaacacgaggacgcgtcaattatattcgacaccattattttatattccgtatggatcattatattccgcgtccgtgtccgtgtccgtgtccgtctcgcttcccgcctccttcctgctcgctcgccatcctcacgacgcgtctgtctgagtgagcagccgatcgggacgagaactggattcgaccgagctgagacataaagagtgggcatgtgtgggggtgtatgctgactttgttccttcttactactcaccgtcatcaccttagctaccttcaccaagcactcaccaagcactcagccacacactactatccaaccaacctatacctattaaccttagaacacaatggcccgaactaagcaaaccgcccgaaagtcgaccggaggaaaggctccccgaaagcagctcgctaccaaggctgcccgaaagactgctcccgctgccggaggtgtcaagaagccccacagatacaggttggtcttttgctcttctgctcttctgctcagagtaacctcagactgacatgcctctgcggtgctcctctacagacccggaacggtcgctcttcgagagatccgacgataccagaagtcgaccgagctcctaatccgaaagctgcccttccagcggctcgtccgagagatcgcccaggatttcaagactgatctccgattccagtcgtcggccgtcatggctcttcaggaggcctccgaggcttaccttgtctctctcttcgaggacaccaacctggctgccatccatgcgaaacgggtgacgatccagccgaaggacctgcagcttgcccgacggctgcgaggagagcgggcttaaacaattagcatcatttatcgcccaggctccattcttacattcccatttcttagcttttcttgctggtactgcttccgcacatgcgggcatgaccggttgcttgcctcttttggagaccatctccatttcgtttttgctcttttcttttgttaattctggtcttcggggaatacggccagtatatacataattattatatgtttacatctatctgtgagatttggagtcatgaaagcaagagaatgattctactatgacaaaagagcgcgttcaatcgatatatactagcgctggctgaattccggttgccgcccgtcggccgaatttccaatttctcccatcttctttttttcctctccttcttatgaggtcgtccgccgccttttaagcaaatatgtcaggcttctacatcactacgactcttttcaaacgaaccaccacggctattcagcttcacactctttctcgactcacttcctcgtacagacgagcgtttacatctactttgccaacacgaaaaatgtctacttcttactctgtcgtttcaactcctggtgaggtcccaccgccacaatctctccatgcctctacatttgcctgctttgacaggccgagagggttattctttttgcattaccctagggtagactcaaacagatggctcaccactactcttatatctatccaactgaaaatatgacttcgacatacagatgctcctaaggctattggaccttactctcaagccatctcatacaatggcttggtctacctcagtggatgcattccccttgatcccgtatctatgaccgtggttggaactactatcgaggagcagaccgttcgtcctctacatattcctttgatgttatatcccattgactctttaccgacctgtttctttttacggcttcttcctttgtttggatgcttattctttgctaacgaatatagacccaagttttgaagaacttgtccaatgtcctcaaggctgccggatcttctcccgataaggtcatcaaaaccacgttcgtccacggcgcttgatttcttttcacttctgatctcttgtctattcaaagaattataaaaggaatacatgatatgcagatgtgacgaagactgatcacaatcgttctgtttgcgttcatagcgtgttcatcaaaaacatgaacgactttgtcgcgttcaatggtgtttatgagagtgtatgtcattttttctcctctttcatcgttaccttagaagcgatgaaatgtcaactcagataaaatacatatgccttattgcctacgaccttctatgataattcaatagttcttcaacccttccaagccggcacggtcgaccgttgaggtcgcccgattgcccaaggatgtccttgtcgaggttgaggtccgtgtcttacacacatcctggttctctcgatcacaagatggattactgatactgtatttcttttgattttgggataatgtcttttattcgcttgggtccaaattgctgacgtatagtgtattgccatcgctcaatagagtgaggcaccggtcgtttcattatagttatattcgtgttcagacagtgtattgatgatcagatagaaatgtcctgccactggtcgtctatgaggttttgaaacctaacaaagcctggtaaaagataacatatataggcggtaattcaatatcaatcgctcgatgacgacgatgacaatgactttggggttcctgagggtgcagatgatggtactggttgaggaggtggtagcggaggcggaggccgaaatggcggaggcgagaaaacagaattcgtcccagcatctctacgttctctctcctccaatcttcttctgattctttctgaccatccgagtcccttctcctctctcgcaagcctctccctttcaaccttggcctgtatctccttccccatcctttcatcctctctcctggctatatatctagccctacgtttcgatcgactgataggtccctcttcggttgataagacgggcttgcgaacagcgacgaatgtatccttcttggaggtagctgctcgaaggagagcaacttgagtaactgaaggtgtccagttagggtcggatacattgaaaggtacaactgtccgtctatctattgatccatcttctaaagcgcggacactgtcctcttcacctcccttctttccctcgagagcagcggcagaaggcgtttttttccaagcaggagagagagaggagataggcgtaagctggatgtattcggacaggaatgactcgaaggcaggatgtctgaaagccgtcgggagtctacgaggtatctggggtggattcgatctattgtagttcaactgagaagtcttgaagttacctgatggcgggacgagtatgtcaagtaactctaccgaaggaatctcccttgctagtactgaaggcgcaggaggagttcgaaacggagatcttcctggggcagaaggaacaagttgaggaaagatattgtgcgcgggcgaaggtggagagaggacttctgagagaggtggaaaggagagtgcacaagagaaagagagaggaggcggtgtagttttagaggttgatcgaggaatacttaatgggttccgaatagcaaatgatcgttggtttttgaactcagcttcccaaaggcgctcatactcttcggccttcgtcaacgtgcttctgaattctgtcgatcgagtgctcggagaggctgttgaagaaggagcgagaggtacagtgtctgttactaatgttgatgtacttgtagagggtaatgcgacagcatccgctaatgttgattcagatgcgatatccaagaatgaagacgaagaaagttgggagtccgaagtggtcttgaccgaagatgatggtttggaggaaagagaagattctttggtcgaaggagtaacggaaggtgaagatggtgatgaccagacaggtgagaagggcaacaccgatttggattcactaagtgatcttggatgaggctctgggattcctgttgcctgttctgttggtgagtgttgttgtggcggaggtggtgatggtggtagtgatggtagcagtagtagtgacggacccgacgaatcggttggaaagtcgtcttcggtaatcaagtaccactttcccgtcgctctttgacgagcagctctattcttctggcccttcttttttgtattcttcatcgtggttgttaaattactcgacgggtcttccctatcagtaggaatcaactttgactcaacgggtggcagtatcgtcttcacaaacacggcattcttcggagctcccggccatatcttcctgccatacggtgtatccaattgatgagttcgattggagctcgaaacctcaacagattttgggaacaccttaggtctagccttagctttagcctttgccttggcaactctcgcttgtgtgagagctgcagctcgaactttggcttccgctatatctaatgaagtagccgaacgtcgaatgatattcttgggttgtccacctccgtttgtcgctccttttttgggccctaattctgctccgcaggttgtctggtttttatttatatctgtttctggagttccttgtgagttatgaggagaagaggtcgtgtagggtcgaccagggattctgacagttaatcgacctggaggagaaccggtcaaaagatgattgagtttcaagatgtctgaaaatgattatttcggataaaggatgagcaagacagaagaatacagtgggttacctgagatctgtgcgacacaagccgaccgataataagccaacatagggtactctaaattgatgatgttgtgaaagagactaatcggtcggaaggagagaggatgagaaagtgattttttctttacttttctctactgaatgcagacacttcctgtatttcaagttttactgcagttattctcttctgagcaacctcacacgcacccttcattctcatttatctctcattctttgatctagtgaacatgtagaacccatttagagatgaagaaacatatcacatcatcatctacgatttttttaaatagaatgaaaatatcaaagaagaggagagaatacatcatgaaggcctataacttggtggaccttctagtcccaagaatgaaccgtcctcgcaccacgacggtctgaacccgtcatcatttccccaatgagatcgacacctataatcaaaagagtatccatagatcacatagttcgttaggcttcatttacagataaggattcagctgaaatgaacaaagcgagaggacgacgcaccgcatagaaaatccgtaaggaaacttataacccctctcacccctttcgtagcctccgacaaacaattccatagccttatcgacttttctcaaattcgtcaaatgctctctggcaaacatgaatcccgcaagcgcctttcgctggagttcggctggattggcgagcgctttggcaacaacttgattgatttgctgcaagaagtaaaaaaagcaaaaacaagaagcatccttcagaagctgacagaccaaggcaaaaaaagagagaacaagctgtatactaacttctatggaccagtaaggttgcaaaacaaccatgaactcggacaactcatctgtcgttcagttcggcatcccgagggaaaatcagaaatcagcgtggtctcgttatattgccgcgagatggatctagatgtgaagacccaaaatgacgaaccctccatctcggtgggtagatctccagcaatcacacagccactgtcaattaatgaattataagtcacaaaagtagaacaggcagaccgtcattagctgaatgggttctctcccatctttgctcttaattggattttcttctttcggacaaaacacaaacctaagaagcgcttgcgcgtatctattttgaggaagagtgcaagtaggcggagaagtcagtgaaagcctcgtggcgtattgaaacgaatttcaagagaagaaaaggagggctgttactttcgaatcatctttcgctccaagctcgaatcaaactaatttcaacccaggagtttcatcagtattcaacgataaacttatttttctgcatacttgacacacaaccaccacttctcgagatttgcacagaaaaaaaagcaatggttgacgaacgatacagatctgagcttccctcattccctttgcaaactcttctctcgttcgtatgtgatttttgtagaactctgatgaaacagagtacgtcttgggtcgatcggaataagcagtctgtggttgagaaatagagtagcctttcaagatttgtgtgtatcgacaaaaattaagaacacacagttagaattgaaaagagaaatattatggacagaagtgagaccgaatcgaagcgagacaaacctggatgactgaatctctgaatggatgttttgccttcgcgaattgcatcgtctatagtcgttcggaggggatagaaagaaccaccaaacccaaataggacggcattcttggatttttgtttccaagaattgaaaggatagaattcccattcactttggggttcgaattattcagagaagagtcagatttagtacgacgatatcaagtggagtagagaagagactgtgtggctgtggagaggagggcgtactttgcctagacaatttaagattagatatatgcacaaggtgaagagttgttagtgtcatgagattactagtcgatatagccaaaagagaggataaagagaacgcacagcatcaggcgaatgaccaaagaggtgcatggtatggccgggaaagagtttcgagattcgttgatgagtaaacacttcggtcaactcaaatgcgtatctgtttggtcatcagttaaccgaagaggaaaaatagattcaagaagatagagatattggatgatgggttaatttcaagtaatgattaatatcacggattcagaagattaaataccttgagagggtgacattccctaggtagggcatccattcctgttttcgaattcaagtagacaaagcctcggtcaggctcatactgagaaaaagaaacacaagtagcatgctcgtactctcatacagctattttctggcgtgccgtcatgacaatcccccagttgtctgtaacatgtattgagaagatggatccaacttatcggtcttatgtatcgaaataacgatatagcgcgatagaagatacgtactgtacccagacagtattgcaaccgggcgcatcaaccaacggatcagacctagcagaacggatgaaggattgatcgccatcaatgagcaaatggcgcatgaaacgaaatcagtatatgtcaaaataggtcatgaatcaatgtaccagaaacgaccagacaaactctttcagcagatgtgcaaaagtccagataacatcccaatacccacatccccatcgagcatggatgttatctgagagcgtcttcgtgttgtcccctttcggaagtagatacaaacaaaggagaaggataaatcagcctggtattccttcaagttctatgatatttatgatagataaatcaatttgaacaggtcaatgagcttactcacattctccccattgagggccccatacgtcgactactaagcctggatgccggagggaggcatcgattagttcatagatgaccgtactaaatggacgaaagagggttgcaatccagaacggtcaaagatcatatacatgccaatctattcacctccttaacgacgaaatctcaacatcgaggtgattctgttattcgtttgtttcttagaaagaagaagagtctcactccattcgatccagataatctttcgtatcagtcgacacatagagtagattagcgtaaggaaggacaatctatgatccatgtacacaaagctatgctacacaccaaggtaatctacgatgacgccaaaaccaagagaatagaaagagtgaatcagcgtttcttaaagattacggtgaagtgtaaagagattgaaactcacctgtcaagaatagcaccctcttctttcttccttcttctccattccatttaacctggtagtcccacggactagctcctactatctcggggttaccataccacgcagggaaccggcctttaataggccttgcttgttgcttctctatcagacttgattgggtttgaatgtctgttcgtagagacgaatggacgtagaacagacaaatcgatcctaagaccaagatgacggtaagaagaatctttggcggaggcaaatgcatcaggccagatgtatgatgaacccaagggtagaatagatgtcgcaggaggctaggtagaagtaagagcccaaagaaagtgcagacaagttaatcagtaaagcgaggtaagatattgccatgccaagttgttatcttatgtattatatatcaatacttgattacatagacgcgtcgcaacgcgatacgcgttaatgagcttgggccctttgctgcgcgtggctacttctttgtcgccactttcgatcgtttctctgatggatttgtctccaccacattgcactcacatcagcatacacccagcttgttcattgcacacgcctatctcatttgttatcagcagacacatacatacatggacgaccttactcagcagacaaaccaaaatgagttagtaggagccgaggaggagggtgattttggagacgagtccattggaccgctcctcgtcatcaagctctctgttcgtattcctttctttttcttcctttactccactcgacatgtttcctatcttcttcaaccgcgctcttctttgcgaagaatctcgttatgaggattcatcgagtttgctaacctgcgtacgagcacatcttctttacattttccgctaacaggagtctggtatttctccggccgattgcaagaaacttcaggacgcaggccttcagttcgttcactcttcagcttacttgtcctatcttcttcttttcaaaaatctatattcattctgagcattaatttccttcgaatgtctcttgttgtttgatgtgtacatttcaacagtacggtggaatcagtggcgttcactccgaaaaagacgttgattgggatcaaggggatatccgaggccaaggctgacaagattcttatcgaaggttagccaaactataattacttgtcatttccctaggaagcgtgcaagtatcgcttgttcaactcgcactcttggtattcaatcttctccagccaacaagcttgttccgatgggattcacgaccgccaccgagttccatcagcgccgatccgagttggtgtgtatctccaccggaagcaaggtcctggacacgttgttaggtggtacgttcattttatcgacacctctccgacattatcgtcgagtcactaaagcatctggcccatctctggtctattctgtaaatgcaggcggtattgaaacaggagctatcactgagcttattggagaattccgaacaggaaagagtcaattatgtcacacacttgctgttacctgccaggtaaagtctcatctcgccctaccctgacccctcgatgtcgccccgatatttatatcatgggttttaacaaatatgttttctagctaccgataacaatgggaggaggagaaggaaagtgtttgtatatcgacacagaaggaacgtttcgaccggtaagagtactcgctgtggcggagcgatttgggctcaatggcgaggaggtgctggataatattgcatatgcaaggtctgtcacaacaactcttccgtcaaattgtacggttactagatggaggaactcactcaatcattgactctgttctcgtcagagcgtacaattcggatcatcagcagaaactactcttgcaagctagcgcgatgatggcagagtctaggtacgtgtcgtctgtttttcgtgtctatttacgcgtactcatgcttgattctcctctgtgtgttttcttcttaggttttcgttgcttatcgtggattcttgtacctcactctaccgagttgatttctccggccgaggagagctctcggctaggcagatccatctggccaagttcctacgaacgctcatgaggctagccgatgaggtttgttatcatttatcttggttgaaactgatgtctattcttggtgtactgatgcaagtggtggtttttattcattgaaatatctgccttggttcgaacagtacggaattgccgtagtggttacaaatcaggtggttgccagtgtagatggaggagcgatgatggggccagataagaaacctattggaggaaacatcatgttcgcattgaccagttctgcattttttgttccctgactgcacaacacgagctttctctgacttcttcttccctatgatttcgatatagggctcatgcggcgacgacgcggctgttcctaagtaaacacagaggcagcaatcgaaagtgcaaggtgtacgactcgccgtgcttaccagagagtgattgcctgtttagcatcaagtacgtgtcttttacttttttttttggcaatatcctttctgtctatcaaatggtgtgtgtagaaattgacaaggtatcctttttttttcctcgtcaaacagtgcggatggaattggagagccagaagagatggatgataattgattagatgcttttgccttctttttttctttcttgccccaagctgcctttatatgtcttcccatttgatttgattattccctttgtcttcgttcccttccttcaattctttaggtgtcgttcatgttgtacaaccttcttcctgtttgatgtgaccaaaagaggacgaaacttctctcgagaagaacccttcctattataatatataaacgtatctgatcgttcaacccatgggaactgttttcacgccttttgaaatccgtcgctgcgacagagacacgagactgaaactaattctcctgagatctctcacccatccaatccgcctagtcctttcaagaacccctcgtatccatctttatctcccttcttggccggaccgcccgaaccagcaccggctgtagcggcaggtccgggtcgaccgaaccctgctttacccaagacacccaagagaccgccgaggagttcattgcctgaacctaagcctggcccggctggccgttcggttataggtttcgaacggacgtcatcgaacgagattgatttttcttgatagtcacctgtcgaatctcttgacgatgatgatgctgttgttgttgttgttgttgttgatggtagtgttgatggttggtgatgtgctgatgactgggaagaggagaagtcggggagggacggcccgatgtctgatccattgcctactgtgctgaaagaagaaggtgccgacaaagaaggagcggcgttgactcgtttggaagctaaagcagcttcggccgctcttttccgtttgacggccagtgggacgaacgctgctgattctttcctgaaatctcggagttgaggggcagcggagatgacttgtgaaggagcggacgctgacgccgccgccgtcggtgtggagttttctccgtctggtttgtcaaatttgttatcatcggtcgctcggacagaaatcatgttcgggttatcaggtaacgaagggtgttttctcgcgtgttggtgtgcttggaaactctgtacagggttcgagttcagcggatcatgtaacatcggtggtggttgcctggcggttggtggcctgttcatcggtggtcggttcgggttcccgttctgtggcagacggaagaaaggttggttgttgaaaccggccggacggggtggatacggtccgggaccaaacccaggtcggaacggagggaatcctgggttgaatcctgggggtggatacggagggtaagatgaacccatgttaaaaggtggcggagggggtggtccaggagggagaggcggctggaccaaagcttttggatttgggtttggcgctgtgggcagggggatgtcatcgtcatcagactcagattctgatggagtgcccgtcagaggggtagcgggtacggcgcgtgaaggtggaggagcggaaggtagagggatatctgaatcgtctgaatcatctgaatcttcttcagaatcctcgtcagaatcttcaatcaaaacccggtggatgacaaggacaagttgtggaggttttaaaaataaaatagaattgatatctagtatcagcgcaagttccagaaagaaacaaagtgttggaaaagacgacgatacctgatgcgatgtctggttcaagcactgcgtatgggtcgaccggaacgggtccggtaggtagcggaggcatgaacgctgaggtcatcgaattcgaagaaaggatcagtatcagatgaatgtttcctttctgccggttgatagtaggacgtgtgaagtagctgaagaaacctacgtttctctcgataaggcatccctggaggaggaactccgaacggattcaacactggatcatagtagatcgatcgttccgggtgtctctgtttggccaggaagaggagaaaagagataggaacccaacgcgtcaaactcgccacctactcacgcgactacaagggaagcctgcttggacattcacgtccggctagagaacttacgagtttaccctgctcatcataaagccctgctgcagctctggccttgcctttcgcttcgtccctctccctcgcctctttttctcgctcgtcctctcgtttgtagacgatcgacctatgttccgggtgtttctccacgtactctgccttttgcttttgaacataagtgagctctgactggagagcctcgagttgatctctatccctagcggagagtgggcctgatttcgcttgggcttgtaatctacgtatgtcagcttcgatgcctgtgtgtttgtatgtgtgtgtattaacaatggcaatgatgatcggaagaaatagagaaagagaaaaagaaaacagattgagtggaaggaaagaggtcagatgagtagacaagagaaggctgaacgtgaacagtacctccggtgtccttcttcaacgtagcgacctctcggacttttttcctatccgctttgttctacgttcgagagaagagttcaaacaagcgacccagctcaggacacatgtccgaatgtgcacacaaggagaggagagaaaacaacaggattggaaagatagatggacgtgagaccacagacctttttgatctctttcgctctctgtgctttcccttgattaattgtcaaaagattcaatccagagattcgatcggtcagccctgtggttccgcggtaaataggacgtatgagaacgagaacgaacgatgtgcatcggccgggttcattgatttctttgccatgatgatgacgacgacgacgatgatgatggagaatgagtgcggaaggggtgatcgtctgtgagggtatgatattggaaacgaaggtgtaggcgaggtttcgtcaaagtgacctagggttaacgtccgactgttccaccagcgctaacatggatcacacgtttgcctcctctttctgctccagcgcgcgcatatacactcagatgtttcagacacggccagacactggttgaacagagcagaaacagaccgtcgaaagttaaagagcatatcgacaagggaacagaatgagataaaaagttagaagaaagagaacgacgagaagaaacgagatacacagcgtgaatattccctttctagccttcttgtgaatatatgtataaaaagtatctagcacccccggttagatcatcttggtgcctcgttcatactcatctcacgatgcatactctaaacagacgaacaaaggccgacatagagaaaagaaagaaaaggtgtgatcggcgtccagagttgataattagaaaaagattaaaaaaaataaaagatgaacgaagtggggttcgaacccacgcatccgaagatagggctgtttaggatcgtgtggatcttaaaagcaccgccttagaccactcggccattcgtccagttgttaatgatggaacttaacaagaatatgaccagaaaagtcaaatgatgagaggacggtggtcccatagccgagaggttcatttcattgggtatccgatgggaaagatgtacagatagatgggcgggtattattatagaagtacaactcgaaaggcaaagacgagaaggagaacaaaaggaagactgaaacaccgagaagaggagaacgtctgagtgtatatgtgaaagggatctgatgagaggtattatgggttgttcaatcaaagaaaaaaaaggaggaggggggggggaaggaggattcttttaatgatacaatgcctgcttagacgtccaaagccgagtttcatcctcggcctgtcgtccgataagtgtgtagaagggagaagatgaaaagtctcagtgagctgcttcctatgcgatcaaagaaggaggtgaagcaggaaaaaaagagaaaaaacaaacaaacaacaacggtgaaaacaaagagacaaacgtaccctcaacagaactgcctgaagctctccctctctctgtccgatccgttgctcgagtgatcgcatcatccctctgaagctttgtagctgggccaagacgtgttgcgcgccatcattggtgttggcgtctccgtcggtgtgtgtgtcaggtagaatcgagtctgacggcgtgggcaggaacgaggatgacgaagatgtgtgtgtgggcgtatgggtggccgagcttcctccgccggctaatctagaaagcgaaggagcctgttgaacgagagcggagcgtaccgtgggcgaatcaacaggtgaagtcgaggtcgagcctatggggccggggccggggatggggacggcggccggatgtacgggcacatcaagcgaggcagcccatgtcggaccgaacagacgttccaggtgggactctaacagacgttcgcggctctttcctttctcaatctctctcgacgccttctcgatctctctctggaagcctgatagaagggattcctggaaactgttgggtgaaggttaggtttgaggaactgggggtgagcacacatgcgcgc

SEQ ID NO: 2334 - DNA, 4354 bp, Xanthophyllomyces dendrorhous
acctgaattcacgcatgagttgttcgatctctgatcgaggaggtctcgatgttagttgactctggagtagatccacctgatcttgaagctggtttagtgaaagttcattagatcgaagaggaaagtcggaaccgttcgcgtttcaagttgccgtgtttggaggagagagaaagagagaagagatcaagaaagagagaaagaaagaaagaaaaaaaaacatgatcagaagaaaacaaaagagaaaaaaaaaacatgagcgcgcccagacatgagaaacccagaaacggcagacccaacaggacgaaccttttcgcactctctttcctttgtggcaagcctgtctgtcagatctacgagctggtcttcttgttctcctagtacacccaggctcgagacgtttccgatgtgggtagcatggaacgagtcgagtatgctcgtccgtctctgggtctttgtcgacgcggtcgtggacgtggttgactcggagaagggaccggcggtggacgggccggtcgaacggagtgagagcgacgggttggcttgatgtgattgacgacgcatcgtgagctagacgttcggtaacagagcggaagttggtttgattcttgtagatgtgtgtttggaggaagaagatgaagagacgatccaatatggggagaacggaaggtgagagtgaagacgcgagcggccgtcgaccgctttttctttattttcgctcgaaacaccatcagtaaagaaaaaagaagaagcaaaagaaggtaaagaagaaggcggccaacctcttttcgggaacagatacaaccaagacacacttgtacccacacccacacccacacatatagaggatggcaccactctccccatccgtgtcccttccgagtagacctcgttcgcccactcacggctccttcccctctcgactgcgacgggactctcgttcgccgccgcctgctatcattgctgctgctgctgcttcttcttcttctcgttggcgaggagacgaacgatacgatgaacgatcctgggccgggggacattcctattcgtacagggatccatcctatgggacgtacagacctcgggaaagaagtccgagcccgaggcgataccgagaccacagggagggggagagatattgggatgacgagagatatcgggatggtgggagaggagcgtacagaccgagacagagggagagggataccgacagaaggtttccggatagagaccgccggtttgattctgatatctgtacgtgtgtgtctgttgtcttctctctctctctctctctctgttcagacgatgtgatacgaattctgagaacgtgaatttgcctttgcttttgcttttgctattgctgttgctgttactgttgcttttggattgttcactctttggctcaaacacacatacatacatacacaaaataaagccttcaaacagagatacagatcaccttctcctcgccggctacccaatcgatcgccttcacctcttgattctaccccgtccactactactgctgcctcccaccgaccgacaccatggccgagacagacacaagcacaaacacagacaaagacacaagcatcaggagggaccggctcggagccatcaccggagaagggttcggaaggcggacgagaaaaggggatgaggaaggtgacgccggatccagagatcgaagagggagaactcgatcctcggtctgctgatgtcttgatcgagccgccggcgttgacttccgagaaggacaagcgggtggagagagaacgagtaccggcggtggcggcaaggagttcgtctacttctcggttccctccttctggcccaagggttcccccgggcgatcatcgagagaaggagagagaacgagcggggatggccgatagggattgggagagagaaagagaatgggaaagagagaggggaaaccgaggaagaaggtttgagagtccctcacccgttctctcgagaggcggtccgaaacgacctggagtgtattcggactacgaacctggttctggttcaggcttgaacggagctggaagtactaccggtgggagggacgattggaggagaggtgggagacggagtggggaggggggaatcaacaggcctgagcacggtcgagtcggttcgagccgaaggcctgggcgatcacggtcacggtcgcgatcgatttcccggtcgagggggagctcgagctcgagatctcggtctcggtctcggaccagtagatctcggtcgagttcttcgacgacgagatctgatgttcgagatagagacgatgtggccgggcgagtggctgcgcctgggcatttaccggcgaggattccgacggggccgatgtcgacgaacaaccgaggccgatgggcttccgaacgggcccggccgagggctgcgtctggatgggatcggacggagggcgaccgagagcggttgctggcggtggagagtgagcgggagaggggccgggtgagggagagagaccggcgggagatggagttgatggatgaccgcagacggaaggatcaggctggggagggggggagagaaacggagaaggagaaggggaaggcaaccgggcagcctctgggagggaaggaatgggcagagaggatgaagctcttggaggagcgcaaggcgagaaaggcagaagccgaggcggcgacccgaccgaggggtgtacttgagcccgttcgggatgacggagcgcaggagagagagaggcagagggagatcgagagggagggagcgaccgtgccattggttgtgccatcgattgtgtcgtccactgagttgtcgactgtgccatccgctgcgtcctccatcactgcgccgtcgacgacaccgaaggagtcatcgagagagacgagaaacacaaaggaaccggaagaagacgtatggaaggcggctcgagcgcggatggagcgggacggacgagagcgcgagcgactggagcgagaacgagagcgggtcgaccgggtgcttgctcggttgattgatgggatggccgaccgactggagtctgagcgtacgtcttgggctctccatggggacgatgatccggaggtgaggtttttttttttcttttttttttttccctaaattttttccaaatttgtttgtgtgtaggcgtgcataagtaagggtacgggcgtgctgactatctgttgaacgtttggaatgttgtcacttttttgtttttgtttttgtttgtgtttttgtttttgtttttgtttgtgtttgtgtttgtgtttgtgtttgtgtttgtgtttgtgtttgtgtttgtgtttgtgtttgtgtttgtgtttgtgtttgtgtttgtgtttgccttgtctctacagctgacgaaactccgggggacgctgtctgtgttgacgaaggatgggatccgcgtggggtgggagctgtggcagtctcggcaggagctgtccaacggggaggttgatctggctgcgtttgaggaccgacggaggttggccgaggcgtggggtgtgaggcgtggggtgtgaggcgtgtgtagggtgtgtcgtgtgtggggtgtgtgtgtgtgtgtgtgtgtgtgtgtgtgtgtgcgcatatgtgtgtaagggtgtaacaagcgggtgcaagcatgtggatgtgtatgtggatgtgaatgattatatcaaattgtcccacgtgttggtgaggttgactggctgacgcacgttttcgggggggaggaagaatgtgtgtatgagaatgtgtgtactagaggattccactagagggttagattacaatgtgtaatacagagttgtattagagacaatgcaaaagagagagagagagggcattgagaatggactagagagaatggactagagagactgtattatagagtgtactacagaatggcctacagaacggactacaaagtgcactagagactctactacaaagagcactacacaacgcactacacaacgcactacacaacgcaccacacaacgcaccacacaacgcaccacacaacgcacagagagcaccgcatacactccacacacacacacacacacacacacacaccagcgagcagaggaagggacagtgtattggcgaattctattagggaattctattagggaaggcactacaaaactgtattgcccgtttggttacactttcctatagacctccctagtacgtttcctagtacgtttcctaatacactctctaatacacttcctaatacactccctcatacacttcctaatacacttcctaatacactccctaatgaaattcccatcggccctttctttccgccgtctttctgctcactctcgcttagccttgaccttggccttaccctcttccccccccc

SEQ ID NO: 2335 - DNA, 318 bp, Xanthophyllomyces dendrorhous
cgttctctctctctctctctgtgaccttccttatagctttcaatctgacgatctctctctctctctctctctttgttctcctccccttctctccccttctctccctgctcgcttgtgcgtgtgtgcatgcatacgttcactctctcccccgccccgccagttcggaaaacaaatccagagccagcagatccctggctggggggcgttctacctcgactacaagtttctcaaaaaggtcggtccttcctttccccctcgcctttctctctatcaccatccttgactgttcacttgatctcatctctctttctctctttg

SEQ ID NO: 2336 - DNA, 315 bp, Xanthophyllomyces dendrorhous
ctatcaaacccaccctccggattctttactggcgatctatccagcttacaccccgatagtaacgacaactccaccaccgctatcaccaccaccaccaccaacagcaatccactcggccagaccgccgcgccgcccttatggttctctgcagagaacgggttgatcccaaccttgaccgctcctaccatgacaaacaccacggccacgaccacaacgacaacgacaacaaaaacaacaacaaatacatcctcatcctcatcctcctcatcctcgttcaccaccgtacccatggaccaagacctcattcactcagac

SEQ ID NO: 2337 - DNA, 884 bp, Xanthophyllomyces dendrorhous
gtatccgaacagccaacgaacgaggcttctttgaactcaacccgctagacagatcagaccaccccgcacacgacggccggtccgtcggtggaaagaaaggaaaggaaagcgagttgctcgtcgcccatcgcaccgtctttttctttaaactcgagcgagagatcgaaaaggtcagtccaacagatggttgaagcgggggagctttcttttctttttttctttccgttcaaaagccaaagccaaagccaaagccaaagccaatgctgatgctgatccctctacgcaattcatctcttcctttctcctcccaccaagatcaacgcgttctacctccaaaaagaaagagacctcagactccggctactcaccctcatctccaacagaaagcgcatcctcctcgccagcagaggttcaaactcgacatcctcgatcgaatccagaaacggctacatcccacacggttccaccttttccagcgcaaccgtcctcgtcggttcaggcggaagcaccagagcagaatggaaggcgctcgaagagggttggaaggtctttgagagagatctcagcaagctccaagtgagatgtttctttcttttcctttctgttcctttctctttcttgttacttttattttgcttgcctgcttacttgcccgcttcttttcacttccccctcccacagcaattcatcgagatcaacgctacagggttccgaaagatcctcaaaaaatgggacaaacgaagcaaaagtaacaccaaagaactctacctcgaacgtcaggttgaagttcagccttgtttcaacagagaggttcgatcccctttcctctctattcatccttcttttctatctctccaatcaaactcacctcctttcccctcctt

SEQ ID NO: 2338 - DNA, 1397 bp, Xanthophyllomyces dendrorhous
ctccttcccccccctttctatgcctacctactcatcaacagttcatggcaaaactctcggacgtcgtggcagcaaacctcctggaccaagacaacggtaccgaaggactctacgacgaactcgacgagatcgacctcctcgataacgcgctcgaccctctcggcaacacactcgaccccagactcctattcgagtcctccccctacgacccatccgaagcactggccgacctgtcgtccgacctcaccaaagcgatccacaccctcgaaccagacgccatcctctccgcctttgcccggtccatcaacgacatcaccatcctcgagtgccctcggcaggacgcagagcgcgtcatctggaaggccgcgttggacgtgcccgaaagcttggtcgacgacgtcatcgctctcatcggtgaccatctcagctgggacaccaaagatcgcatccacagcagaaccatccttcacgaagcagcgatctctggcagcctcgccctcgtcagacactgcgtccaacggggcatccatcccggcctccgcgactgttacgaacgaatcccgctccactacggaacgatgaacggccaccccggcctcgtcccttacttgctctccgtcggatccgacccttccctcgtcgacaccgatggctacaccccgttgatccacgccatcgtcaacggtcagactgagtgtgtccgaatcctgctcgacggccctttcagaggtggaaacaatagtagtgtcagtagtgtcagtagtggtagtggtagtggcagtggcagtggcagcaacaacgataacaacaaaccagtcgactccaactctgccgccgacactacgaacgacgggaaaccatccttcatcgaaccgctcatgtcgatctcgaacgatctgatccccctctctctggcgtgcgaacacggacacgaagaagtcgccaggctcctcctccgcaagggcgcaaaggtgattcccaactcggaaggcctgtacccgctccatctggccgcccgggaaggccacgccgggatctgtcggttgctcgtccaagaaggcggccccggcatgggcgggagggacagaaaagacaagtacaacgaatggacacccttgttccatgcgtgtctcggggagagagcatcccatgtggactgtgtgaacgtcctggtggatgctggctcgaacgtcaacgagacggatgaatacgggaagaccagcttattttacgcgtcgtactatgttcgtccgatctgttcccttccttttttttcctttttttttcttttccttcgttcgagagctgaacttgtctgtcttttctatccttttttaaaaaaaatctatttaattaattttaaatctctttctcatgatgggggaaaatccttaggg

SEQ ID NO: 2339 - DNA, 1289 bp, Xanthophyllomyces dendrorhous
tccttagggtgtaagtgtcctgtctctttgatgctgcctagctttcttttgttcatctgaagtatcttctaatcttcgtcgctcacacacacacacacacagcacatcggctcaataaatatcctcctccaagcaggcgccaatgttcaagcaaacaagtcgttcgtcacccagccaaccaacacaaaatccactgacgacacaggctcctcagagatgaaacccctctcggactcgcccggctcgaatttcgcactggacgaaccgatggagagcgaggccgagctggacgctatccccagtctgttattgccaccgccgatcgtcccgcttcagatttacggtcatagctagtctgtcctgtttcttttttttatttgtttatttatttaaattctttcattcgcgttcggtggcgcgctcagttgtactgacgtatgcgctctctttttctttgcgaatacaaccccccttccaaacaccactccttacagcctcgacaaagaatgcatggttcagctctcactcggtcatccgttctcccgcaaggaagcgctcggccatgccccggtgctaccagtcaagctgtacagccaatccgaaggccacgcaaacatgcagacctggtcgtccatcaaactggtcatgacgtccaagccggactttacctccatgccccacagcgtcatcctccccctggcggacgaacgggaggtcttcaactttcacgtctccgcacaggacctgccgcagttcgcgctcgacttttcgctgtacccgacgttcggcagcaaagtcatcggcaaggccgtcgttctattctcggcgttcgaggacgtgaaaggtcaccaggcgttcgtcgcgcccatcttggaccaccatctaaagactatcggcgaggtacggaccagagctttctttctttctttctctcttgttttgctttctcctctctctctctcttttttaaaagagacaaccaacgttaacctctcacacgttcactctctcatcaggtctcgttcgaattgagcgtggtccgaccgttcgtgggcgttcaactggagatcggaggcagagtagagacctactggaagtcgaccttgaacgtccccagcttctccggcgtcagccaggatcacggccgacagccacatcggccgttgtccgtgtttacgtcctctcccagagtcggaggccccaccagtacgcccggcggtcagaacccagtcggatcgagtaatccagaagccggtttggtcacctcaacttctctttctgtacgtgat

SEQ ID NO: 2340 - DNA, 2873 bp, Xanthophyllomyces dendrorhous
ccctgaccgaattgcgtttcttcctctctactccttgtggccaccgttttggggtttctgttttgttttcttcttcttgcacacaaaagggaaaatacgtgcacgtcatcgttcaggtcaccagagatctcgttcctgtggtctactctgattgggaactacccgtcgatggcttccagatcggtgtcgccgacgtcacgttcgcccagttccaaaagttgggccaggcaaaaggaaggagcatcgaggctctcaaagaaaagatcgtcggtgacggatcgtccgctggtatgtggcatggactgatcaaacagtcgatggcttccctggattccatccttgccgttcgtccctccatacctcttttcggcttgctctcagtcttgttcggccctgtgtgctgtcgctaatgcccgagacgattcctttttttttgctggatactatatgtgctctcccgatcgtagacgctcccggtctcgtttggagtgaacctcgagctaaggtataccaacgcacacgacgccgccagacaggctttcaacaacatcatcgagatcaaccaattcgtcgacgccatcctccgagtgatctaccgagccggtaactcttccacctcttcttccattgtcgacaacacctcgttctccctctcgcttccgccaccaccgacgacgacgacgtcggcaatagagtcaaccgccggcggcaacaccacgagtagtagtagcagcaacagcagtagccataaccgaaagatcatcttctcggctttcgacccgaatgtcgccagtctgacaaactacaaacaaccgaactacgccgtgtttttcgcgagttactgtggtctttccagaacacgcacagaccgggggctgttgatcccgttggaggtcgaggtcgaggcggacaaacgatgtgtctccgtcagagaggccgtcaagtttgcgagggcgaacaatctgttgggtgtcttgttagatgcgacgttactcgtgagtccaacaaaagaaaaaaagttctttgtggtggcctttctttctgctttgctttgcttcgcgcttttcctttcctttcattcctcaaaagaaagattgaatttgttgctgatcatcgtcatccggggcgtatcgttgtctgtctgtttcaatcatacaggctcaggttccgttcttgatatattcgtacgttgaccatacttgtcctccgcttgccctcctcctttgttgtcatcgttgtttccggtgctgaactctccctcttcttcccccccccctcctcccctcaaacaaacactcgacacgcaatgatagtgtgaaagaatcaggtctgatcctgggcacatttggggaggacgccgatctagagacgctcatgtctggacatgggatcgaaggtttacccgctatcgacgcgttcatgaaggatgggtgagtgatctctgtccctctttccttctctctttccctgcctttgatttctcgggcgctgatctggatcgaattatcttctcggcccatcgtttccgttttgtctttcctttcttcccttggggggacgaacagggtgatgtctcacgaattctaaatcgggctttagggggtaatcgtgtctgtcgttgtaaaaagaaaaaaaaaggttaaaccaatacatcaaataagcccttaccccccccaaaaaaacaacaacaattaatacagagggagaagaggtttaaaaaaaggacgcagatagacttggtctagcgtaccacctttcgttcaacatccattcaattctcttccctctccatttcttctctttcctcacgactgtgttcaaccataagatatctaatactagaactttctgctgtaccaaatgaatatctctgatctttatactatctcccctccactccctttaccccctgtgtgtctctctcgcgtgttcttctcttctctttcgaatacactctgacgtagactaccatatgccgagatagatgaagccatacataacgaaagctcacgacgtcaagcaaagcaaggtaaaaaagatcacgagcttcaaactacaggaaagttatcgatcctgttcgaacgactgaacgcatgacatcacccatctgctgcctcttggtcttctgcgctatgcgcccgaggggtgctaggtcgacaccccatggcatcatataaatcccctcttgaccaggtcttcctttcaggaggaatccttcttcctcttgctaccccatcgctcacgtccttatctgaatcataaacaactaccccacacatacacacacacacgatgtcttctgactcaacgtatgtccgtctccctatgttcacatcctctctttcttttcttcttgtttgcctctagaggacgacgctgaacaacgtcatcccactcgagatagcgtgaagaacccaacggacgtcgacacggagatcggggcgaagggagattacgcggacaccacgtattctgttgagtttttccctttctttcttactttgtcctctctccttctttggcggcctttgccggtcgggtcctttctttctttatttggcgcggcaactgagtgagtgactgacttcatatccgggctttctccctttgggatggaagagcaacaccggaaagacgtccatctccggagggtcagtcctctccttgtttgctttttcctctttctttctctcttctttcttgatcgactttcatggtaaccgtttgatcctgtgatatacaatccggaacaccgacatccagagagggaaccggaattaaccaccaagctgtgaagagcgacaaagctgctggtctcatgggtccgtctctcttccctcctttctttctttctttctttctttctttctttc

SEQ ID NO: 2341 - DNA, 6566 bp, Xanthophyllomyces dendrorhous
cccctcgtttcaaaaataaatgaataaatcaagcctctaacgttcggatcttctccttcaaccaatcgatcatctccgtcctcttgacgtccactccgttggcttccacatcttcctttgatttcgcctgttccttgatcttgacggtacccccctgaagctcgtcagaaccgatgatgaccgcgaacgggatggagtctctgtcgatcacgtcgaactgggctcgcgctcctttaggcttgactttgtacataaactcggcctgtggcgtcccgggacagaatgggaagaagaaacggatgagatgttctgcacaaatagatagacacaagaagagagcgaacgtaccttgatgccggcttcccagagctccttgcagatctgcatacgctccttgatgagaccatcaccgacagacatcacatatacctcggtctcctttcctctagcagctttaccagtcagtcgttccctctcggcttgcttggccatcatactaattttacggggaagaaagaggaaagaaagacaggcagcatttgcacaccatcagccgaattctggtttcagaagcacttatcgatcttcccccccccaaaagaaggataggataagaagaagaaaaagaaaacgtacatggcgtaaactctctccacacccacactgattcccacacagggcactctgttcctcgtcatctccctgtcggccgctttaccctgagctccggaagcagcggtggtgaacataccgaccagattgtcgtaccttcctccagcggcgatacttcccacaccaacggtcgactcatcgatctcatctccttccttcttgtttgctgtcgacgagggagcggtctggccactgacaggggtggtggcagcagcaggtaaggcaggttcgatcgagggaacgacagactgagaaggaggggcggaaagctcggtaatagcttcgtaaatgataccggtgtaatagtcaagtcctcgggcaagagacaaatcgaacgacatctatcggattacacaattgaaaatgaaggtgagccaaacgtcgtctgtggtcgcccaaaaaaaaaacaagaaacaagtgatttgacgcatttctcaagaaaacaaatacaaaccttctcgagacagccgtagacgtcgaggtactcgaacaagattcgcatatccttgagaccggcagcggccgaagcgttgctgttcaagtttgcgtccttctccaagatatccagaagctcccaacctcgtcctacgagaaacgatgtccaaaagataaacgagaagtcgttaactattttgtataggtgctttctttcttcaaaaggcgcgccaggaagtttgtgacatacccttcaacttgacgtactccccgatcttgtcggcaatgactggatccaaccccttttcctcaaccatctccttcttgacgacttcccaaggagcctgaaaggaacagaaaacattcggtaagtcatgcgtgatcggacaaggcgaagaaaaacgagaaaaccagcagcataccttgtcaagcttgtcaacagcagaagagatcgcccgaatcgagctctcggggactccacagagagagaaaattccgtccagaatctttcggtggttgatctgattaatagcgggttatgaatagacaggatgaccaggttcagctcgactccatgataaattaagatataatcaagtctccgtagaaagagaaccgaaacgaaccttgacagtaaagtctccaatgtcgagcgcggtgagagcctcacaaagaatgctcaagatctcagcatcgggcaccatggcatcatagacaccagcaatatcgaaatcctatatatatatacagagatgtttgaagcaacgtttagtactttgctaagtggaaaggaaagacaggaaaaacaagttaagaatcagacggacacattggtaaaactctcgaagtctacccttgctcatagcaggttgatcacgtcggtagaccttagcaatgtggtacctcttcatagcaacgactccattcatggccaagtaccgagcaaagggaacctgtttcggttaaaagagataagcccgtgacccgaacaaggacgagcaaatatatttgaagaagaagacagccgatcaaagaagcaattgagaaatttaaaaacaaggacgaacggtcaagtcatatcgaagcgaacagagttcacctccctgatcctgaagatcgtagatcaacttggaatcctctccatatctgtttaacaaattgggactagttaagagctgagataagagagggtttaaacaaagagttcatgcgtactttccagccaggatctctttaagctcaaaaacaggagtgtcgatagtactcgctccatgcttctggaagattgtctcgagggtagagaagatctttcgtcggacagtggtatcttgagcgtggaaatctcgggtaccctaaggaggagagagccaaaagcgtagatagctagctaggtaagaaacatgcgcccggaggaatgggaaggaaaggaagaaataaaccaagaactgttcttacctttggaaccttcagactcaactttccgtgagcctcaactccgaccttgctctttcctttctgaccgacagcgaggggcacgctgacgggcgcatcgctctttggaagaagagctttgagatctttcagcctttggatctctggctcacagggctgctttgcgagctttagctttttgatctgagctccgagctctgcaatctgggtcggaaggtcggctgggggagcggtagacattggacgtaaagaacttggtcgattgataagctggccgacaactggaaacaaggggaggcttcttgaatagtttgattttatacggtccaatacaatagctcgaaggcgcatgcaactgctcctttatggagagatctgagtgtgtgtaactgtgggtgggaggtagggtcaaggatggattgagagctgatgaacaaagtgaaagaagaggaaaaaaaggggagcagcggataagcgtaaccatccagagtaacaaaaggacattagttcgcatgttactcatatatcactacatatgacacggttacataaggccccggtccgacggatccggttctccttgtggagttaaaccatctcaaatttcatctcagctatccatctcttctatctaccactccgacccccacataaatttatattctatctctctctcttcttcatatttctgcttcccaagatgatcgcaaactcagtcgccttttcagtcagacaacagatcacctcgaccctacgcgcttctggtagggtcgcagtaactcccatctctgtgtccctccgatcattttcatcctccctcagacggttcgacgagaaggatgacacgtctgctggatacgacgctcatcgggtggctgttagtgattctattatctctctttgttcctccttcaccctctatcatcaatagtctacatcagtctgatctataacatccctgactcgaggattcattcagccaaagacgccgatgctggctgctgttgatgattctgtccgaatcaaagtagaagacctcgatctgggaacggatcgttcgtctgcttactgttattttcgttggagctgatgtttttgtttttatttccctaacgagttcggtttcttcctcactttgacacatatatcacatcacttcctcttcacaatctctagtgggacaccgaacggcaggtcagaataatggcaaacaccaaaaacgaacgcttgctagtctctcattcgaaggaaaatcttgtgtcatcactggtgcggctcgaggattgggtaacgtgtttgctcggacgttcgttgagagtggtgctagccaagttgccatcatggaccttgatcaggcagacagtgaacgagctgccaaagagatcgatgattggtttggtcagtcaccattctttatgtgcatctgtgtgtatcatacacgggctcattttattcttcctgcttcggtctttctgtttgatcaatcatcttagtcggtcaaggagaagctaaggaaggtgaattagatattgttggctatggttgtaatgtagcggacgaagaggctgttcagaagacattccaatcgattcgagagcgattcggcaagattgatgtcctcattaccgccgccggttagtattcccatctcatcatcctcttcaggttgctatttatattgatcaatcggggttcctcatctttctgcctacttgtttatgcatacgtcgacaggcatcgtggagaatttcccaatgctagagtacccaacggcaaagattaacaagctgtggaatattaacgtcaacggaacctacttttgtgctagagaggccgccaagtacatgttcgtgcaccttcttttggtttaatatttcacggtaatgatgtattgaacgacaactcgctccaatcttccttgttcatatacttttacaggatccaggacgatgtcagaggaagtatcgtcatggtcggaagcatgtcttcctcggtccgtcttcttcattctatcacgaagcaaatacaatccccgtggaaaaccttcagtcctgacatccgttcttgcttctacacagatcgttaacgtgccgttcgtatccttttgttctaaaccccgcaacggtcgatctttatggaaatgtaggaaactctgaccttgctattcgatctttgccagtcaaccacaggcgccttacaatgcatcgagtacgttttcatagtatccttctctctcaatatggagacatactactcagccttgtttgttcttataaattatttcgacttctctttcccttttaaaaacacgaaacattgaatgtattcagaggctgctgttagacatctagcagcttcgatggctgtcgaactagcgactaagggtgtcagagttaattgtctatcaccaggatacatgttgactagcttgacaaagacaattttggatcgagagacagagctgcgagacaaatgggttagtcctcccctttcttttctctttttttaatgggtgatcaaggtcgtgctcgcttgcgtgcaagagagggaggatctcggactgattatttgtcttgtttcatcgaactggatggggagctgatatagatttcattaactcctcaaggaagaatgggtgaacccgaagacttgaaaggagctgttgtctaccttgcttctgacgctgctgcttgtacgtacttctctttgtttgcttttcagggcttttcttttttgggacgtagaaagaaaaaagattgcgctgaacataactttccattacatactatttatgtgtatagatactacgggtatcaatctcaaggtcgatggcggatattctgtggtacgtcatttaaaatccattgtgtccaatgatgaaaataaagacagtttttaatcacctgatgtgtcctttgtcttaacgtttcttatccattctttgaatatcattttctagatctaaaccgtgaagtgatatcaaacgggtattcaatggaagttactagtgtaaatcacctctccttcatctcaatttcgattttaccaaaggactatattttctacaaatacaaagcgcaaaactcaattctattcctcagacaccctttattttgttgttttcttattttcttattttcttattttcttcctctgtcaggtgatatgatctatttgtcattgtgatgtcatgtatctatgacaaaccgggaatgctacaacggttgttctttaggtttaagacaggagattaaaaaagggaggcgtctactgtcgggaagtctgtccggatcggtatccgtggctgttacaaaggaggtgctcaatataagtttcgagatggtcaagttaagagtgccgtggagaaacttacacaaattgccactgtcgggggtggtcgccgtactgtgagatgtatgcctggtttgcgctctcctcgtcattctgtccatttccggcgtcttcccaacccttgttgaaaccagcgtcgaatctgagagaaggaaccagaggagtgagctgcagtagatgacgagagtaaagagtataacgaaccggtcgttagcagactgccaagaagagccctcctcagagttgttcctccagtagttgactgtacatcgataacaaagaggttgagtctgtcagtaccttgtctgaagatgtgataggatatgtggcagtggagatgggaaagaagagaagcattaggaggaaaaaaaacggaccgtgctcgtcctgagcggtctgtcgctcctgatctcgctgagaatcgtccttgaccatgatgagtgatttagtttgtgtttaggtgattgggtgtaagcaagatgagagaaagtgagatacggggattaagagggaagagaacgccccgatccgacagtcaaaggactggtcctttatgtttttttttgccccaaaggccgaattcaaacgccatctcatctcatctcatcacaaatgatcaaacaagctaaagggcgtctacactgtggggagaaggt

SEQ ID NO: 2342 - DNA, 53097 bp, Xanthophyllomyces dendrorhous
aatcaggggtaacagccaccaaataaacttgagcgggcaggtcggatgaacattctttgacctgcgtggaaccaaacccgaatgtgacatcagccaaggccaagcgtgaaaaccaagaacgtaatcggatcgggttcggatcatccggtgggccctagttgtatagccgtgtcaagcctggcagtgaagttgagaatcacgtgagtgatgttacgttcacgaaacttgatttgttaccactagcgctcggatgacataatccgtaacagatcaacagatcggctcgttgctacatcgtcagaggtggaaatgttgatctctaggatccattttctctcgttctatctctctattttccatctggaccccgaccaacgttctttccatcattgtctggatatatctttctcttctttcttcttgtttttattgtagcacccaatttctcaatacgcttatccatatatacacacatcaccaaacgtcccgtcgatgaacgattctttctcatccagctcgcagtctagaaggaacaagaaccgggcagtcaacacggccggtacctccggcacgccttccggcggtaatcatcatggcaacggcagcggaggaagaaagatgaacgccaatcatcttctcaacttctccatgccttccaggcccgcacctctcgcaccacccccaaggaggagtagaaggaccggtggtggagagggcgccaggtggcaggtgttcaacaaagagagtacgtcctctcggtcgttatattgtcttgtatatcgaagttgtgctctgatcaccttttcttcctatccctttcttttatttgcagaattcgtcaatgcctcttttcgattcatgatgaagcctaccggggactataccgcacactttgccgactcagatatcttcttcaactggccagacatccttcaaatcctcatccccccggccaggccgaccatcgttgacggggtctccttaaaatcccacgatgctgttcttccgagctgtccaatttgtctaggggtaagcttcagctatcgagaggaatgattttagttcggctcgttagtcgccagtgggtattgactgattgggtctcaatttcatgatgataatcaggacccggtcgctcctcggatgacaaagtgtggacatgtaagtctccatctgttggcacccgctcattcctaggcttcaaacgcccgtgctgatcaatttcccttctttacctcaggtttattgcttctcgtgcatccttcatttccttgccttgagcgatgagcgctttggcaagtgtcccatctggtgagtttcattctgtacccctccttgatgcttggtcagggtcatttgctgagaatcttgaaaccttatcaaacttaacatttcatcaaactctttagtaccgacaacattttttcaaaagatctcaaatgcgtatcgctcttagaccctaatctctttgcatcatccactccgactagcatctcacgacccactcattcgactactcctaacagcacttcacaaacgtttcgccttgttcaccgtccacacaacactatgctctcccttcctcactctggcacttggccctcagccgccattcatccccacgaagctccatttttctttgtaccagatgtctcggcgtttgcccgattcatgcttgcctcgcccgaatacataatttcccagctcgaccatgaccttcagaatctcgaggccgagcgcaggcagcaagcctcagcaggtgaggcagatgtcggcctcggcttcatcaatgctgctatgatgaaggtcaaagaacagatggaacgcgccgggcttgaactcgacaccgagactgttcgaagaaagattcgtaccgtggaaggcgcggtcaccaaggcgagggagtcggctcagaggatattagatagggaagaaagcatgaagataaggcagcaggccgctgaaagtcaaccgattgagtcgatctctgtcgcaccgacacattcatcggtcgagcctctgtttccatctaaagaatactccccagcatccttggacctatcaacattttcagccccgccatctgataacccttcagccatcgaatcgcccattttaacctccaacttgattccccatgcatttctctctcatcaaggacatacctggtcaacggacgcccttcccgttgattctcctacacctcttacgaaacagccttctctatccaacccctcagacacctcatcatccacctcgccaaagaaatcactccaaccgaggccaccggtgagacctcggaccggatcagcgctcctgccctcggccgaaccttcgttttacttttatcaggccgtcgatggtcaacatatctatctacacccgttggatattagagtattgttggcagagtacaagtcgtatgctagctttccacagttattggaattgacggttgaaggcgctgaagaaggaaccagtgggttttatctttcttttcatatttccatcatcatatcgtgtttatcaggtgcacttagttgaacaaatattgatgctttgtttcattcttacctcatagtgaatgaggatcttcgacgacggtgtaaatatctagctcatcttcctacaggctgcgccatcacattcattcaagtcgacctaacacgactagctagtaaatcagtgctcgctcaatttgaagctcctcttcgtcaacgtcgacagcgtcggaaggataaaggaaagaaggaagaacgtgagaagaaaaaggcagaggaaaaagaaagagaagaggaagaactccagaggttgaatttgtcaagggatcactcatttccttcctggacaccgcgagcgggggcaggaggaggaggaggaggaggaggaggagacgattttgaagaggccttggagagaagtctttgggaggcagaacatacagaaccgagacctaccaccgatcttcttcatccttctgcttcctctcccactctaacaacctcgccatcatcctcatcgacgacgacaaacaacccatcaggttggtcagggcgctcttttgcctccacaatacatacatccgaagggattcagtcttggggtcggtctcgatcgacgtacggtcaacaatcccaggtagatgaggaagaggttgctgcgctctggaaaaagtttgagtccagccaggctgccgaacgaaaatgggatggaggagcgagtgtgagtacgactagcgcgggtggtggtcccgttggagtagaaggaacacaggcagatggctctcagactggtcagagtagaggtgggaagaagggaaagaaagcaaaaggccaaaaattattgttgacgggtggcggtcgagggttttaacgttcgattcgtctccctattgtgatctttctctctcgctctgcttaaataccttgttgtactctgtttgggagtttttcgttttgtcgaaatggtttttcctcaaattcctggcctcgtgaatgttttgatgatcggttgcgtatgctgatcttccatttgatccgagcggaaatattgatgctgacatggtttccgttccatcttcaatgatctgtctctttccttcactgacggctaaccatcttcagtactttccttgtctctcttctccctcctctctcctcctttttcgatcaaacatgtccctcgagattatcagatcatacgcaacatcacacatctgtcaggatcatgagcaattcactaacgatgccatctatcgagtatagtctttcctccttcatgatacccactcttcaaatttgccagtttcaaaaatgaataaacctgtcttgtcattcttttccgtcctatattcccttaaagctcctaacggaagaactatgcccgatctcgctgaaccattatccagaaacgatactcgtcaatccgaacgaatcaatcgagctcatccctggtgtcctacgcaccttgagagagaaaattgacatgaaggacaacgagaaatgggatgaagtgtgggacgttccaagaaaggcgattgatctgatcatgagtgttcaaagagggttgaagaggtcgagaagggtagatggaaagttgacagatctaggggttagacctggtacgtgaagcgggtcaaatttggatgggtgtatgcgcaagattattgacttgacttcattgtatcttcccaatgaagactctttcgtacgatctgtctcgcccccaccctctccagttttatccaagagagcactccgggagacacccaagattggatgttttgcaacgtccaactcacaggacctctcaggtagacaaaccaagacatttcttcgggcgctagatctgattgagccgtataacaaactcgggaccgaggctttgaagttggattcggaggacgttttgtaagcaatctgctttgatggtatcttgagaggaaatgtgacgctagatatacctattccctatcttggctaatcagagtttgagcgattggttatgctgtatgtttggtatatatatataaaaaaaagagatgttaggctctcattgtcggagaaaaccgctgaccatgtccgatccctcttgagttctcttcccaaaatacctaaaagcggaaagaaaaactcgaagcgcaatccgatcttggagagcgcaaaggatcgggcgagaacgttggaggtcgtcatgaatcctatttgggctcaagagaggcatgatcagttaattcatgagaaggtgattccaacctcgtcgttcttcttcccccttatttgaggctggagccttgagcttaactttgtatccttttggcaccgcttgaaggaatccacatgttccatgtccccaccaatctttccccgtcgtttggattctgtctgttacaactctagagacaatgttgatggttcgacagtcttacctaccactcttggccagattggtgattgtattatctcgacagccaagctggccggtcttgattctccgcaggggctaggtaagatgatggaagatccgtttagtatggaagcccttgatgagttcagtaagtccaaaggcccagaagatcgccgtgtattcttcttctttgacacatgaggtatccctttacatctgattggatgaatatagtgcatgtccctcctattccgtccgatattaccttttcgcctccctcaagcgatcctgagctgggtgcaggcttcgtttggccaatcaatatgtctacggagccgcatgtcgttagagatggagaagttgatgatcttataggtacgcatgcgtttattatgtttgcatacatttaggttgatgtcagtgaattaacttttgggagtggtaaccctctttgactttagaaccacctatattccccagggctttggaattagagactcatagagatcacgatattcaaaagtatgtgcgctgtctgcattgaaatctatatctccggctgtgagtgttgagagctcatgagcatttttaactgcaacaagatggcctaaatcgctgtctgaaatcttggcaaacttcaagaaccaggacgatgaaacatctctccaagatgaattctcctctacccctactcctcgttctagaatcgtcgacaaattcaagctagatattctcggatctgatcaggacaatcgacctgcttccttggccgtttcaccttctctaacaggtcaagcctcgccaactgaggaactccacaatccaaatgaccatactgatctattcgctctgagctcggatgacctcgtgcatgagctattaggtctgcttcatgaaggagatgtgagtactctcataggctctaccgatggttggcttgaagaattcggtccgacaattggacgaggacatgatacattccccagtaggtctccattcaacatactaaatgatttctaattgagttcgtatgatattaagtatgtccatatgatttctctgaaactatgaacatacaaggtccaccattgcgtccggcgaaggactgttttcctgcagacttaccaaagactccgtcgaatttgaaggaggtggtccgtctactatctttggtgccgccggaattattaacaaagcctttagaggtagtacgattatctgggcttacttctctctctgtcgaggttagtgcattaggttttcaagcacaaaggtcatattccattcgagctagatgctgatatttgttgatggtacctatcttagttgagttggaggtgtgtgttttctacacgaccttcattgacaataagctgtgactgatcaactatgtttttataggccttttccgcatactctaaaagaagacgatgtgatagatctcaacgatctttaccgtaaagaagaccacgccggatggcagctcttaattgatttggtcaaacctctcttctcacttatatctcatcaggacaacataatcctgtctcggacagagtcgcgccctcctgaccctctctgtttgtctcaagagttgaacggtttcatttatactcggaaggaaactgaattacaaggacctgatactggtgatctagctcatcaagtctctggatatggtgcagagccggcggtcgaacctactgttcttgatactagtcggataaatcagccggtcaaccaggtgatctctctccgacacgataagcgaccccgtctgatagacaatcacaaatctcttctttcgaatgtggtcgatgatcctactccctcccagctattccgccctgtcactcctcccatttctccaaatttgctccatatcgtctcggatgattccgaagcacaagttcaagagacacctctgaagacacaaagttttcagactgatcattcctgtgcggatccggaaaacatctcattcgatgatgaggtcgatcaaaaagatttagatatgtttcctatccctgaacgacttatcaacttccagatgtctgaacggctttcctacctcagtccgttgtctcattttctttctacccggaacaaacactttacagctgtcgaacaagtgtcaactcgtacttctccaaaaaggtctgagagatctgatgaacagtcgccttcaaaccaaaatctatctgaatctgctcctgaagagatggtcaagatgccccagaacctagcggaattcgagggattttctaccgatcagactggcagaattttggatgaagaagaagtatggtatcactgcatcggaggtcagaaactgctacaaaaccgtcgtggtgagtcaatctccatcccactgtatatcctctcggaatgcaatctgatgatatattgattggaacagcctatcgttcgttggagaaaagctttatacttcctcactatcgatcacaccctactctctctcgtgaagcaaattcttcaatcagtatcggccttgacttgatccttaccactcttaccgccgctacaatctatcctcttcaaattcttccctctattctctcacagatcccaaaacttgccgaacatcttcagagccgatacgataacttgtatgttattctgaccattccggccgacagagagacggaagtttggacgcccttggtgatatcgagtatagggaaggcacgcagggcgatcgccatgcaaggtctggatctgaatatggaggaaggcttgaaagtcaaaatcggatgggtgcgcgagaatggtttgggtgacttgctaagatctctcttggaatcatcttctacctccccttcaaagatgggatgtctaggtgatagctggctcgctccttgggagtatactaacgattgcgatgaagccagttgggaagaagtgggtctctttgtccgaactatcacttgaagagtgagattttagtaaaagtcggcatcgattattcatcgtcttcccttctacattcttgaatgctccaacccggggctcacagatggaatctagtttggccagctttaatcggatgaacccgttttcggctgcttggattctagctttgatgaaccttgatgaatttctcgatatggattctctagaaagggtagattccttcggaccgttgtttggggttcgccgcatggtcagcttgaacgctatctttaagatcgcgggttctttcttttccctatcatgccgtcttgaacttcattcctgactctccgacgaacactgattccccttaggaacgacaatccgagttcattgcttcccgaagattgaccctaccaagcgaagacagtaccccgagcttgcctctttcatcgcctccatcattttccaacatgcctttcgataatcattatccatacgagaagagggtcactggtcatccacgactctactcgcattggcaagatcagaatctagaggagatgtgtgatattctggaagaagatgaatactaagagaagtatgagcagatcatccgtcagacgttgatgaagatttgtattctctagccttttttgtgaatgtgtcatcaccctgccctagatgaattcatcatggatgtatctgtactctatatcaatgtttgcaggaaattatgataaaagatacataaattgacttgaaaattctctgcataagcgctataagagattgaagaagcgattgcaaacaagaacaagacacagacatcaaaaaggagaaaacgtttgtccattaaggtcgaccgcgtcgtcttgagatggaactcgagtgggatatcgaagatgaatcagaggaggataggacggtagtagctccaaaagaccgagtggaaggggtcgttccggactaatgagaagtaagaagatcagaggaatcaggatgaaaacaagttccgagaaagtgagatagagagggagactcactcctcccagcaagcttcgttcttcctccatccttttgtctttcttttcgcccatcgatcggtttgactcggcttcaacttcttcctcgggctcatcaaactcaccatcgtcctcctcctcctcctccttcaccctcagagcttcgtcctccaaacccttcagcctactcagctctttctcttcttctctcctctcttcttcctctcttctcgctcgaacctcagtagaagaatcgtcgtctgtgttatcagaactaccgatttgatcgcctgtgatgttggacattcctttaggaagtgaatccacccattcttgctcacgtttcctagatgtcagtttgggttcaggaagaccgtcctcaaccaattttttttccccagactcgaccgactttggtctaggggatgggaacgagctgggggacagaaggaagaacgtgaggatggatacaaggaaggtagtaaagagtgaagctcctgttaatgttgttagggataagatcggatggtatgccaatatagctctgttcagacgggcagtgatgaacgtaaccgaaatgagcgaccagaaagccttttctattctctcctgggcaagacagaaaaaggaagaaagcgaatgaagcgaatgaagagaaactaacctgaccccgctgagttcacctacaatcctgatctttccgccgtgtgtaacaagttcctttctacctcctccttccgaagcccatgagtcctgtctaccgacccagactgaaacctgtctacttgatttacttttattcttcgacctacctcctgatggaacaagcacaaccccgtctaacatcttgtttgatattttcgtccttcctgaccctctaatggtgctgatgattgtccaaggcgacaacaacggaggagaagatatcaaagtcgagacttttgacgaatggattgggtttgaagaatcatcaagcaagtctagggagaccataaagttacccagctcgacattcgaccgtgtgattggtatcgtcaaatcgagaaagatagtgtacggttggttttccctgaaataattggttggtggcaaagatattgtcgagtgaggcgctttattaggtagcctatgtgaaccagattgtgatggataaaggaacatgagataggcaatcataatcgactgatcaaaggcaggaaggagaagcatggagagcgcgaggacgaacccataatatagagagaaacctgattcccatgaatccacttttccccaagtgaaccagaatatcgcatagcccattccactaattgcgactgccatcaccgccaacaatcctgccagtatgaatctcaaagcaaacatatgtgctctgggcgagacgagaaggtcgtgtgtccatgagaatggaaggaggagaaaggaaatgaatgagcttggaggcggaggtggttgagcagatagactcgctcgatctttatcaatcttgtttgatcgaagcatttcgatttttgttgagaaagtgtgtacccagaagtggatggtggtggatggatgagaaggtaagtgagcatgggattggggaacgagctatcaagatgtgcgcgtcatcactttgggtttatcacgtgtcttttgtttagcgcagactctcattctcttccttcttccatttttcctttacacgcctgtagaaactataacagtcgaggaactctgtgatacaagaagggatttgttgaaaaaaatcatatataacactcgaatttgaattggcctcgagtggtcgatagacggaataagactctagataggttgaagatttttgtaatggaattctcatatatatttcttctctcttgtaatggagagatttagtctagaccccgaaagcagcacatgaatgaaaagaaaaggatcagtatgtcgaaaccgaaagcatcaggtgaaagcaaagaacaatgagcatagacgtacaaagcaatcgagtgataatgtttgccttggtgttttggatggcggcgtggagagcgtgaacttcctccttggtaacatccgaaatatcagccataaggtaagcaatatctcctttcgagtcggacgctgacttttcgatgttgtgccttgtttgagaaagacagaaatgactcggttttcagtgaggttctgccaaggacagacgcgaaagaaacgcaaacacaagaggaaagactcactcggcaaagatctcgttcacggctcgcaacactccgggctcgtttcggtgaatgtggcacactcggatatgtctctcgtcctcggcagcgatcgctcggagatcgacctctgggaagttgacggcaccaactgtggtaccgtaggtgagatacctcgagagcgctgaagagacctctgcgccaatcattcgctgagcctcttcggtcgagccaccgatgtggggggtgaggatagtgttcggggccttctgaattctagaagagaacgtcgggttcaagttgtcgttgaatccgggtccgttcgatcctggctccttggggaacacatcgacggccgcaccggcaagtttgcctgactcgagtgccgaggcgagagcctcgaggtcgaccacagttcctctagcgttgttgatcaagtaggctccatccttcatctgggagagctcctcggcctggatcatgttctttgtctctggaagctcgggcacgtgaagcgagacaaagtccgactgtgagagaagttcagggagggtgtcgacctgtctggctgaaccaaggggcatgattggaacgacgtcgtagtagatgacctgcataccgaaagctgtaagatagaaaagattgtcagtgcattatcttaagaactagaggaaggatgaagtgtcttcggggcctcgacacagtaaaaaaaagggggggataccttcagcaaggacagaaagctgagtaccgatatgaccatatccgacgataccaagggtctttcctctgatctcccaacatcccttggagaccttgttccagactccttccctcatctctcgtgctctatcggtcaactgtctggagagacaaacgacctcggcaaggacaagctcggcgacggatcgagagtttgagaaaggcgagttgaaaacagcgacaccggcagaggcggctgccttgagggcgacctggttggttccgatgcagaagcatccaatcaccaatagctatagaaagagcgcgcaccacatcaggaccgactcagttatctatgggaaaagacaattgaaggatactggagacgatggctaaccttagtagcagccttaagaaccttctcagtgatcttcgtcttgcttcgaataccgatcgcatggtaatctcccaacttctccaatagctcctcctcagtccaagccttagtgtagtgatgaacttggtagccctgagccttgaagtaggcaaccgcatcggccgagatgttctccaacaagaggatcttgatctcttccgatcctagcggttgaagatgcctcggtgctcgatagaccgacgatgggtttgacgactgtccaggtccgccagtcgaaggtgatgtacctgggagagtgttatgggtgattccaccggcagcgaaaaacgcttggataggggaagttccagcagcgaaggggcttcgggcggaaggaggggatccgaacgaaggcgacgtcacaggcacgtttacagctcctccgtgtggtatggggatactatagcagatgaggagagaaagatgggagtgagtattccaacagtatccaagtatagtggaacaacatccactcaatctctccgagttagtctcgagaagggggaaaagggtcgaagcaaggaaacaggaacaggaatggagaggaagaaagccaagaacgaaacgaaacaaccggaaaaaaagaggtagagaattctctctcctccaaaacagaagggtaagcaggcttacctctggggaggcgaagagacagagacagagtttcgtcgtgcagaagtcatggctagggctacagaggatgtgggattttagaaggtgagaggtagatgttgatggaagagtaaacgacaagccaaacgttttttaaatccgctcaaaaaaaaggtgactcgtcgaaattcggaagagaaagagaaagaagaaaaaaagatggcgcaatttaaaattcgattgttttattttgtcatatttctcttccagccttgactcgcttgcctttccgtcctgcaccttttgattaagtacacatagaactatcgatacatcatgtttatggaggtattagagagaataggagaggatggaagaaagagatattaaaatagaatggtcgtgtatagatggacgcaaggtgatcaaaagttggtgctattgaagaacaaatgaattaatcataacagaaatagaatgggctgaatgcacacagtgcaatcagacttggtcaacccttcttcagacaaacctgggtaaggcatctcccggagcaccctctacggggacacccggtgcccaaccggcttctctcgagaacggagcgtctaccccaaatcggctccggagaggtttctcgttcgaaccgagcgtcgaaccggtcgtgcccagtggatagctgaatcgggtggtcgttcccgctgctacttttcggaagctacaagagattcatgtcatgatagatggttgagcagaaagctcttgggtctcacaaaaaacacatcacaaacagtcacactcacaacagagactctgtcctcggtaagagaaggtggttgaatcggaaatcaagaatagcggcaaagaccattcggaacgaggcaaacgctgtgcacgtcccaactgttacgtcaatcgaacacgagtcaacagtatcagtcaccatcgatcttttatgacgagagaaaaagaaggcgaggctgactaaataatccggcgaggacatcgtagtagttgtggtattcgtctatggtgagcgatccggcaatcaggcaagctcccaacagcggcgcgaaaaatacgatctgcttccagaatgcaggatggtaatcggcaaagaccttgagctgtgcattgaagtacaaagcgaggtagacaaatccagcgccagcagctgtgctgtgaccgctagggaatgactccagagcttcaagaaaaaggtaattgaggaaagagattgtaagcggggtacaccaaagcacatggctggaaatagaacaagcggatgtaccatcgttgatttcatcgtccgatccggtacagacagatcgatcaaacataatccctccaaatccagtacctgacgtagcgagctccggtgtgatatttggtttacaaactgcgaggaaatgaggctaccccgattcgaaacagagtgaagtttccgctacgtcagctcaaaattcttttgctttgtttgagatcagcaaggcgggaaggctacctactcggagaccaccgataagccatttgaggaacacttggaagacggcggcggtgatgagagactggagaagacccatagtggtcgcggtgaggtcccagaaggatcgtcttcgaatctacgaacaggattttaacgaaaacaagaagttggtgaagtttaacaaacggccagcgtctcaagcgcgagagaaaatcagacaagatacttacctgaaagatcgcaaagaacaaaaagggaacgatgaaagcaagaagcgctgccaaccagatgggaacgatctcgtgtcgaagcggataagcaaactagggtaaaaagaagtaaaaagacattgagaatgcggtcagaaggcgagcacgtgaagacacatagtagaccagaacagtatcttcctgttggcaaacacctacctgaggataaacgatctgtccgtcagtgaagtagattgggaaacttctggagggcgccggtctagcctcatagactccaagcccgacggcacccatcgcggccattgtcaactgacgagatcaagtttccagaaccgaacaaacatatcagcttctgctgtctatcactacacgggaggaagcgaggggagaaagaacaagaacgaaatcctcaccagatcaattccccagattcggatccactttccaaacgtcatcttttcgtgtcctccgagaccaccaagacccttggtggaaggttcgccaacatacgtgccttcacgcagtgtctgatgggttgactgcctagccgggtactcctgtggctgttgggtgtggactccatcgacggtggcaccattgttgaggttggcagtggtcggtagagcaacagccgggatggtctcactctgatggtggtggttcaacatgtttttgaaggacaggtgctgaggtcttacgaagtcggaggatataggaagagagagaaaagagagagggaaaggaaagggtcgatgtacagactttatacctgctcaatgcttgtcttctctctttctcctttctcttcctctatctccttcctttccctttttcctaacccgccttgcccttcccgccatacatccttgttggtcaagccccaaaaagagcatagaatagaagggcgtgaatatattatgaggtcattgccagtagcggacgcccaacaggctcagaacacgacgatccaggcaggcgacactgggcgattgagctgagggccatcacgtggattctaaaagagtcaggccgtctctatttttagatttcgtcaagccccttagtcctagtgacgtgtataatttcgactgtgcaatggtttcagtccagatgaaactctacaccttatcaaggttacatacattgttagagatgagggctggactagtgacaggagggttacgaagtgataaatacataagactcttaggtttcaggagagaagttcaggctcttggaactgggaaacaagattaacgagattactaggacaggggcaagggaatgaggataaggacaagtgaatgaatgagaagtagaagtaacaagagatacaagcttgagatctctatttacaagcggtcgagagagactgtcttatgtatagtcctcagtccctagaagcatgatacagaatatgatgaggatacgatgattcgctagggatacaaagatgcgctagagcacaaaggatgcgctggagtaggggacgaagaagaggtagaggatgaagaagaggtagaggattgggaattttcgcaccacagctcatgaacacgtgtggcccaggttatatccatgacatacgtggataaaaagcatttatgacatatgatatggacttgtcctatgcttacaccgaaaactcgcgcctcagggagccagtcgtgagacattggtggaggtgatctcccctgtcataattccttctgccagacaataccctgtgccaggtccttgggtgattccccaacaagatagaccagccccgatccaaacgccttggacgtctctgaccttgccgactaaaggccgacctctatcggacacagggaggtaacacgcttgctcggctataattgtcgctcctccctctaccgtcaggtgaggtgagagcttagcaatttggtatttgagtgtggagagtgaagtcgagtctgtttgcacctgagaagctagtaacgggagagccagagtatcgccagctccacaaatatatgccgtgccatcttaaaatgtatggattagtttgaaaagagacgagaattagtttcaagttcgtgtgtgaagagcttataagggggccaaaagagagagagagagagattgagagttcgaacctggacgaggatagatctcgggctcgcactcggttccatctttgagagtcaacgaggtaaaaatcgcatgagggctgactggaatcccctctgcaggcttaactacgaccgagtgtgctctacttcctgtgacacctagtttacctcctacctcttgtcccaacagtttcacagcaagctctccgacccacggcccggctgcaagaacaacatcctgtgtggcgatctctatcgactcgcctttggtgtgcccagaagaactgtcatcggtaaaggtggctatcaccttgttgaccctcttcgtgtctgagcagaaagagagagagctagcagacgcagtcaacacggtagcgcccgatagacggacgagagactgtgtaaggagtttcgggttgacttgagcacacgtcgcggtagtgccgatcgtctggagcttcatgtttccggtgatctcgtccgatagccaaccctcaagagctttgacggacttggccttcttgcccaggctgaagccctcgctctttgccttggccggcctcgaaagaaccgactgcaagctaacggcttcgatctttcgataaccccaatctctctcccccccgtgctctttagcaagtgcttcgtgaagcccaaaggaaagagcagaaagcggcgttgtgtcttttccgtgccaatctagagcgagaaatccgccagccttgccggaggccgcacaggcgatcgagctaggttcaaggattgtgatttttgtacgggtatgatcgaaattgggatgccgagagagatagtacgcggtggatacccccacactagtttaagatgtgaagaaaatcgaagatgttaaacttcttgtatgatagaacagagagaaggaaaaacatggtccatacattccgccgccaatgatgacaacattccgttgatttttgtcggttactatattggatgacatgaatctaatgaggcgtatgatgaaagaatgatgtaggagtgatgaatctcaaagacaatcgggtaggtgagtgattgtggcaaaaacaataatgcgatgaaaaggcaaaagggagaccttgttgggcgaattcaatgaatagaatatattgaggaggtgacgtaaatttataaatccatcggacaacaccgaaggtagttttctattgagagaagagacaaggcaacttttcaagtaaaaactagaatctcaagattagcctgttctttgggtgaggaacatacaacgacatgaataggggacgaaagatgagtatgagcgtttacagagatttaaggcaagatagaaagcaaaaagcatacgaaatggtattgaataaatgtttgattagaacacatcaagatagagctgaaaagagatagatccgaacatagaggaatatacgcaaaagatataagagaaaaaaacaacaagaaaagacacataggaagaagcagagtaagataaacagatgatcaaagtagagatacgaaggaaaaggcacacaagatgctaaatactacacggtggcctcttcgagaaattctgggcatctgtcgtcatacgttttcattgaggcctttaaatcgaggagttttgagaacaatgttgagtgccagcgttgtttgtactttggagaaattgatcctagtaggtttggcaatgtttcgtagtagactggtgtgtcttcttccgacctgctctccacctatatgagatgtagagtgaattgagaacatcagcagggtagagacaatggcaacatacaaaggatacgaacgtgaaagcctttgctgttgaggacaacgtcaacaaaacgaccttcgagtagtctgatctgagccgaggccctcaaggaggaggagaccggggaggtcaaagcgtctgtcagttgaggtcctgagtggatggtgtatgctagaatcaggccctgttccttgtcctcccccaacgaggcgtacagttctgaaggctgaaacggagattccatcagggtgcgtgcgtctatatgtgtatgtatgagtgttgtatgtgaagctggttgtctggatggtggaaagagaggatcttctgtcggagagaacacagggaacacagcgagccgagcaagagaagattctgccggaagcatcccctgatgtctcgttctttctggccgcatttttcctctctctccacaagtctctgtaaaataggataagaataacagagacctctgatcagaagaagaaaacactcaggggcttgagtcaaacggctggggcaaccggcccgaggcttgaagaggggtcgactgaccgggggaagacccatgtaggctgtgattgacagaccgtatttgtggggaagagaacggagcgttctggaattaaatttctacttgctgcgcttcatccccggggcaacatacaaagtttgtcattcctgtggagccggtcattggaatactggcggcacggtgggcagggcccaccagatgacaacctcttgtcccaaatatctcggttacaacttaaccctaacaggaattgcacctttgttacattagtataatctaacccagtctatcactatcatcatctcttacgttgaccgtttgcttgcgcgtgtgtttgtctgatattctttctgctattctatatctacacatagctcctctggccatctctctcatccgcactctcacatcatgtctcggatgctgggcaaagacccaaatggtccttccaccggatttcctctctcggcatcatccctccggacgagaagaccgtcgaacgtgacgaatggactgtcaaagaaacctcctaaatcggattcatcaggaactgatgggaaatctcacagtatgtctccctcgtccttctatcgtcctgggttattcttgccgacggcatgcacaatctcttcgagaatcatcaacgctcgttgttttctcgttacttaattccttccttccttcatgatcgtctccagatcgcaagtcgaaagcggtatccgacaaaatcaaaagacgattgtccatgagatatgccgatatcacgtcgtccatcctgaacacaaactcaaacggaccggtgccgagcgtgccgagtatacaccaacgtcagaatcatcaacctcaccggccgacacctcaaggcgcgatcgtccggaggaaaccttccatggcagagatcacagacaattggggacaacatcaagagaccgacgatcttggtcggtcgaccttcccactcgcccagattggacaaacggctgaaggagaagaagaatcagatgttctcgaccgattcgacctacttgggagaaccaacgagatgagaaaagatccgggcacccttgatattggactcatcagtcaacaaggctttgatccccaagcttgtaaggtctttgtagtagtcaattcccctgtttttattcgctgaccctttcaaatccgcctctcctttcccttttccacctagacatcaagaccaaacttgctggggccactccagaagagattggagcgttcgctaccgctctagaggcgagcaaggctgctacctcgaaggatgtgagttttgtctatatcatgttcatcgccttccaatcagacccctcttgtgctgacagctcttcgcgcgtcctgaaccatgtctcggtctttttctctactctagcttcaaagaaacgtgttcaagaagtacatgctctttcgaacttatctttttgaacttctcaactttttatgtctcgttgactgactttcgtgccactcatttttccaaagctatgccgagtttgtcacgatatcgaaggaaatcgctactctagagaacgacatgctcgagctcaaagaactgctgagcgaatggaaaggagtccctgaagctttaggtagtattggagactcagagagtcagagttcgtgtcgtctctattttatcctcgtactagtcgagtttacactaattgagctctgtctgattctgctatgtcttttgacttcgccacgtcttatgaatccacccccatcttccgacttgtctctaattcgctcctcaaagcgcgcaggccaaataactctggtctctctgtactctctagtactaacaaccgatcgtctatcgctgatcttcagtctctctaccgtcaacagctacatacactctacaccaccgtatcggggtcacaaaagtttgttccgatcgtacccggcagacacatcgtcgctgaagctgcctcgtttgtcgaactcaacccggcaacctacaagctcaaaggcgccgttcgaatctttctcctcaacgatctcatcctcattgctggcatcaaaaagagacgaattggagggaccgagggaagcttaaacggaaaaacaaccgacaaaaagagtaaatcaaaggattctactgaggatagtagggaaggcagattggtcgccgagaggtgttgggtcttggccgaggtgacagtggtggatgttaaggattctggcagtcagtatagttcttttacttctcatctcttataaaccgtcttctccatcgagaacatctcagtcctgacttcttccttcctgaccctagatctgaccaatgcaatcaagatccgtaggggcaaagaaacgctcatctttcggaccgatcagacggaagagaaacggtcattgttggtgtcgttcaggcaggtggcggaaacgctagcatccaagaagcggaaggagattgagaaggaacaggtcaaacgaaagagtctttggcagggcgatgtcagttctttcgttattctttcgtcgttctttcttgttcatattctttttacgagtcctatctctaatcactttctcttacgccattttttctactctctcctttgataatttcagatggcttcccagttggacggttctacctcgtctgtccggtctttttacaatattccggcggttccgtcccttccgggttctcggacttccattcttgatctcggtccacgtggatcatcgactgatggatcgggtaaagacatgcattgggtcgatgaattcggagatgagcttgcggtcgcaattgcccttcaagaatgggagacggctgttagcctggtcgagaaaggtcgactccatctagccactctatcttcaccgattgaccctctcccgtctctcattctccggcaaaagttcatcccacttcaaaatgcactcttcacctcactaactcataagctagcctcctcgagtctccgaaagactagcctagctacgcttgtcagttacttttatcgacttgaccaaccggaccttgcgcgctcgacctttcttgccgccaggacggatctaatcaagaagcgaattggacagatcaggtgggaaggcgatagtgtagtctacgtgaacgaacttgccgtcgtctgcttcatgggggtaaagaacactacagaatggtatctgaacgctttcagagagaacggtatggcttcaggtgagccctttgcctcttcgtaattttttccttccttggctcgccttgagctaactcttcttggaacttgaaaccatcttatcaagctctcatcaaatgggcaaaggagcaggtagaggcgttcgcttcaatgtttaaacaacaaatattttcagaggagctcgaccaaacggtgcttgatcaatcgtttgctctcgttcgtcatcagagtaaaaaagttagttaatattcaccttcttctccccgttgcctgccatctattctcctgctatcatagattcggacccaatgctgacccccctttgtacctgtctcgatcgaccgccgaaaagctcttacacgatatcggactggaccttacattcctcctccaagacattcttatcgcaccccgctcagcttcatcgcataccgagtccaaagagaccctcttggccacttcccccacatccaacaccgagccgaactctacatccaactctactttgaattcgaatccaagacagagaccagcatcaatcgtacctttagcgtctacaacatctggtctttccttgacggccgttactctacgatccggatcgacggacaaacagtcaacgactatcgtaggtaatgatagtggaagagacagagaaagagatagagaggacaggaagagcgaaaaggaaaaggccgggcagggagatgacagagaggagagcgcgttgggcgcgatactagaggacgaaggatttgcttgaacgtcttttggattcagtccagcccggctctggttagcttgtacgataattgtcgttgtgattttaactatgtctactctttgcaagaagattaataacggagagaagagatgttcatgcgattgcaatgattgatgatgaagaaatatcaagaaaaaaataaaagagaacatgggtagaagaagacttcggaaagaaataaaggaaaggaacgaaaactgaaacaaacccttttatggctacagatggatggaaggggggagggggagaagggaggaaggatgaacgaacaagaaaaaaaaaacagatatatagagaaatttcgagatggttgagatctagggagagaaaaaccaacgacagcacaatagaagagggaggaaaggttaacaataaggaagaaaaaggtagaaaagcacggcctatcatgtccatgaagaggaaacgaacactaagagtgaagatggggagaacttctatttgtagaaagtggaaatgaaaatagaaaatttaagagcatttccagtctgaagagggccagatttttcttgtaagaaagaaggaaaagagagaaagaaaaagtgcgatattgaaagaaattttgcggagaaacaagaaagaatagatgggtacaaagaaagaaaacggcccaccaatctatctaacctcgtagttaacctcatcgtttctgatgctaggttttctagagagaactgccggtcgattcgtccctgtcctcatcgagcttctcctactcacgcttctgcttccccgtcgactcaacgtggccggcgtgtttgttcccgagctcaaggcagagtctccgaagctatcactgttgaagggttttccctcggtcacagttgatagagggttcagtggagatggaagagacgggatcgacgacatagaaagacccgcaaatgcatgttgcatctgtgcggcaggtcggtggtcgggcgctccatctcgaggagaagcagccgactgaataacaacagaaatttcagccaaagaggtcttaactatgaagagtaccaagagaggctcacatctggagagtcgaatccactttgagtcaagctaaagcttccacttcggctccttgtctcgatgagcttgagagcccttgcctcgatgagcttgtcaaagtcgccctgaagttcttcttcggtcggaagagcattcttgattggctcctcctctggttcattcagaagtacaacaagaagaaacaagaacagtttcggaggacgaaggggtagatcagtcctggatcgtaagcgggttcgcttaattcctttcctacgtttcctcggcacggctattctgccgggtgccgagcgaaaggtaatcttgtgttgaatcaataaaaatgagcagtatacgcactggctcttcgagtgaactcttgttgaagtctagctgagacagctgcgacatcgaggtctcctggactgggtggctctggtgggggaggaccacggggtttcggcatcccggcttttcggataggagtttaaaccgggccggaaaaaagacagtttagggagaaaaaaaaggaggaagggcgaaaagagaaagatgttggaggaagaaagcaaggagatgaacgagacaagcgagtcaaacaaaataggagccaagacgagcaagcgaacgaagaaaagaggtagaaaaaataaagggttcaagtcagccgaattgaaagagatggtcagatctcgctaggttgagttcgccctgacgtcagatccaagatataacgaccaaggtttttctgccatctgaagagaagaagggagaatacaaaaacaaacaaacagacatacgtttctttacggtctgagtagtaggggctgtaggagcagacatcagattgaagaagatgatggttgatcgatgggtgaggtctgaagagttgttgggtttgatggcggtggatggttacaaaaccggactaaatgtatgggatgcgtgttaagtatcacgtgttctgaagcttgtgttaccaccactagctgttctttccttcaacctcttatgcttatccttccattgacatcatgctctgtttcgcatggttcatgcttcactctcttcagttctcgtggtcgcgaggctctctagcttcataacatgattatatcaaatagcaggccaaatgcgtgagataccccgatacaaaatggggacgctctcgcgcctccttggataaaaggtttgtccaagctgagatctctgttgaaacctcctatccaaagaatcttattgatgttctagtctactttagttctagagcccaagtgtcacatcgcgtgtcaaattcagtaacttggttactctaacatccccgtgctttacatccgtaaccaaagttcgatctcgacgcgtaatcttaatttctgatgtctccgtctcgcatagatcggtcgttaaacaacccaacacgtttgaggacttctcaccttcactcattccacacctatttggcactagtacacacacttatacatcatgggaattaaagggctcaccgctctcatatctgaacacggtcagtttcgttttctcctcgtgtcattgtaacatttgagaaaagttcgttcatcgagttacgttcttggttctgatccgaccagctcctcgagccatgtccgagcacggtcagtatgctttattgttgaatcgattggatattctattgaagcagggattgtgcactgagatgtacttgttttatcgttatcaaccaaccacagacatcaagacgatgttcggacgaaaggttgcgatcgacgcgagtatgaggttcgtcttttcttggcttctcactcgctctcttcattcatctgcctgaacgatttagctcaccatgtattgattctcaagaacagtctgtatcagtatgtatctaccctgatttctcaccagaaaacccaggctcatagctctctttctcatacttcctccttctcaggttcctaattgccgttcgtcaaaaggacggtgaaatgttgatgaacgagaacggagaggtcacctctcacctcatgggaacgttctacagaacgatccgaatggttgatcacggaatcaaaccgtgttatgtgtttgatggaaaacccccagagatgaagtctggcgtggtaagcctctagtatctgcttgatcgtatcttcgatttgggtactgtactgaaagcctttcacaatcatgttgcgattgcatatagctcaaaaaacggttcgagaaaagggaggaggccaaggaaggagaggccgaggccaaagagacaggttcgtccagcctgtatctatctatctttcgaataagctggcaagatatttacatatattcgtctgccttttctgctctgtcactcacttggacaaatttgttctgatataaactgatcaggtacggctgaggaggtcgcgcagctgaaccgacgacaggttcgagtttcaagagagcagaatgaggagtgtcaaaaacttctgaagctgatgggtatcccagtcgtgattgttcgttcctttcctgtattgttatcagcatatcgcttgaggtgatgattgatcaattagttatcttcacaactcgttaggcgcctggcgaagccgaggcccaatgtgctgaacttgcgcgcggaggaaaggtaaagccctgctaccttgacttctttgtgtctcttttcttgtttcgttcatcattgctaaactctccgtctggcttcaataatgatttaggtgtttggggccggttcagaagacatggacaccctgactttcaattcgcctgtccttcttcgacacttgaccttttcagaggcaaagaaagcgccgatctctgagattcatctagataaggtcctcgaaggattggatatgaaaatggaccaggtgcgctcaaccttacaattagatttcctccctctatctcttttctcttgtcgttgtgcaagtggaaggtttgtatcttgacaagaactgcttaccatcatccatggtttctatttagttcattgacctgtgcatcctcatgggttgtgattacgtcgaacccctgaaaggtgtcggaccgtcgaccgcgcttaagcttatcaaagagcatgggtccctcagagccgttgtcaagtttatcagggaccagaaagctctcagggatgccgaagaagccgaagagtctgtagtggaggaggaaccagaagaggacagtatcaaagagaaggagcatataacagacgacgaagagaagagagttatttcgacatcgagacggacaaagaacaatcggattgaatcggatgaggagggggaagagagcagcagtcctgtcaaggatgggaagaagaacagcagtcaagtcagaatttcctctgaatcagactcggaacctgattatcagttcaagcaggaagatgagggagaggaagagctctccgctgctgaatttgaaaaggacaccaacggacctgcaaaagacgaaatgaagacgaagaaatcatcggtcaagaagaagccagccgaaaaaaagggaaccggagcaaagccaaagccaaaaagtaaatcaacagggaaaggaaaagtcatcatcccggacgactggccatgggaagaggctaaggcgctgttcttgaagccggatgtaacaagagcagaggacgttgaggtatggtttaacgcttcttgttgagaattgacccttgatcgctgatccagcgtttaatctgattatatctgtttttcaggttgaatggtctgcacctgatgtcgagggcttggtcgactttttggttcgagataaaggcttcaagtatgtgatgtccttcaatgtcttctctacttcctctaatctgactcaaaggctttctaccctcgtcttctctttatgaccgtaccacctcgttgaaaaaaaagtgaggagcgagtcagaaacggagcatctaaattgcaaaagaacttgaacgccaagcaacaaggtcggcttgatgggttttttaaggttgtgtccaaagcggacgacaaaaaggggtcggttggagctggtaaacgaaaggtcagttctctagctgtttttcttcactatagtatcgtctcttaactttcttcgcgttctttcccttctctttgaatttcccaacgccccatctacctgttcggaattttcatctgaaggccgacaccaaggccgagagcggagcgaaaaagccgaagacatctgccaagaagaagtagggcagagagcccacctaatccaaagatatcttcccttgttcaggacttccgcgccgttcttaatttctccctgttctattctgtgtatcttgctccttgattgagtaacagcacggttgtacatttctctcctcgatcgatcatgtatttttctgtcttgacgtttctctaacccgagaacgaaggaactggaagattgtctgagaagaagctttaaatatccagcatataaacaacagaagaacttcttttgagatcttctttctgggtccctctctccagaaagatagagacgaagattccttctgagctacaatgaataaaatttagagacaatgtgaatacttgggaaagaagagatatagagaaatagtgaaagaaagaacagatttctcaacaaaataaacttcaaaatcaaacacggtgatgaggatttaaaagaaaaggaagagaaatctctgtaaagggcgaagagggcttggagcataatatcaaattacagtgattgaacagagtaagagggagcaagtggtaagaaggaccaaaagtgagaaaaatccaacacacggacacgaacagcagaaagagataggctagagactttgaaccctcatccaaagtctacttgctgctctcaaatcaatctccttcccgggaaattctaaacggtcaagacgtttcccgaaccaactgtctcggtcgagtcagccgccaggaggacagtcgaggccgctggttcagtagagatcgaagaaggctcagaaggagcagttgccccgttcgctccaggatgagcaatcgcaccttccaccggtccgatctttgattccaaaaacctatctaacttaactttggcaagctttcgatttccctccgaaagagctcgcctagtctgaccttcgtccactgtcaattgacgggaaaagaagtcctcggtgtcgggcacgaagaacaatttgtaggatccaatgcagaccttaatctctaatccagactctgcgatgtacccagtgcttggagaaggaggcgaagcgagtgtctgcatgtttcgctttaagaatggttgtttgactcgagcaggaagaccctcagtaggatgtgtctaaagatgaatgaaatgaagaaccgcgcgttcggctgatcagcatagggcattgtaagaaagacggtaagatatctacatacaaggataaagctggcgaggtatgccttccatttctgttcggctgtaatcgcatcgtccaaagtcaagtcgtctttacctaagagctggatcaaaagtgacttggatccatcaacctaatttgagaaaagcaaaaggtcggatcgttgtgtactccatcagaaacaggactttcatttcaatgacagtaaccgaagacttacccattcgactcggaataagttctcgtcctgaccaagcacattttctgcactcattcggtatgatatctgttgtctggcggtcgtcacttccagattacgatcgttgtatagcagcgaaagaagctcctgtgatcgtccatcacctagcaccgtttgtaccttttgttgcgacaataaaagacagacagatcagctttcacatcttgctagaggtaattgctaggcgtcagaaaggaagtacctacctgtttgacaattgcagcaataagcttgtccagcgtgaagctgacgtacgccttagtaccatacatatgtctcatgttttcctcaaatccggcctggtcaatctcgttgtcaaacaacttctcgcacagatccaacaaatgctcgtaaaattgggccggagggttggagccttccataagggcgggcgcaggacctccggcatcattcaaaccgagctcaatagcgagtgggttaaccaaagacgaaggaggttcctgtgtcgactggactttcgccacggccttcaaagtcgaaagtcggttgtacaacatctaattgatgggttacacgatacaggcataatcgtcagcatcaaaatggtggttagaagggttgaaaagaaaaatgatcgacatttgagagagaaagacagacctggaacagtcggaacatgcagtaaaatggggtgttggtgaagaagtttgcctttctcgaaggctgtctcggcaatccggatgcatccatacttcctgccggggacgaagcccgagaatctccgtattcagacgtccctggctcgtccaccgagatccatgtcttctcccccgggattgtctccgctgtcgttggagcagactgctcattggtcgcagccgcaaccaccgaagcaggcacaactgatgaaacgtcctccgaaacgttggtcatagtgacagcagaagcagcagtagcatccaccatcggtgtaagtgctgtatcgacatccatgctttggtctccttcaggagcaggggccgctgaaggagaatcacctgctgtgtgtggaacaccagactcagatggtccgatagcagtcccgttggcgacggcagcctccaaagcggttgtcacgccctccgcaagggaagtaatttgaacatccatcgcgtctggatcctccaagttatctgtcccagctggagaggcagctgaagtaggcgtcgaggtcgctgatttgcttcccgctttactggctgtcgctccaggggttactccactctgtccagaagggccggcactattattggctccattggaagcaccaaccgcgcctttgaggacctttcgacgaagatcacttgccttcttagatcgcctgtttgatccgacggacgtaccgtcatctctgtcgtcggtcgcactgcccccgtcgctaccatccagctcactgtcctccccgtccgggccctcaccactcgagccagactcacctggaatgacaaaggcagaatcgaactctgctctagggaaaagaaagaacgttgggatgaacgctcgaagaaaggattcgacacgctctcggtcggtggacgaaagtccacctggcgctcgatcgagatacgaaaagatgagtttaagtgaatcctggaggcaatccatatcgtcgatcttaaacgcgtactgatactttggtttaagactcaaggatgggtcgatcaaagcatccctcctctgaacctgctcctttcgaagtgcctcaatctcggccacaagtgatttcgtggtgatggccttcttatcattcgccttgaaggtcacgccctgatgatcgagagacttgtaaaagttcttcgcgtcaacctctcgccaaactttgttccactctcgttgggcccgtttccattcttcgtccttttgcttcagtcgagcgagcacgaccggtacagctaccgtcggattgtcgtgcaacgcgccaatgacttccaaaccggcgtcccgaccgtagatcttcttgataattcgctggtaaatactcttgctctgacctccaagtccgggttttagtcggaaaaccgatttttcatcaggcgacatgacattgatccgagcagcgatgggttcaagtaaagcaatagttcgcaagttggcctcgatatgatagtcgtactcgtgtcgctcctcttcagctcggtgaagagcctcctcatagatgttcttcttgtgggagatgaatggcgcagcgtcctccgaggcggacgtcggatgggacacccactcgtcgttcaaaacgtcccagcacatgggatctcgaccagagcatgataagttgacctcctgggtgatcgtggggatgggagtccaggtcagcatgatacttgctttcggatgactctactctgtcgaaatactcaagaggaaatatgaaggaagagaagagacaaaccgttttgggtaatcgacgataactagcaccataagccttgcaactatttagatcaactctcggccgatcaaccgccaggctgttctccattacaccatccaaccctgcacctgctccaaggataccaccactgccattcaagccatccctaccactaacgccggccaaaccacctcgtccagcttggtcatctccgacaagagatctgaattgagtccatatatcaccagcctcgccaatgaagagcgcagctcgctcgacgagcactcgagagtcgatgatatcctgaacgaacaaattgaggagcttgagaaactcgaggtaggtgttcttgtcctcgatgaactttttggctcgttcgaagaacgcgatttcgtctggcgaggcaagcgaatgagagttagaatgtccgctgacgtgagtatttggcggctggacgtgcactgggtggacgggatagtcctctggcgggggtgagggttcggccttgtgatgatgtttcggctttttggtctatattttggaatgatccataaccaggtttgtaagttgaagccattccgataggaatgtggtcgtgagcagaagtcagaacgtacccttgcagccgaagtcttaggatccttttccgccgctccggcacctcgcttttttttggcaggcacaccatcctgcgggtctttcgactttgcgccttctcccttggccgctttgtctgccttcttggccttctctcctgcccgatcagctttggcgggcctacctccgtcggccgatccagtggggacaggcacgggtgcctggacttgaggtgcggtagccgtttgggggagtgacatcgcaagatcggattgcatgccagtcatctgaccgagcaggttgccaaacaggccaccagacgattgagcaccattggaagtgtcgggcaagaactgcttgaactcatcaagcaagtcaggcgcactcttgaagaggattgtaacctgggcgtagacctgataaaaatgagaaggacacgtctaaaatatcaacagatcgttttggaattcaaaagaccgacgacagacgagggcacttacatcttgaatgggcctctgttctttctggtaggtttgaagaacctccaagaattgtttgtatgtgtctggatcctgggcataccggtttttgatcttattgacataattgatcgcgtggttgaactcaacctgaggctgtcgaaccgcttgagggggctgaactccttgaattccaccagagagcacctgagcggctcctggtgtggacactccagactgggaaggaccgagtgagtgggtctggcctagggagggaagcgactgctggtgttgttgaccgccaggagttgaagcggccgaggcagtctgtgcaggatttgacgcttgttgttgttgctgttgctgctgatttaacccagggttggaaccgaaaggtcgatcgatgccttgactatatccagagttggccaccccggccggacctcctccggcagccgacgggtgctgctgagtatgttgctgagagcctggggttgcagcagctccagcagcggctacggccgcgagtcccgcagagaattgtcctgcaatctgagacaccgttcctgtcggggtgattacagtgatgaggcctctctcgtcgccttcacctccgaggcactcgatccgatagccgggaggcaggaatgtgttaaatccctgaatcagcgatggatgaccacgaaatagagacgatactcgatcgatcacgccaggtgtgtcgatcctatgaacatcgagttgaagcaagaaaaaccagtatacaagacagaggaggaacggtgatccaaataagaaaggggacgttaagcatctatatgtatgaaaatagagacgggaaaaacgtacatctggcccttgaactctttcatcacgtccaggaatcggttgtagacatctggctggtcagaaaattggacctgaagggagaaagaaggacgagacgagcagaagaaagtaaagaaagagcaaccgagggtcaatacaggtatgagaaggaaagggaccggtgctaatcaagatggtgatatatcctgaaccacgtgtcgcacagaccaaaagctgtgcagctcgctcaggctagctcttttcactctaccctcccacggttgagacaaccggcctggttggtttccttgaagcgcttccgggaagaaacgaaggatatattgcatgtaaacagagagataaagggcaggtttgcctacttactttgacttgatcgaggtatgacagcgcatctctactagtcagtaaaagagagggcaaaagtaagagggatctgtcaataattatgtagaagagacatgaagaagaaagagtatatgtggtaggagtatgttgctggcgctcgatgatatttcgaagggacgatcagcaagcttatcgaacatcggtcgacgataggcggcatgcagcacccatccatcgatctcaacattacaaagagaaggaaaacccccctgacttccacgcgatcgatgtttgcgtttccgattgatacacatagagggatggcatggagatgtgaggggaatagggaaagaggagacagaaatgaagagaccaaagacaaggacaatgcttcgtgagtgactgacctaacgttgagaggtcgatagtttggtccagccatcgcgctggctgaaccaggggtgggagcgggggaggctccggtcgaagccgtaagagcgcccggcgcgcctggctgagttggcaaaccagagttggcgccggtgccaggcgccgagagagatgggggagctggagctgccgtggctgaagagatagctggttggatgacagaaggctcggagggagaagaggatgctgacgttgattgaccagcagctactgtttgttgggccgatgggatttgtgtaggaggaaggggaggaggcgcgggcgctgggagtagttgcgctggttgttgagatagagggttaggtggaacggatgtcgagatctgggcagagggagagtgggaagaggccgggttggtggacatcgacaagggggaaggagaagaggaaggatggatagaaggggatgatgggaaggaaagaagaaggaggaggaggaggaaggcgtagaaggcaaagtcaggcgatagacccaagggagctacttgaacgcgcagtcagggcttcccaaggcacacttgcacgcgcagctcagggcatcacgccagggttcttgctgtttcagggctagttcctggtcactcggatcagtacgcatctcttctgtgcctggtatctggtcatactatctgatgatggactcagagaatgagtaaaagatcgttggaagaaatcaagtgaacatacttcagagcgagggtcataagaagggctgcaaggggaactatgagaagggatagaaaagacagggaccgccagaacagaacgatagcaggcccaaaaaacattgggcaagactacaggcaaacattacggaagagactaggaaaagagactctgtagtattcaaggccatctctttttctcttccttcacatatcatctctctacacgtcgacagaaagacatctgccttctttctttctgtggtaagtacattcacactcaattcagaaaggctcttcttatctgacaagcacttttagtctatgccgtccattaccgaactgccagccgatgtggaacatgaggaagaaactggactaggaccaacagaaagctcgctccaagagatcttgtcttctaaccctggatcgggaccctttccgctcactgagcataccgtctggcttctctcccaatcgttcgctccctctcggccggttaagataagagccctcgggtttgtcgcactctctagattatcgactcaaacatcaaccgacccactcgtgtcgacagctactgctgccttcagcccatcaatcgagaccgctctgctcaccgcccagccaagggccttggtcgacaccctctctctcctcgccgcgctcgtccaggcatgtcctttcattggtaccgctctcctcaatagacctggcttgattgagaatctatacgatctcaccgacttatttccatcttctgctacctgcgctcctgacgatttatctgagtcgccttctcatctatcttcttcgcctccttcagcaatcagtcccgactctgttcttttaggcctgactgaacttctctcccaagcggctaactcgccgttaggcaggaaatcgatatttcgttcaactgacgctccctggactacctacctcgaaaccctatcttcccggtcgtccacctcaaacgcactgagagcatcgtccgcagctgctctcgccaaactctccagaggcaaagaagccgacaagccgagtgacgctacatcctccaccgtagacacatcaacctcgagccattcacctaaagataatgcagttcaagacgcacggctagctgcgctcatgaaatctctaatcgtatctctccctacatccgacccgtctctcgcaccgttaaaatctactctggacgcgctcgaaacccttgcctttacttccctccgtcctgcagtaaaggattttctctctgccgatcgagcctttctccaagcacttttccgacttgttcctgccgcgcctaaaccgcgcgcgttcaatgagccggcctccatcactcactccgtcggaccatcgctacattcatccgatgacaagtcctttattgtcttctatggtgtagccagtgtaattgttaacctagtttcctaccggcctgcccgctctgctgaagagactcaactcgatagactccgaaggatgacgctttccggagaaaaggcatcatcatcgactggccgggatgacaagcaggtcgaggaagaccctttggagtcggacgaagcggtgaaaatccgggcggaaagactgttgaacgaaggtgttgtcgagacgcttattgtactcggtaaagcggaatcggttgttgttagagagacagtgggaagaatctggctgggcctactgacaaaccagaaagatcgaaagagaatcttgcaacaaggtggagccaaaggtacatatattcattcttttgacttttctttcccagttgagatatactgatcaacaagtaaacccgatgtgccatgaaacgttctcgatgacaacattcagctctgatctctctgacgagttctcttactggccggtcctcgtgtggccctttgaatggatcagccctgaatacgatccaagcgttggctaaattgctcatcactgaatctcctctctcgatctttggtccgacttatttgacctcctctgccgacccgatccgaccgatcgccctccttctactcgattctgcttcgagcctgcttcaacagtttgaggctctcatggcgctgaccaaccttgcctctgttcaaccagacaacgcctatagaattggtacctttgaaacctcgtcaactggaagcgtgctgagtaagatgttggaactcatgattgaggacaatcagttggtcagacgagcgtcaacagagctcgcatgcaatctacttgcgtctgaacaattcttcaacagcttcttaaattctgctccaacctcacaaccaccatctgtcgagtctgaaccaaaaacaaaaaacaaggagagcaagccaaacggaggatcaacctatcggcttcgacttctcatggcactttcgacactgtccgatctaccgactcgatcggctgcctctggtgcacttgccatgctcacttcctcggctgatgcttgtcgtattctgatcgctcggccaaaggatgaaggtggtgctagttcagctatcagaacgatccttgatttgtttcaaccaccttgctctagtgatgacagcgacaatgacgatgatgagcaagagacagaacaaacaagattagcggagagaatgtctagaggaccagatccaggacttgtacttagagcatcagtcatcctgattcagatccttgaatctcttcctggtgaaccatctctgtcggatgcgctcaaagaggagaaggcgaagcagatcattgtagaagcaagggatgatctggaaggaatgatgtctgacggaaagcagaagatggaaacgatggaagccgttaacgcttgtatcgatgctattgatgcttatggctcatgaacattctgacgactcggctacgtttcttttgcctctcattgttctcctctctttgtatcttttccattagaataacgaaaggatatatgaatataacgccaagtagtcaaatttaagctgaaaagtcatcttgagagagattatcaaggagaaagtaggtaaaggtcggtggtgaatatatagagcagtacaagagcagtaaagagagaaagacaagacagtagaatctctctaggtaaggtttaagtcgctctacctagccctacatgatggtaagaccaccaagccgtgatgaccactgtgacggctaagataggcatgatagtcgagacgattgttgaagctgaactattcttggtatcccgtttcaaacggaacaggtgaaattgatgaaattatataaggagttctcgtcttgagatgtcataaatctaggaatttgttaagaactcactagaggtagagagaattgaagttagagatgaaaagaccttttcctttaactgaacgcagagagaacacgaaagagcaaataaaatacaacgaaaagatgtaagaacgaacgacacctaaaaatttcttgacttgaggaggagagaatcaacgaagggaagaaaagagattgaactcactaaggcttgtcggccaagcaccaactatgccaaaagggactttaccggctccgccggtggttccgatgggaacaacaattacgtctaacggtgctttgattgccgtcaacgatttcttgaaaattgaagcgaggatattcttagcggcaaatgtcgcgtcgttctttgccttgaaataagtctgtgggcccagggaagctgcacagtcgccgatggcaaagtacgtcttgccgtcaaagaagccgccgtccaatgagggaacaatctgatttgacatcaccatcaagacaaggatgaatgatcggccggcacaagattgaagccaaagaacggttgagtagtcgagctgagtgtgagaacaaaagtaaggacggaaaagagaaagccacatcataacaaacgtactctcagatgagcgtcaaccttaacgagaccatttgggtcaaggacattagcatcagccgcggcgataagcgaggtgttcgtcttggtgccggttgtgttgaagatcaggtcggcatcaattatttttcctccacccagatcaactcttcctctgccactctcgactatattagaatcgacctctgtcccgagcacaacgtgtattccagctgcctcgagctgccaatgcagcttggccgctagcttggccggcacggactttgagagcagttgtgggttgcgatggacgatggtgaccgacttttcctttgggtactgtgacgcaatctcctgatatgcgggtaaggcagacgagtagagtgtacaccaaaaacgggacgccgcaaaaatttagaacaacgagcagcgaaaatgcgacgagacatgggctcaacatgagacgttggaaacacgataaacaacgccggacttactcctgcaaactcaatccccacgctccctccaccgatgagaacgatctgtctagcggccttgatttgatcttgtaatccccggagatgatccttgccctcctcgatcgagccagagagcgagcgcataggtgcgccgtagatggagccgagcgccagcacgcaatactgccgagagcagcattcaagaagttgaaagacggaagaaataaaaggttgatgcagagaagggaccgatcgatctgggtcagcacacaaccaaaacaccaagatagaatgcgataacgtacatcgaacgcaatctcagttccaaatcctttggactcgttctccacgtctacccacagggatcgctcgctcagcttgataaccttcgtcttggtgaggacgatatgtctggtctggtgtgccggtccaaagaagctgtcgagaggcttgaaaatcttgttctcccagccttgtatggtgatgagatcgagtaagacaaggagagacgaggaaagatagagcatgagttcagattaacacttaggttgatgaacaattcagtgagaaaccggctcgttcacctggaaccacggcagctcgaagtccagcgatagcatagtacgcaaactcgttggcgtcgatcagcacgatacggtgatcagagggcagctttttggcgaggtctcgagcgagcgaagcacctgcgccggactaaacgacattgccgatataaatcaaaaggattccaaagacggtgttgcccgagaggcgagagaatggcaaagaggaaggactcgacgtgcaagattcgaaagatctgatcgagacttcacttacagctccaacgaccacgacattctttagattagactctttgcggctttgcatttgtccttatgcctgagatgaattggtgtacagagtatggtaaggattagtgctccgaatatcttagaggaactcggcgtatcgagaactctcgagtgatttgagataatgtcatgttatatagcccagtagctcagctgtgctgacaaaccgaaaaaaaattcgttcaaatcagcgctgaccggtgatggaagtctgtctggccgaattacatcttattttgctcacccctcgggcacggtgtaaccgggggcatgaccgttggcttcgtatacgcgtctaatccccggttcggccttcgcttgcttgaccgagctcgtgcctggatcgtccggttttcttctgccctatgtaattctcgtccggtcgatataaaaaacctttccgagtttctttgctttctttcccctcctatctaccttctttatcagcccgatagaacctcgagtacaggcaacacagtatctagagaaccaacttgcaagaatctttgaacgaaagacaccctatctctctttttcccatcgacgtcactttttaggtcgaatcctaaaacggatgcccctcctgtcctatcataatcaaactcatttgacttgcgttcaggtgagactacgtgcttacgtcgccgagcgtatgcatgcatgtgctgacccgtcgggcccgctgccctggttattcgtctctgacagtaccttgagccttaaagcataaacaaacacaaacctttcatcaaaacatcggtagccacgatcatggtcaaggctcatgtcatcacctggtcgtcgactccccacctgcctggatctttccatcacgacccgccggctgacgaacaagagccggatgaatacacccgggctcaggatgtccggtgcttggtcccaacagaaatcgtctggttgatgggtctggcgggcttcattttagtaggttttcttttatggttctctttttcccctcctctactcagctcagcttcaagacctgacctgacctttatttctgctcaccattaaagtcaatattagctatagtgactccgttgagatgctacattcagccttgttacaccaataaaactgtgcccatgaccccttcctactactttgctcgcaaccgtccgttttttccacagcgacctgcttctccccaccgtcgtccctcaagcgcttcaaccatgtcgtcccatagttcgacctcgactgcctcgtccactcttcttgacactccaaattctgaatcttctctccagtccatcctgatcgtatctcaccctggcccttcaaccgatcgtgaaatgcttcctccgacaaagcgagtgtctttcaaggaagatctcgttcaacaggaacttgatgtaacgtttcggatggaacggccgaaaccgcctgccgcgccggtagatgtatgggcactggcggtgatggacgatctgatagtattggaggaatcccatacagaagaattttccagagcgaatgcacagaaacgaaatcgtttgacgaagaccctctcgttctctgctgtcagttattcatctccatctttcttctctttattcactctctttgaccgattgatgaaaatagcgcgctcatttcttctcttgatctgaaacagcgctgtccaatgacaagtcagagcccacctagactaagcccaactccaagtttctcctcgaccatgtctgatccgtcgtccaactctctccatcagacgtctgaagaatccctttctcgaggtcgtcagacccgaaagaacaagttgttccgcaaacgaagtaattaaaatctcaaactagcattcattcagtcatatatcctcaccatccgtcttagacattcatgcatcatttgtgagatcaccacttgtatttatacgactatcatcgatgaggttgtgtggtctgcctggttcatctcaacctatgtcgaatctttcaacaagaacttcatcttgaacaaagtccatcaattcaaaaaccgactctatgcagactacttatatgactttagtcactagaaagcgaaagcaaccgactctatgagacaacattcagtcgactgaatatctctttcacctgccgtcccaggcgtctgatcgcctcgtgagcactctctcgctcaatctctccagctctagttgcccagaatttccatctggcctccgaccagcctccttgacctccctcccagagcactccctgtcttaacgacctgtcagcctgtccgacttcacccaaacgtctcattggttcaccagctacctcgagccagatgagggctaactcaaggtcaaaaatccattcggcaagtgtttcgtttgggccaagaggtgactcgagaggtgaagatcgaagttgccaaatgaaataactatgggtccatccaaaacagggattcaccgagagatgggagagaaggacggtgagcgatcggtatgcagtgaaagaagaggcgaagcggatatatatctcttctgcatcgagcttttgaagatcttcagatggattaacgttctgtaaaggacctaaaggataaatcaacatggaggagagcaaggaccccaaaatgttgtgacgtgacaaaccattaaacgactcccggatatgtgattcaaacaatgggagatcagcccaatcgaacttaacgccccatattgttgcctcagaagttattttttgctcagtaagagctaagagaagctcgaccgctcgtggctcgtgaccgattgcatttctcaacagagaattccacaatgaatcgtgagaggaccacagaaatgattcgacagagaagaaagtagaggatgacgaagaaagaagagtgttgaaatgagcggatatcttgttggctgtatgtggtgctgtatcagtaccttcaggacagaaataatctacaagaatcgcgttgatgatgtgcatcccaactgttggtgatcgatgcctgtatatattatacctagcaggccttaggcttggtgagagcggcctgaactgatggtggtcgatacatgcgccttttggactggggtaaatgctcatcaccaaaaccaatctgttcatttaggagaatgacactggctgagtcatcaaacgcgtcgcaccacacgcgcaacaaacctcatttatcacgtcctcatacgcgtcttcgaaccgtccgcttcctgttcgacaatacttccacgatggaaaatgaggcgtatccttcagatcagccagtgacctataggttcatctgaggatcgaatctttttttcactatacccaagcattcttctgacattctgctctttctttatttcgaacgacgaaaggcacctcctctccccccaaacacttggaccatcaaatcccctacgagtcatcgctcattgcgacgtcgatgctgcttatgcccgcaagtatcgttctcatatatcgatcaggaccaggttttccaaaaagactaaatttatactgttgaaccttacagagttcgaagctaaacgcttagacctcgatcggagtgtacccattgccgtccagcaatggtctgcactggttcgtgtacaatcattgccctttcttcatcatatgcccttcagttgaagagtttcagcttgggtctctacttcggtcaacctcacagatagctgtaaactatgccgccagggcgtttggaataactcgtcatgaaaatgtgtttgaagctaagaagaaatgtcctgagttagtatgtgttcatgtggctacgctcaaggacggagacgaagagccgggctaccatgagaagcccaatatgaataccgacaaggtttgtcttctctcgcttccagatgaatcctctttgcgcatatcaaatagataataacctctttcaatgggtaacccgctaaatcaggtgagtctagaaccatatcggcgcgagagccagaagatcatcaagttattcaatagggaggcccccagcggcgaagttggtacgtagatgttatcatcaaaaccaacctgtcaatattaggaaagcacacttatggttctgtaatatgtgaaactcggtcatcgttaagaaaaagcctccatcgacgaagcgttcctggatctgactgtccctatccgtaccgtccttcttgagaaatatcccttcctttgtgctgtaccccccgattcacctcttggtttggatacgccccttccaccggcaccgactctgaaatggaaggagagaccatgggggatcgtacctgtgcagacagagctaggtaaggatgcttcagatgctgagacgcactcagaagcggaagccgacaaaagttgggcggacgttgccctctgggaaggaggagagatgcttgacagaatgagggaaacaattgagctcgaattgggctatacgacatcagcggtacaaaaatcgatccatcatctctgtttagtttgtctcctcggagactaacgtgaaaacatgctttctttttcctaccaatcttggaattagggagtcgctcataataaagtcttagcaaaattgtgttctgctttcaaaaagccaagggcacaagtgagtccattgctgagaacctcttcgtcagatgacttgcacctaacctggtggtttcttccacagaccattcttcgtacttctgccgtttctcaatttctaagacctatgaactttcaaaagatccggaacttgggagggaaactaggtgaagtaatcggtaggtcgctcctaatgtattttctccactctgatctactctcagatcatagacttaagccaacatggtgcgcatgcttatatttgtgaatgtaaattcctttagctgaaacatatggagcggctaccgtcgaggatcttctgtgcgtattgcttccttgaggacttctctgctctttatgcgttaaagcaattaaagacgttgataccacccatttgtcactatctatgtaacaaccaggaagatagaccttggcgatatgagaaagactttaggggaggactcgggttggatatacaatatcttgaggggaatcgactacagcgaaggtatggttaacatatctgtttcggtcgtttttgatctttttctaagtgctccgtttccgataactttgaattgacaccaacggtatacgatagtcaaagctaaatcactcccaaagtccatgatggcatccaagaacttgcgtccgtatctaacaaatatggagcatggatcaagctggttgcgcgtactctccgtagagctgataggcagattgaaagaagcgagagaactagctgggctcgatggcggggatggagccggaggagtatggccaaggacacttgttttttcttggagagagggtatggttaatcaatgttgatttgttatttctcgaacatgaatactgttagctgaacagccgtcctactttcatatgccttcaaacgtatacctagctggaagcgcctccaaatccaaacagatcccctttccttatcacagtccgctctcagcctccggtcccattctaacgttatcaatcaaacttttgtccgaagttcttaggcctaatctccgtctcacctctgatcgcaaacaagtccaaatcaacaatcttgccttaggatttactcaattagagagacttgagactggtcagagaggcatccagggtttttttgctatgcctatccaggagactggaagcagaactggagagaagcgacgaatgtcaaatgagaacgaagaggatcggagtaaacgacctggatctggctggttccaaaaggccccgatgggctacaaagctcatttgggagctccaccatcgacctcatcatccttagcatcctcctcttctctttcaacagcaacagacccctatctatcaattacaactccgctcgatagcgctgctgtcgacaaaattataagaccaggaccgtctgttcttgcagatcttagtcaccgctcgaccctttcctcatcttcttcttcttattctttcccatccgtgccgcgaccttcgacaaaacctatatctgcgtctgcctctgaccctggctcttcatgctcgctatcttgttccttctgggtgtgccctgaatgcaaaggacggatatcgctcgctcgagagatcatgattgatttcgatccagaggatgaagcaagggagagtgagcggatcaagtcggagcatgccgattggcatgttgctttgaaactccaggccgagttcgaaggcaatctgccccatcagaacggtacagatgttggcaaagatgaaaaatcaatcatagaaagagaaggaaccgggttcggacggatgggaccaaagggactgccgaaggtagtaacagcatcatcagacccggatatgtcgaagaggaagtctggagaagttagtaagccgagtcggaagggaagcggggatcacgatcggagctcaacaggatcagagatcagaggcaaaggtggattagggaaatggctgattaagaagtgatcttttgaacgaacgggatgacaactttggtcccgggactttggacttttcgaaagatggcctatgctgagtctgtgtagatggaatttcgaatttactcgaattatataaataataggcattcatctacatggtttttgaattgattgtatacagccagttctatctctttgtcaacgacggtaaatgggctcggtcccattctccctctaaacccatgggtccttgtctggcgcaccacggaggtctgtaggacgagtcaccctgccaatattgtcggcatctgagagtgtaaccagtggggactgatgaagaggtgaatcgtattttatttcagagaaagaccaaatggattcaaggtgtgatcaatgatggtcaaaagtcaaatatcaggatagaatagagacaaaaaggcgaatccgtacaatgataacccctccacccacgattgtggccatcccagaggcgaagcatcccgtctacctttcgtgtgtttgttaaatgagtcctagcgaatgcaaagcctagcattgcttttcgctgcaactcttcttcatcctgaagagcatctttgaggactcggttgatgtgctattcatgatcagagcgcgaagtccagatatcagatctatgcgcgcaagttacgttctcattaggaacaaaacttacttctatcgaccagtcttgtttcaactgcgtagataaacacgaaaatggttgaaatcgtaagagttgagacatcgtaagaccaaaaaattgacaaaagcagagggtaaagcagacctcgatcataaattcacagatatcttcctctttgtctgtaggataatcccctgctactacacacccactcatgaacgcctgcgcatatttccgaatcatcttccgctccagcgatgagtcaaacttttaatgatataggaaatcaacatgctagaatgtcaaaattggtaaaaaccacgaaagtaaggacttacgatacaaattcgagtctccctcaacgctgtagcaaatgcttctcgggttttttcatggtttttgagcagcggagatttatcttcataccattcagggggctcctcaggggttttagtaggaagttcgtatcctaaaatcaagaagtgagaccaaaggttgagcggtcaatttcaaataaaggattgttgaatgttcgactgaaggaattataaagaagaggaaccaggaagaaccaaccaggatgctcgaaccaggcgatgtcagttgacgatccgtatccttttcgcgcattagtgacagtagtccgaattggatacaaacttccatcgaagccactgatgaggatagacggtgattgaagagttggagtgagcgcgcaacgagctctattatcatcatcagcaagaagctgagggcatgcagatgagatatgacatacaatccttgcacgtcgacctttttgtcctcccatttctcgaccgggtaaaagctagaaattcaacccatgaagcaatcagtaacaaatcgtccactcaatcctcacaagtcgcgtacacagatgaataatcagatatgtaacttactcccaccgatttgctgaatcaggggaatgcccaaacaggtgcatttctattcggttttatcagatttgagtaagttcaatctcaaacatatgaaacttaatagcggacgagagtgatgatagtgtttcaaacaacgaacgcatgccagggaacctcttattgattctctcagggtgtaacatatccatctacgatttttgtacttgatcagaaaataagaactagatcgactgaacttggtttggaccatagacttacgagttcatgtgggtatttcaccaccgttatctgcgtttcattatcgaaggttttgaacatgagtgaaaattagatcagatagtttggggtatgatcacggtgagaggccgactcaactcacgttgagttggcgagcatacctggagcaatttgagaccaaacagttcccagatcatcagatactgcacatttagcgaaagctcaaatccagagattgattgcataccacttgtttatactagatgcaatcaatgtatcagtagtaaaacagagcgaagtttagcttgggctcgcgttttgtccaaagattacccacaaaacataccaatcatcagcatgctttttgtatgataatcaacgcgaaaccctcaaaagtcagcaacaagcttatgtttatgttagtatgatgaagaggaatgagggtttacgcaatctcctaattgtctacgcgcgtcgagtaaatgtggaagatttaccgtaaataaactgacgaatctatttcgatgctaatcgtcataccgcgagaaagactgagaactcactgggcaaatatagttccacatcccgggtgatctagtcttgggtcatcaactttactaatttacgcagagggttaatatgatcagactctgcgataactttcgagctgatgactcagcttgactcacaagatatcgctgatagtccagaccaagtcgtagtatccacatccgacctctcctaggacttttgtctcttccggtccgtcccgtttttgcctcttctgaaccgcatgctccatatgagacggtatggccgtatcggaacgctcgataagaagccttcttttcgctaagttctctgaaagcatgagggaagagtcccatcctttccagcccggtccccaggcgtcttgataagagggcgtgatcagatcgtgcgaaagagtcagatagtacaaaccatgagcggagagagataaggttgaagtgaaaagaagctcaccagtttctagatcaggatgagcgagcgctgcagaaatgagctcgggtgtatgtgtattcattcgagtaatataatcctgaaagtctaaaacatatttgaaaagagaacaagtagaaagaattcaacgatacgtccaatccaacaagatagcatcgagactgttgtatcatactaacctatcaaggccagaactctaatcttaccatcctttcccctgcctcgacgtttgatgtcgcgcattccggctccctcgcctgccttccaatcccagggactgacgtcttgtcctccagaccaccaccagcttccatcctttcgttcaagatctctccaatacgcaggatttgctctgagtgccccagcaggaacatcaaactgtgccaggtcgatgtctctccgaagctctacacgattcgaccaggcacgaacaatgtcccacaggacgaaaagagtcatgataaagaacgagaggagcgacaacctgacggcgatatgttgaggagacgacgaagctcggagattaaatattgatgagcgacgagggaacagtgatttcctatcagaacgcgtttcgaagagcgagtcatacgacgaatgtgcaagaggtaaaggcccagacgccttgtgcttatcaaagaggatcatggcttcctgaagacaaggtcaacctgttgagaaactaatcaaatgaaggtgtccttgatcagacggatggactcggtcatttctcacctacagatcgaattaaagaagaacggaagctcacatgtcagacgatggatgactgaaggaaaggtaagaaaatcttgcagactgaatcccccatccttctcaatcaatgatagctatctgacagtcattactgtttgcccggcacaagatcggagggcatgaatgaggacgctgcaattaggcacagtcttcagtatttcactgtgccggaagtttgatacaaacgcgccaagaggaagaaggatgatcaaaacaattctccgcgtcaaagcaaagtctgttgccccgcatgtaccaggttagacgtcaccggcgatattaactgtatacattgattatccgaacagctgtcaaggatctgaccgagtagtataccttgtatgcaaaaagcatggtgagaataatcccaaccaatggtgatcgatacatggcccttttggactcgggtgtcctcagaccacgaaccaccaaggtcccatggatcatgggttgagtttctgctagccttaatgccagcctcactagcaacagtgtcaaagcccagcattcttgctccttcgttcttttcctggtgcagggcaaggtgcagcatgttgcgtgatacgttcaaatctctgttccaccaagtctgagagcatgtatagagcacagtgagcaattgacacataatcttgaggcacgcaacacacatcacttactcggcagacgctgcgacactccttgatcgcccacactttgctccttccagagaactcgccatggcacttcgagcacaccctcgatgtccgaaacttccagactttgcggacctaaagcaacggaaattccctcagcgtggcatacatcatcttcacagggccagaagcatgcccatgagaagacgacgagaaggcgccgtcgccgaaggccaggaaggtgcgtggacgtcctgctgacagacggagcgccacctggtggtacgcttgctcgcggctgatgtgtgcgtcccagcggagacgtctccaccgtcgagcggcgaagaacgtcgcgagcgaagagtaggactgagagtgtatgacgagagcagcgcgaagatcatcaacactgtcagatctgaacgaaggaagatctggagaaagacatcggagaaagaagccgaatcaagacaccgagatgggcaaggtagtctgcaaggtcagtaaggctgtctatacagtcagcttgaacgtgagtgtgaacgtgagaggcactcaccacggagagtggttgacactttcggatggttcttcatccacagccgctgtttccgagcgtctcggattatccccgtaaggtgcttccatgacttcagagagagcgaccactgcgtgccgtgctcagccagaccgccgttgtccagagacatgtcgagtccttttgcggtcgtcgatagcagcgtccgacgacctgggttcagccccacgacctcgtcctctggccgcacaccccacggcacacactctgctcggtgacgatccttgtcttcgccctcccatctccatccgtagtcgtcgatgccagatcaagacgacatgggtctcagcattctggcagacacaccgatgccgtccgtactaagggacatgtcgaaatgtcgctttctggtcttgactttggatacataaaacgactgcctccatcaagcgtcagagtcatcccggaagaactcctaaatcaccccgcggatataccccacatccgcgtcctccaatttgagctgggtccagagattgtagagagccatggtgtctacaaagacataggacgaccggtggtacgagagcggcaggagcgagaacaggcgcaggccatgcccccggcaacgagtagtccgtcttgcagccgcatcttgggggccatgttcctcgaagatggtcagtatccggtacagagggcggagatagaaacaccacgaggccttgatggccttgcctgtcagaggcaaacctccgaagatgtcatcagtgaggaattcgaccaacactcggagatgagcctccatcaccgtgcgctggtcaagaaggaggagtttgagaagccagggcggggccaccaaggatacggcagcttgtactgattcctcctctgtatcattttctctttcttctctctcttcttcctctcggacaggaggggacagttgctcccagagttgatgggagagggcagtgcgctgagaacgaacagatggatcagataggtcagccattgctgcagcctttgttcagatatctcctcagatgactcgtcttccttacctgactgttactgatccggttctgaatcgcttctccgacgtttttctccagccaccaagagacgagccgagaagcccggcgcggcatgttcagggtgacatggttctggcaggccgtggtccacgacttggctttggcagcaaccatgctgctcaggaatctacgataatggcaagttggtcagtcttcgttcgcagccagctgcatcactgtcatcaccaaagagatcacttacttggagtgtgtgaactggtgctcagcagggaaagaggtgtcccggatgtggttgatcccttcgttcagtgttggcgccccttggtgc

SEQ ID NO: 2343 - DNA, 21151 bp, Xanthophyllomyces dendrorhous
cctggagatagagccgtattatgttggggagattcggtgtctcccctccatctgcgcagaccttcgacatgtagatattgagaaggcgagacgcgtcaaatgttatctttcctagctgggtaacggccgactcgatcgggccagccagtggctcaaagacgagtaaagaaccaaagcctatcttcaccgtccgtgacaccatagggaccgctgacttggcgcggatctctaccctctggcgagggatgtaaaacgggcagaggtggttagatctccttgagtgcccaacctgacggcaggctgagcacgtggtggtagtagtaatagtagtggtagccgcaagggaagactttgccaaggcctgagccgtcctcttgcgcttcatatcgaacacaagaggagcggcactcctcaaggcaactgatgagtgttctgatacgaaggagtgttctgatgttagggtgtgaaagagtgcatatgagtctcctgatatggaagattgctctaatcatctcgagttcgttatgtcttataagctgttgggattgatgtctgcttgttcgcagaaaatctcctttgaccggtttccctttaaccagttcgactgtctgtcggtcatgatgaacgacctggtgaaggctctaccgtccatagacaaagagacaaaggaacaaagacaaagacgaagagacagagaagatatgcttgatcgagccacgtgcagctaacgtcagcggtgttcatccggacgtacacaacacgatcatcaaagtagtcgagtcgactgacgctcttgcagttgtgctgaatccaagcatatgtatagtcttagctcaacgcatacttgtacacttggcttgctaaacttatctcttcttcggtcggatttgctacctcagttgcttcaagtcgcatattcctcgcaaaggtgttgtatcatgagattgctactatcgagtctataaaaagcaatacatatatgcgtaaagcacggtgagaataatctcaaccagtggtgatcggtacatggcccttttggagttgggtgccctcagaccacagaccacagactccccatcggtcatgagcttagtttgtgctagcctcagcctcagcctcagtcttatcctcagcctcagccgtcacggcattctcagcatcagcatcgctagcgacagcgtcaaagcccggcatcctcgcccccttgctcttctcctagtgcagggcttggtggagtatgttgcgcggcgcattgacgtctctattccgccaagtctgagagtaagtagagagtaagtagagggtaagtagagagtgagtagaaagaatgatgagcactcgacacatcatcctgaaacataccacctgtgatgtctctacagctcacaaataaagacatgtacagacagagaaagacagagaaagacagagaaagaaacagaaggagaggaagaaacagaaaaagacaatgacgaagtcaaaagtcctttcgataagggtgatctgtttagacaagccgtcaggtcgtcgggagaggcgacaccggacaacgagatgaacttgaaggttcaacacctcctatcgtgtgtcgacctataccaaacgtagccgattgacgggatttggtgcctctttttccgtttaaacataagaactgatgatcgttcttggtatttttctgccattcttgcccactacacctggcgaatctctgtacgaacacgacagagaggagcaatgcgcaacatctgtctccttcgaggacctcctcgctctggcaggtgtcaatcgttcatctcataatcgatgctcagccatgatccattcagaccaaagttttcatcaaaatccatcaggttgatcttgatcatcaggcaatccccccatcataccctcggctactccatccggctcgccgatgaataacgtaaacaccgaagcaccggcgatcgtcccgaaaaatggcgcgacgactgaccgtcacatgaaaccggcaaggacactgagaaaacctatgctagtcaaacagatcacaggggaaaataaaaacttaccaggaatccacctgacagtagcccaagacaaaacaaaccatatacagcacttaattttgaagacaaggatcaaaccagatgatagtttgacactcaccagtacgaattgccgttgatgtttttggctgtgaacacttcggaaccatatacgaagtaggtgaagatcctaggggccagatctcgagctgatttcaaatcaaaagaaaatttcagtaaacttaaccatcttcagggaatccaaaaatgatcgataacacttacctgcgttgatgccgtatcctaagagctcgcaaacatcacatgagtactcactcgtatgactatcaaccacacttgaactcacctgtttgataccctaagcttgttccgatcaagattaagagtataaacactgcaaagtgaccagacagagccaagacctcattcctcttcgaggtgataacaaaaattccgaacatgagaagagctgttgatagaagcacaaagagtccgatgcaacatgagatttcacgctagtattcgaaagaacaagaaacgacctgcctgaagcaaggaactctgagaagaaattggaccaaagggtagagtttggaagagggtactgtgtgtagaaaaagacaatgatgaggcccggttgttgtgtaaaaactgatgagctgacactcactgtacagaagatcccagcagttgggcctagcccgttgctgaggacttcacctccaggcacggttcttgagccatgttcgtatacatcgatttgatgctatcgagatatatatgagaaggcgttcagtaaacgctccaacagagtgtaaatgacacactcacggaatagcccgcataaaccaaggcggcaccagcgaatcctccaagcatctggctcagaatatatcctggaagcttgcgaagagggaaccgctggccgttccgagtgaagagagcaaagcagagcgagacctgatggcgcacaaatcatcaacatatgttgagttctactgatataaagcgcgcagattatgacccataaaagagcttacagcaggattcaaatgtgccccggaaatagagcctgcagtcaaacttcctaacataacccccttgatcaccgggaagattaaccccaaatgagaatattcaagagtttttcatcctgttagtttcatcgtctctgaatcagcagcttgaatctgaagaaacatactccagcccctgtgggatcacaatgaggcagagttgaaagtgctctgtcagtgtcttctcgctcgatgaggttcagaatggatcaggggtcagtagtcaggaacaaggcaccgacaggcaatattgatacccagccatgatccgttcagaccacggctcaaaaggtattgagcaactactccatctccaacaaagaccagaatagccgttctaaaaagaagcttctggaatgaggtttgttcttcagatgtggacctaatttatagcgaaactcaccctatgaactcggcgagaggctgtctgtagatgtgcctgaaacgagcaagtctgtccgagaaggaggacttaggataggaagtggatgaagactgggtgtaaagaagtggttgacgttcaagatttgacattttgatggtctttcgagaaagtacaaagagggtcagagtcaaccgttttgtactgctccttattgaacaagtatgaagggtgagaagagtcagaaattggagatgaacgagaattgggaaaaaatggttttctatgacggcatgaacaaacaataaccctaacgaacatagtccccgtcaacattcctaacaattctggacggcgtgtatgaatgagcatgactggcatccttcttcatcagacacgatttgtctattcttctcgcagctatcaaaccctagagtatcagcatccgggaattatgaaaaacatatggtcgtcctccatgttgggttccgatgttggcacatcatctgatgatgaagacgatgacattgagaacgacatgatcattgactcaaacaataaccattcgaacaaatctcagttgtccaaagagcaggcggaactacaccagattgacttgtccagaagggaggagaccggaatagagttgaaagagaatccttggtacgccccgatttcattctaattcataaacaaacaaaaaacccgtctagtagatgtgaacaagtctagcgcatatactcatcttccaaacctctcttcattcgctctttgcaaatgatattcaggacaaaggccgtttcaaactatgtcacacgagaaagcaaagatggcctttctgtgagtgtgtacttgacattgagaaccaatttgtccagccccaatgttcgaacccattcattcttacaacgattccgaaatctaccatgtcagtcgagtatgtcgcaaacaggctctgataaagacttacagaacgctcctctgtctgccaagaaggactctgagaaaagtcgatccgtcatccagatttacaatctaaatccttcctggtcgttctctgaaaaaactgcatctcttgaggcaacctcgattgcctctccgatacaagagaagacgcatgcatctatctcggaagttacctcaacaactagtgatacgcgctcataggttagtaattgtggaagacaaggcaatgaaagaaagaagaacaaaaagaagaacaacagtgaaagttcaactaaaaaggtcgtatttggcaaaatacgtgagtgtgtttaattgtaatcattcaagataggtggctcactggaatagacttctatcctctcgctcccagcccgaaacgtgcaaccaacgtcggcatttcctatcgtccaaggactgtacaaccaaggtcatgcgaagcgattctcaaagccacaggcagtccgtccacccagaaaaaacaaactaaatcgaacgaactttgctatttcaagaactacaagtatggcagagcgtgatgcccaaattcaagtagtgtctgatctctctgatgactcgatagaggagtcattctctctccattccagcaagaggaactatatcgacctaaccaacttgatgtcctcatcacctcccattggctgttcttcgccttgctctccggcgcctgttccggttcagaatagccgggatgttcagattgaaaagactattttgagcaacaaaaaaaaagatatcagagggcggaggattgataggacatcattcaagagatagtagatctttaaggaaagacaaacatgacatgtatgaggattattggaatgtaggaagcaatcaggaaatggtagctccacgccgctctttaactcattcagatgccgcagcaactgaccgtcctagaagttagttcacgctcattaatcctttgtagtctttgtaaatgtttgacacttttaatctttagagaagcgttcagcctttgtaccccttcgaccaagcccatccgtcgaacgtaaacccagagcttcgccttcacggacctttccgtctcagccccagtcttttctgtccgttcagctcgaaacctcgccgacatcaccgaaaataatttcgtcttccccctgcacacgacaagcgttattgagaattagtcaatcagacaaagtgtcaaaatcttctgataagtctccagtaaaactccagtatctttcaacagttagcgagagggtcccggcggatgattatacgtcgtttgtaacatcatctggacatcaccaggaagcgtggtcagcgcctccaggcacaaagtcatccagaaagaagcataactttctaacagacgcaacatcgagcgaaggtcgacgggattttgccagcatgccggaaccggtcaagacgatgagcatagccggaagaaaaatcactctatgggaaccccctctgctgtctccatcctcatagattgtaatgttatgaaaagactgggatcaagagagtatatcaatgaagctgatggcgccaacaaagataaccgtgagagatctttaaggaaagctgatataagtggacgtatctgtgagtatacgcctcatttctagtatagagctgcaccatggagacaggtgtgtgttgcctatcgtcagtggagatcagtatctatgtatggtgttcaattttgtcaactctcgctcaaaaatagaaagcaagatatgaagttctttatgagtttactatctctatcgatgatggcagttcttcctggactaatatcccgatgtctttcttgatcttctccagacgcgcgttccaattgtctatcttcttctcccctttgctctcttcgcatcttccacctactgttcctacatgttcattcggaatatcaattccgtgttcctttgaatgttcttcggcctctaagtctctaccaaccaggtgctccatccggacgactgcaagctctttggagatctctttgagctcctttatttggttatctctgatggagtctgacagagcagccataggtggcaactttgatcgaagtcctgggggtggattaagcatggcaagaagagcggatgtctgagctttgagacctccgaactggcgagcaaggggggcagccaaagcgaaaccgtcatcgaatcctggttgaagagtagatagtttgccttccggaataccttctctgtaaccgtcctaggggtaatagagtacatatagatccatcgatgagaagaagaacgaaaagagcgtaccatagacgaaaacatacattggtaaacttttcatccattgatgcccactctttgtcggccatgctcagattggttccgctcatagacattgaagtcatgtccacagctgtatcatcaagccagtcatcctggtcgtcaattatatccgaggtgtggctaggcgaaagagacatgatgatgagtgttgagctgaatacaggagagaaagaacatgagtaatatgaaacgtagacgaaaaaggtcaaatgcggggccccaaagaatcgaggagttgaacaagccgatggtaaccgttagagagtgatcgttaaagatgatcgatcagacatgagtagaccatactgagatcggatggagaccaaggaggatgcctctcacctctaccatcatcactagtcttcttcccttggtgtcccatatctgtttgactttgcacaagacatcatgccacctctctcatacttagtgatgaccgcatcagatgcggccgagtacaacgcccaggacccaaattacatcagacatagttcgctcaatcaattgttggaggaaagagcatcgtcttgtccgaatagcatcgccgccgcatttgccgctcattcagcaggaaagaacgaatggggatgggatacctggagtaagattttttatgcacttagagtatacagtaaacacgctgattgtcgtcgagttcattagcttttgactccttgagaagggagtccctcatcctcgccaaccatttggcttcagatcttcatatccccgttcgaacatctgacaaagcacaagatagaatggttatcgctctactctgtccgagtactgcagactttatgttgaccgtgtgcgcttgttggcaacttggactaggagtcttgctacttgcgtatgtgacatgttctttttctccttccattccatctcgttttgcctaagcagcacacgtacaagaataaccagtactgactaagcctctactggtcgtttagtcctcaaaatacaccacaagccatatcgtacctgtgtcgtgttactcagtccacccatctgctatatcattcttcgatgactgctctcgcgcaaaatgcctctctagactatgagtcgttgaaagagatcgcacctacactagtacaaatccctcaaagagagagttggatctcaagacgagaactcttttcaagagagcaggccaagtcatgtctgagctatgaggatgaggcagatacggttgccatcatctttcatacctcaggttcgtcgggtgtacctaaagtgagcaggttcatattcttgtggtcgctaaacgtgtactaatcgccgccttcaattaaaccacagcccatttatcaaaaccatcgtttgtggaccgagcctttaccttgtgtccctggcgaacccgctttcacgaccacacccctctttcatgggtatgtttgctaagtaacccagaacacatatcaattcttgctaaccagaaagacctttgtttgattcctcgatacacaaaaagtggcatgtcggacttcttccggtcgatcaatagcaagagcgcgctttatttctttccttcatcgctgccagttacatcatccaacctcgtgcaagccgtttccgccagaggtattctaaacaaaccaacgtcattcctctcagtaccatatataatccaactcttgaaggaaaccgaggatggattgaaattactccaagagtttgaattagtgtcaactggaggatcaccaatgcctaaagagattggggatagtctagtcaaccagggtgttcgtctggtcagccgatatggctccagtgaatgtggatgtacgtgtttgttatactggcgctagtgacctcaaatctatgtagctaacagttttagttgtcctgattcaatagtcctcatgtcgtcccacagagactacgggatagacaaagagtggagctacttgcgcacaaatgatgctgctcttaaatgtctcatcttggagcctcacgatcatgagagtttctcattaattgtaaaatccggttggccgagcaaagttagtgtgcatccgcatatcttccataaccgcatcaacacgtctcagctgctcatctttgtctctgtactagtgtgtttcgaatcaagcagatggctcttacatcacgggggatattttcattaaacatcccaccatcgagcacgcttggcttctctcaggacgaagtgatgacgttatagtcatggtgagtggctcatcttattactgatgatgactgagacatttacgttgaactggtacatcacatgttttcccaggtcaatggagagaaagcctcaccagttcccctcgaggaatccctatgtacaagtcctttgatagcagaagcggttctctttggagcaaaccgtagtgctatcggcgctttgatagtgccctcctctgaagcctctgcggttaccctgaccgacctcctccctttcctcgccaacaccaatcgtttagcaccttcacactcacaaatttctccagagcttgttcttatccttctcaccgacgtcaagttccccagagctagcaaaggaagcttgcaacggggaatgacgtatcaattatttgagaaggagattgaacgagcctacagaagctttgagagtggagaagaggagtccgataacgaggatgggaagtggaaggagggaaccgatttactggcctttgtcaaaaaagttattgaagcctcatgtggggtatctaatagtcaagaaaacggctttggattcgatgaggacttgtttgcagccggtgtaaactcacttcagtctactagaatccggaattcactacaaaaggttcataacacagccctcttctttatgccatgaatctcattcaatctgtagaaggtgctgacattccagttgatgttttgtctgtcttagaaactacccctcaagggacaaaagctatcgtcaaatatagttttcgagtgttctacaatcagaaggtctgttcgtctttaatcacgatgaacaacttcaatcatgatacttatcaatcagaaagccttttgtagactcacggatcataccaagagattactcggagaagaaactggagacgaaggcccgtccctggacgagagagagctggagtacatgcaagtattaattgataagctcggggcttttgaaacgccgagcaaggacgatagcggctgtatcagacaaggagagcatgttgtaagaatctgtccttgatgtacatccaaccctaggccattgaattctcctctttctaacatttcgatgtcgctattctctcttagatcttgacaggatctactggatccttgggggcccatcttttggcccaactcttgcctctgaaatctatcacacttataacccttctcctacgtgcggaatccatcccacatgccttcgatagagtcaaggcatctctgtccgctcgaaaattgtctttctcaatagcagattggaagaaagtgagatgtttgccagctgacttgagcaagtctgacctgggtgtcggtcatcagacgtggtctgaaatggcgcgcgagacaacactcgtcttgcatgcggcctggagcgttaattttgtaggaagattacagggctttgttcctcatctagaaggtcagttgcttttgctaaggctgttgaaattatctctcgaaacgtgcactgatgaacctatggtgctgtttgaatcaccaaggtctctcgaacctgataaaaaccatcactcagcctacgtcacaactaaactcccgactttacttctgctcatccactgcttctatcctaaaccaagacttggcgtatcctttgttggaagaagtttctctgaacaacgaagatgctgtccatatgggatatggttcgtacaatatccggattaagttgtgcatcgaccaatgacgatttctgatatcttggtgattttagcccgttcaaaattagtagctgaacgtatatgtctctcggcgtccaagacctgcctgcctgattcccgaattggaatcttgaggctaggtcaactttgtgctgacacgcaaaaagggatctggaacgagaccgaaggatggcctttgttgtttgccagcatggaagtggacggcaagctaccaggtttgaaagaggtctgttctgcacttgttcacagccatcttcatttgaattgcatcttcctgacatgaattgattttgttgtggtatctgcgcttgaatgaattcctagaatcctgcttggctcccagttgataaatctgctgcttcaattctcgacattgttcttcttgattcttcctcggagcctctagataaacctctgacgtaccatatcgtggctacgaatttgtcaactgcattcagctccatattgggttggttcaagaaggccggattatctttcgatgtggtagatcctcaggaatgggtccgaggactgaaagaggcggaagagcaaggaggaagacaagattgcttgaagctgttagacctgtgggataaggcggttggtccaaacatcatctgtctctgttgttattggtgaatattctgactgagatactctccgccttccataattcacagtacaatcatcccagtggtggaattgaccccactcttttcccaaatttcgatgtcagcaacgctgcgcgctattctcaaacaatccgaaaaagcgagcctatctcagaagagttggtgcttaagatggtcgatgcatgggttcagagtggatttctacgcaaatcagcttctgcttagagcaaatggaggggaaaagatggcttgttataattagttctctacatatgaacatgtgaaaacttcggattgcactgtatttctccacaagagcttgcttacatgatattgatgagcagagacgagaaaaggtcaagatttgaaccgggataagataaaacagaattcgccaagtacagttcggaaacgaatgagacatataaaatgaaagacacaagacactatacaaaccataatgaaggtgatataaagagattgaggtcaatttgcatgtcggacggtctgctcgtagatcaaccatggcgaccgccaacgtacaaagagaaagaaagatgaacgtaaagccataggaagaaaaaccaatagaaacccctcgtaacaaatgcgatgaataagaagcgactctgccgtgtgttttctgctgggacaacaagattaaaaagagaagagataggagaaaaatgaaaagtcaattgtacaaaaacaaagtcctgttttgtatctgtgttttcaaaatttggttctttctcttctttttcttaaccaaggaactctccaatggtagcgttgacctcgttccagaagttttcaacataaccctccgggtagccgttcttgtcccatccgagagagaaccagagtcggccggcgaaagtatagcagaacatcagcattcctccaggtcgctgtcggacaccgaaagtcaagtcggaagagtgaatcatcgtgtacgtggtgtagttagagatggcatccaagtttccgaggaaggatagacccataagagcgatttggggcgctttgccagtagccggagccggtttgggggccggcaccgaagcagcagcagttgcggacgtggcgtccgtctttgcgtcattcccgttcccctgaacggttttttccaatccgactttgagtttctcaacgccctcggctatagcatctaccactccaccttcggcctctttagccttggcagcagtagcggctgcgacagcatcatcatgcttggcccaaccaatcgcttgcctctcccgagcagttgacatagccaaagctcgggtgacgaggaacttagacttgaccgctcggagtgtctgggccttggttgattgacatcggagccagaacgtttttgcgtcagggatggaagggatgaggaacgacggaagggtaacattgaagtagccaacacataggtggaagaaggaggatgcagttggcttagggggtcgaagtgctccacgaagattaatcgcagagtagaacatcaagggaagctcgttgttggcatcctgccttcgagcccaagcgatattgaccagtgcaaaagccgcatgggcgatcgtcaccccttgagatttgcatttttgaagagcaacagcagtggtcttggggtcataaaccctggtgtctacaaacgtccgtctggtgttgctagtctggaccttgggaaaagcttggccaccctacgaaacacccaaaggatagacaaaacacgaagaaaaagaaagacgtaagataaagagaatcaaatcggtccattctcaacgaaacgataaattggacgaactatttgcctggcctgattgttcatgaactcgacttggccaatagcgtgctggaacttaccccacgatcggggaatagccaaccggcgctcagtgctgactgggataggattggcctgtacaaaccaaagaacacgagcaagatgggtcatggtggatcatcggagggttaaggttgatagtcaaaggtttggtcaatggaacgaaccttgacgagaaccctagcatcgatctcggtctgaacaagagctcctaaatcttcatcggtcatgtcgttggcgattagggtcaagaattcattagcgatgacggcgaaactaacgccgtcgccaaggaagtgaccggcaaagaacatgaactcgaaatgcttgttttctccagtcactccgactggattggccgggttggggaagatatctcgaggatctttctcgccttctttaggagcgggaggagtagagatcgatatcttagcaagcaatttatcagagagagttcgaggtccatttaagaaggcatcaacaagttctaatatccagagtagaaagaggaatgatgtcagatgtcggatggaactcaagaagagacaccccgtgcaagtcacattgagaacggactacttaccatctttagtcttgtcaacagggaacgcggcggatgcctttgctcccacaatggcttcagcggtggtacgaggaagttcgtggctgcccgtgaaagagttatcgacaacgagccataaagaatcagttcatgccgttgatacacgagcgggagcgcagcataattcttccggctgcctcgcttcatattaaccggggcaaacctgtcgattatgacattatgtacaaagaagcgagacgtacacaaagtagatatcgttcagagcgcgttggtcgacgacggatccgaggagaggatgtcggattcgaagaagtgcccacacaaggagcacacgggatggaacgaatcgggcgggaggcgcatacagccggagatgaagatacctgggaacagtggaaagaggaaacggaaaatccaattgtcaactcaaattccatgaacttgctggcggctcggcaagaagggaaaatgcagaagatattgttcgaaaggaaagcgctatcccgctagaattatgatagcaatgatactcgatatcaaagttacaccgttgacgatgataacaacggcaagcgggaacgcaactcgacgaggcgaaacaatatgaaagctggagctgggaacatacatatcgttgactccctcagctcgtgatggcaagtagtagctgacctcagcctgtccaagctttcgttcccagagaagcttatcaggctcgtctctaatgatctgactgaaacctgcagactcgagtcctggagagggaggaggatttgcgttctgttcgggcaacccaagaagggaagctgtgacgacgtcggaagccgttctggcgtgggtgtagctgctcatggctatgaaaagaagggcgggtgagaggtataggtgataggaggacgaaggaaggaacggaggaacaggatgaaagaagaaggaaagacgacgaaaggtgtgagggtgcaagggtgtgggagtaagaggggaggaacggaaatcaagagagattggggggatccagggcgaggcacaaaaatcgcggataaaaaccgggaggaacaagagacaagaaacagatcggcaggctaggacgcgcctgttcgtaaacatgtgcactcaggctctagaccgcggacggtcacgcgtctgggacgcgacactggataaactctaaaatcggcctaagtgccctgttgttcggttgggaagctacgtctgtcggcggaagatgactgatttatcacttcctaaccgctttctgattcatcgactatgaaaagacccatggattggttccaattaccagaagggaaggagaaaccaacgagatgatagaaaacttgaggaaatataaaagaattttggaatagaaagaaaaagatgatgagaagaaaagggaagcagatagagtatatagaatcagacaagtagattccgtagtaagctgtattgtcaagatgatagaacaaaaagatagaaggaaaacgaaggatgacggttatctaggcaccacctcccatagctctgaggacacacgtcgttcaaatgacaaggtacttgtccgtcaccaacactgattcctgagagaacgcaatctgctcgcccgaaccaaccaaagtggcgctctcgaccgagacgtcggacagactaccccctccggcgacgaacccaacttgaactgggaaaacctcgtcgacgtcctccactccaccgacaaatacctcgagcgtccccgacggcgcgtcttcatcaaccgtctcggtgaaccactccaacgcgttcgaccgcgagttgtacgaccacgagcccgtgtgggatgatacctttggctcagcaccctcgctgtatccgcaatgattacagaggtgcgcagttgggtgagtacatatgttacatcgatcctcctgtgaaagacaatgaagaagagtcgaactcacggaagcggtattgagatgacgacattccggaggaccaaatgcttggcttcgagctcaaattcgatgttgatgtcacaaccatcatttgaagggctaggccaacagttgactggtttcagtttcatcattgggcaagagaatcacacaagaagtcagtagttaccacttgacaaccaagagggagaaccacgatataaggaggaaaaaaactcactggccagaggaacgaccgcttcgtttgctccttccaacttccatttcacaacccccaaagccttaccaacgggaaaatctctcgccggatccttcatggcgaccactcttcttgctccgcctgacccaaacttggccacctgggggtgctgcttgaactggatctcggacgcgaacgcagcggagctggtcggactcgccaaattcaactcgagcttcgccaacgacgggtctgtaaccaacaagtttagactacctcgtagatcgagatgtgaaatcccgccgtctcgatggagggaaagtgatagattttcggagatcgagatgtgaacgctaagaagcccaattgagaaggatgtcattattgatggacatcccttctagccgatttatacagatcgaaaaattctagaaagaagaaaggagacctacctctcttggtcgaccttgtccaagactccgatatccggccctgcaggtgattcagtctggtaggcctccgctggagaaggtgatcctctcatcggctcatcctcttgaacctcgcttgcaagcgcactcaacagatccgcctgcttaggcttcttgccaagtttcataccagagttctggaacgctggtttcgagacactggccggggaagatgttctgttcgacccgaccatccaacagatcgccggtcaaaggataagcatgttacaacatataagtcagagcggaaaggagaaacacgagacgcacctagaaattgcgggcggctcatatcgggactgttggggaacaggcgaataagtcgatcctcccccggctccaaaaccgccagaatgaccacctccattcacacctcccgttgctcggttcatcctagcagtttcgcgacgttgcatttcgagctgcttagcccgtcgcttcatctcctctttaacctctgcttctttattctaaagtcagtgattcatcacacaagatcagagaagtttaaatcagtcaaaaccgaaaatccaagtagccgtatgcagatgcaggtgttaagatacgaactcgggcaatgatctcttggaccttttcttcatgactttctgcctccagaacggctcttacttgctgcacgttgacgttctctctataaccaagtgagacgatttcatcaaacgcggcgattagatcaaatgcatgatggattattgttggctcatcaactgaagatcggaggagatccgaaacacatcggacgagcagagagagtgtcgagatatcctgtacggagaaagggatcaaatttgaagcaaaagtgacatcaatttgatgccttgttgagagatggcatgtaaacaggatgaaccaagaaggatgagaggatgtgacaaacctgaaggatgttactgctcttggtggtaactatcagcagatataaatcctccaaaggctgatagacgtaacggacttcaggggtctcgatagtagtatgttggcttccagttggaatgagcttgggaaacgaggcgaggagaccttcaattcgggaccggggcatctcgagaaactgtcgagagatgatcgctgttagaatcaattgcacatgccgatggatcagttcgactatgacgacacatatactcaaacttcgttgatctcaagaaaatagagcaagaggaatgaggcacaaaagatgatggaaacaagacagatacgtacgcttcccagatttggtgacaacggaagcggcgaggacgacctgtgatgaaatagcgagaaagtcaggggggaaaagaagagaaccaaagagaacgaacatagctggacctatacaagatgaaaaagatcttcatagcctaaggaaagaataggaacactaaccatagcttgcagacaattgattcggttgatagaactgaaaagaaaaaagagtgaaagatgttgttggttgggcagaagaagaaggcgaggtcgggatggaagatggggggacgccaggagggggagggattgtagtcgaattgatagagaaaacgactgcgcatttgtagtcttgtttgaattttcaatagtgacactttgtagtcttttcctctctttcttctcatcactcttcatcatttacccacacccacacccacacacactctctctgatcaatcatgtcgtccatctttggaggaaagtctgctaatggttcagcttctcagcctggtgagtcaaatgcttctgagttcttatagttcaccatatagccatctaggtcttctcgctgatcgactgacggtggtgccgaatcaatttgtagacatgcaagctcgaaaggcagaaattatggaacaggtcaaagcggaactacagctagctaacgctcaagagttaataaacgtttgtttcacaatatcgagcttcaatatattaagctgaattagagggcagaaataatactaaccgattatcggcgacgggtttgtaataatatacagaaaatgaacgagaaggtataaccaaaaacgggtcatccttctagtcttctggtctctctatatgttgtcgctgagatcaacgtttttgaccgatgttagtgctaccaaaagtgtgttcccaaacctggggctatgctgactaagtccgaggaggtatgtttctggtttctgagtcctgccggctggtcactgctgtcctcagtttcttgactatccatttatctttccgtcttgcattcagacttgtttgctgtcgtgtatggaccgatatatggaagtaaggcgcaaactgttctttcttttttatccttgatggtgttcccggctttgaccgtgattgacccaattgtcgtgatattatcttccaggcttgtaagttctcctatttagctcctgagcatccgcttgatgacttgacagcaaagcaggatgagagttaggattgtgaaagagggctgatgacgatctgaaaaccgatgttattcaaccgttgaatgaaaacacactttcatctgttctagttaacgtgttcgttctttcaatcttcaatatcgtattagccaactcttcaaatcttttgaagccgtttcctgactcacgttggtttttggctatatcgctgcatctgcacctgaactacaatcatgttcagtgtctctcgaagctacgtcgctcgattatccaaggagcgagggcagcttggctctgccgggggtggcatgctcggcggagatccaacgatgtctgggtcgaacttgtaaatgaagtatgaaagataaaagatcgaaataagaacgagactctcgaagacaaccagagcttattggcacttacaagattcggcaaaggtcactttttaaccactccaatctttatgagacattctatcgttggtgcgcgcatgtcaccaacaaatcttgtagtcagaagcacagatgatgtcggtaaacaaagatgcaaaaaatatccaagggtagatggatcttactcaagtaaatcaatctagattttcatctaaaactctacgagcagaggaggaaagttatatggcgaaaaagaaggtgcacagacgaagatgatgctcgcttaactttggaatatttcgcctaggtctgcgttcattaatatcttccgccctgcgcctccttcgctttctcattcatccacttcttcatcaagcagtccattcccacctatcttcatctcctctcagtcattctagcccctggaaagaaaagtctaaatcgatccttggactcttgctttctgcttactcgtgccatctagacttaaatcgattggtcgataattcaaccatgtcactcctcactagatgggcgaaaatgggcggcaaagatgcagcctcggcttctctatcaccttcggtaccgggcgaaacaggtgaatggggtagagacgagcatctctatagctctgattcagatgagagattctacggaatggaaaacgttcgtcttatcttttcaacttgaatggctgtcaatcagcagatgtgtcttctttgtcctttcaatatcaccttctcgctccccattccgcgtggtatcatcaattggacccacttttgatgggggttttcgttcgctgagaatacattctcggccatttaatgagcacactgcatcctttggaccaacatctagtgtacttttgcaatgcaacgagtaccctggaatggtcatcacaaatttcctgattgttgaaactcataaacattgattgattgttaacactcttttgtcttttctgcacggcccttcggacctccgtatatacatcgaacttctgaatcaactagtttggaaacacctggcaagcattggctttcccttttaagctttgatgggctcttggaatcaggctgatttttctcttgattttttttgctttcaaaaagttatgccaacgcaatcctccaatcattgtatcactgtcaacctttccgagattgcgtcaacacctacccatctttgactactccctacatccccagctcatctgccacgtctctttcttatccttctatcataacaccgagtccagaaccgctcggaaggtctgcagcatctattcctccccttcagtcttctccagtaacggtcaatgtatcatcttcatccgccaataaatcccggtggtcagccaccctttcgaaacgaaacataacccctactgatcctccggccttagcttctcccacttctttacatgtcgatccgctctcgatgtctcaagctgggcatctcagtcagccgcgaacgaatgttcccccaccaagcttgtttgttgccctacagtcattattcagacaaatcgctaccatgcctatcgaatatggttcgagtgctgcggatctcagtactagcatcagtacaactggaagtacgggtcaagccgctggaaatcttctaggtgtagctggtaacggcaacggaacgacaggatcgggcccgggagatatgggaacaggggtcgtcgctccggctaccttcatggggaagcttaaaatggagaacgagatgtttaggggaacgatgcagcaggtcagtctcgaatctttatcaggctaatcagagataaacatctcgcgagtgtagtcgaatcaagtcgtggtgggtgatacggagaaggctgaagattgttgtttgaccttctgggcccttaggacgcacatgaatttctgaactatctattgaacaaaattggagaagacctagaagaagatcataaagagaggaagtcggcgaatgaagtgagcttagggttagggttagggt

SEQ ID NO: 2344 - DNA, 1076 bp, Xanthophyllomyces dendrorhous
caaagcacagtttgaacctcagacttgacaatacaagagagatgaacgaatgacttacggcaataaccctccttgccttcctaggaggcaccttcccagatcgtctgctagctttctaactttgagctcatccctaccaaatgtctcatcacagatggtgcagttcgctttgaagcctgtttgagcccacccttggccgaccgcaggcatcgtcatcgccgtgtttgttttaggatccactagacagaactcatttggccgcggaagggtcacccaaggaacgatgttgatgtttccacagaaggcgcaattgactggtagcgtgtctgagagcgaggtgctcaccggtgagcttgcaggaaggcccgaggtcagagaggagaatgagtttgactgatcctctgtgagattgaagacatatgatgtggggtcgatctgacgagcggctaggtgaacaggaaatgccttgatcgtccgaaggtctagacgacaactgtgatcggctcggtagatccgaggattgagacagtctggtccagacaacaaagcgcgtggttgatgtttgatacatgagtttccacataaacatattggaccatattcttccaggcaagactcacatgcatgccatacgagtagtacatccaacggaggcagtctatccacctccagctcgccggtcgagctagcatcacctttggcccgaacggactccatcgcattccaccagacctcgaaccggttcacagctcgtttgacaaagattgcaagcttgaactcatcgttcggctcgaccgaggtatcggtaagcgaatagtctgttggaacagagactacctcgtccttcagcttggcaaacgcgccgagaaggagcagataatctacggtctcggagatcgagatgagtggggcagatttgaagtcatggattggaaagaagctcgggagtgagttgtcctgaatagatgtaaaacgagaatagtatgtaagcaacattcaaaagggaaagccacaggttcaagaagcgtcatacatcacttctgtagggaggtgcatcaggcccgttggaagcgttt

SEQ ID NO: 2345 - DNA, 378 bp, Xanthophyllomyces dendrorhous
agactgagcctcggcgtcatccaggggatcagtagggatcaacgggacaatcccatccttcttatgaccacgttgagcgaagcatacggcatgccgaccgaagcgaaactggcccatgcgcaaagaaagtatatgcagacaaagtgcctgcctggaaaggcagtcgagtacctagacgagctggactcacaccgaaagactttgcggacgctcggaaaggatatctccgacggcgaccatatccagacgatactagacggactgaaggacggaacgtacgagaatgcaagagtcgctctgatggactcgtgggacttgacgctgcccaacgtccggtttggcctgacgtttatgacgaaactccatgctatcgagaag

SEQ ID NO: 2346 - DNA, 337 bp, Xanthophyllomyces dendrorhous; identical to SEQ ID NO: 891

SEQ ID NO: 2347 - DNA, 684 bp, Xanthophyllomyces dendrorhous
agagatacaagtacttcgtcgctttccctttcccatagttcttttcctcttttctcttttctctcaagtttggattttgtcatcttcgttcgaagtatcttcgtcctatctatcattacacctatgcctataactttggcatcttcctaaatcctcgagagcctgagccttccacgtacatcctcatctgaaaactctacagccaaccaagtcgcaacaatcggttgccgggcccttccgccctcacagaacctcgttaactcctcatagttcccttcagcaatctcctcatatccctctgcaatattgcatgatcccttccctcttgagagctcaagcgtgctgagtaccgtccccactcagcccccttgcctgcgcccctaacactcgcgccctttcctgcttgcattcatgcctaggcgacgaggagtcgcaaagtacttggtcgctttccttttctatattgttctctttctcttctctctcaagtccgagtcctgtcatcctcattcgaggttgtttgatcggtgattcttgcaatgtctctatctctgccgcgcctgtgaagatccaagagcctgagttttgagacaacttgtgatgatagaactctccacctagtcaagtcgcaacaaaacagtcgcccggctcttccgcccttttacagatgcccgttccggtata

SEQ ID NO: 2348 - DNA, 846 bp, Xanthophyllomyces dendrorhous
tccagccaccatccacgtcttctcgtagacagtgaacatctcaatgatcttggagatgtcgttcagtctgggagatgcgaagaaaggaaacaaatcagtggacacaaagtggaagcaacatcatcagaagcgacggtatcagcggcggcagcggcggcggcggcgacagagacagcgatggagccatgcgaagagagaaaagaagtcagggtctcgacacacgcccaacagagaggggacacgaaaccaaggcatggaatcagcagaccacgtacatgcctctagggtcgaacgagctcgacgaccgcttcccgccccacaggttgctgcatcagcccaggccaagaacaaggcagacacgcaacgagacacaaaagcgagtgagcacatgcccggtcagcacacacagccagacaagacagcactcacacagccagaacagtgccgaactggaaagccaccctgatctgttgcggcagcagtcgacagcagcagccgacagacaacgacagagtggaaaagcatgagaagagcaaagcatggaaaaggagaagcacgggaaaagagaagcgtcagcgtcggcgcatgcaggcaagcaagcaggccagccagtcagccagtcagccagaagcaatctagccagccagccagccagcctgatggtctgatggtctgatggtctgatggcctgatggccagatcgtcgacgtacacatagcacatccagattgtctctgatgccgcgcttcgagagcgcatggagcgcgttcgcacccgccctggccgcgttgctgcagactgtcgagtcggaagaacagagagggaaggcagagagggagcagagag

SEQ ID NO: 2349 - DNA, 548 bp, Xanthophyllomyces dendrorhous
cttctttacgccagcgcatccagcattcaagtgcttgccaggcagagtcgagcactccatcgttaaaagcagtagaagaaggcgacaaccacagataaaatacagcgccgtcctgactctgatcaacaggccagatcgtgtccggctgagagtatacgatacagatcaagagtgaagatcattcgttgtcgatcagcaaaagctcgctgaagaacagaggtagtaagaggaacaaagctgagtctctcagcacagccggctagccacacagtcaaccacaaagcgggtcaatcgtcaggaccactgcccgatggcggcgatgatgtgaacaagaagcaaccactgcgatcatggcgagagccagacggcccgacaagtggagcgccgtcgacctgaacgaatcccctcagctcaggtgggtggccgagaaagagcggcagaacagaggagcatggtctcagcgcgcgttgcgcgatcaagtgggagaaggaacgtgatgatagtgttctgaatggcggtttggcttgacggttgaagctctggagcca

SEQ ID NO: 2350 - DNA, 8205 bp, Xanthophyllomyces dendrorhous
  misc_feature (5347)..(5356): n is a, c, g, or t
  misc_feature (5545)..(5554): n is a, c, g, or t
  misc_feature (5661)..(5670): n is a, c, g, or t
  misc_feature (6438)..(6447): n is a, c, g, or t
gaggaaagagaggtcgtggtggcggaagaggtcggggcggtggaagaggcagaggtggcggtagaggccggggcagcagcagatagaaatgttctttcatcatctagctattcttttcatgtctacatcgagaattaggcatgacatacagatttgaaaatatatcgcatatacgcttcaaaggccagtacaaagaaagggtagcatctcttactctaattcttcgatctcatcaactcgaacatcatagactcatccctattgtacatcccatgttttaaatgaacacaactcaacgtcacgattcaatcgctcgaaggtagtataagttagaaggaagacatttgaaggtagataaagacagcctaaaataatttagctgcctatttgcagtgagattgattacgtgttgatggtcgtttattcacttcccccacacttttcttcccgctcgctctacgatcatcgacgttcttccaccatcaatcgtctccgcactttactcaacatacctacaacttctttctctccatctaattggtctgtgatcagcttctactgttgatggaccctcatgatcagcccataactggtagacgaattcgtccgcgtgctcaatcgtcgaccatgatgtcagcacatgataacccttgccaatcgtcaatcgtcaccaccctggaggatcgcgatagtaaaagaaggaaggtcgaagatctgggttctcgatcagttgagtctggtttgactaaaagcctgtcaaacgaagatacaagcatggtctcgtcgctcgcgactcaagatgaacaggcagaggtatcgggtagtcacaacgaaacacagatagacttgaacatcccctcatcgtcgagtgtacctcagtcgacattttccacatcggcctcttcccttgatgtgagttctcagcgaccgttccttcgcctgtcatgttcgaatcctactacagctgctgatgtataatatatctttaggtcaattcatcaccatctgccgacactgttgcctcgtcgtcaggaacaaatacttcctctcccactcatgtctctccttccgaggacccactattctctcctagagcccgagcacaggagctcatatcgagagtctctttggaactggagcgagataatgcccatttccctcggatggactatgtcgatccttctcccatctcatcactcttccacgatatgccttccacgacaccacgcgcagaacttccatctgaaccttcaagggatcaacaggaagcctccatcgaagtctctccatcagcaccgctatcatccgaagaaccccaacgaccctctgtccaaaatcctcagccttcaccgtcacccattcagcgtatacctactggaaccagtctgatagtaagccaaattcatatctgtactcaaccacaggtattcttgagaagagcatactcactttcagcttaattttccctctggcttggccatcaggttcaaggactcgttcaaacagtcgcccgtcctcggctgaatgattcttctcaccgtcgcgcacgtccctttgcgagtacacatggtagtcgttcgtttcacaaccgttcgacgggtcatgggtctggacaagttccagttttcgggactcgcagatttgctgatgggaacgccgctggcgttgctcaacaaaacgaagtcatcgaagacgatgatgatggtatgcctagtttcgaagaacaagcttcattgatagggggtcttttgagtatggctaccacagccacggctcgtgtaagtctatacatttttctactctttgatatactttataagtcattgagttgtcgagttgacaaccgatatggaacttgaatgcgaactgaactaccaatcactttgacagtcacttctgtccacaacttcagaccttaacgccattccctctactaccatatcgtcttctgtctccgacccagtcagaacagacacacccgacgaaccatctcatcaacctcttgctcagcctttcaacagactaccttctcgctttgcctccattgttgacggtattcaacggagactcaatgctcttcggaatgttacctccaatatttcatctccaagacctcacattgtaactccacagtcttccaatacggacacgcctcaaacatcgagcagtgtttctcctcaagaggaaggtatcgaaagggtccttcggcgattcatgactgaagcctttgagcgtcgagacagaaccagagagtcgggttcggctcgtgctcaatctccttcgttggacgggagatcagaagcagtcgaaggacacgataccaacgcagcttccgttgaatcagaccagagattgttagaaaccttcctgtcaggtctgcaaccaagcctaatggaagctttgatggagttcaataacagttcgtctgaggaagagactgtagaaaacagaatggaagcgaccgaaggtgaaatgagtacacttgcagctgaggaacacatggatataggaggaatcgagtctactacaagcagctcttcaaatcgagcagatgctcctgaatcggaatcgcaggtaaatgggggacggagaatgaattggatgagagttcatcggttttcggtcggtctttcttgagacaacttctgcttatcatctgtcatactcactctagtgtcttcatgacttcctttatacgatatcagcctcgattagcacctgcttcgcgcggcaacggaccttcgccagatggtgcaagcaattcttctacctctgtgccaaatcccatccctatggatgaaagagtcaatgtaacggaaccttcacacgtatctgggtccagtccaaccaaccagggcagcaacgtctctggcaggagcagtgtgttgaatgttccgggagaaagaactgttgttcctcttatcatgggtaggtgtatcgccatctccctgatcttcgtatatgttgtgttactgatacatctctattcaaattttgaaatgagcagttggtgtccgctccgttcgagcacaagatattccaggtatcttcgcttccactaccgctaatgaagaccagctctcagctactgccgctgtcagtcgaaggactacagccctaaattccaactctgattcagttcgaccaaatcgtcaagaacttcgttccgatcgttcaagaagttcaattgatacatcagccaacccaactagaaatcggcccagcccttatgcctcgtctctgcccgctcgcttgcttcgtggtagaagttcacaaacaacgtctgtctctagaacactcgagagtgatgaggatgctgttatgagtggtggatcctcggactctcggtctgcccactcccacacaaggtcaagtggatttggtttacttaggcgggctttaagtggcattattggaaatggacctgcttctccactcagttcgcctcaaagcattgttacatcgactgaatcattaccgagagcaactctagccaggacgtcagctactacgagcgactcctctgcagatacgaccgactccgccgacgaaacggaaatcaggagaagtaacagcttcatcttgtgggtaattggaggcttgtatgctcctgatcaccctatcttgactgcacctggattatttacagggcacttggatcatgatgatttgtggtatgcctgtcaattaaaataagctatatgagtgcccactatcgaggtgtccttcaagaggctaatccagagttttactattgtggtggcaaaactttccaaatcgatgttgctaattaggactcttgccgaacttttaggccaggcgaaacctcccaccgcaacggcgaccgagatcaatagctcaggccttactatcgtccatggctcagaaattgctggtctagtcaaacggggccatatacatttgaataccagcgatcgatgcgccgtctgtcttgaggactatgatgatgagattgagtgtcgaattatgggttgcagtgagtctagagacatcgtctaacaagcttcaagcactggtacttaacattgatgatctactgttgcactagaacacgtgtttcataaagtcggtcgattctttagtttcttttttgcgtagattgtcgagcctcatagtgcatcttgttgttgcttttgttcaggaatgtatcgacagatggcttaatatcggtagaaatgcctgcccagcttgtcggactaaggttagctccgtgtttattcttgttgttgcttgtcatcattcctcctgatgatgtttttatattgacctctttctaatttattgcaacgtgtagggagtgaaggtgaaggctgacgagcaagaatcgtcggtcataaattcgtctgctccggaagacacgatctcactcaatgctcaagcagatacaaattcatgaatcttgatagatttattcacctttgttgcgaagaacttcatttgctccaggctcaaggatgtaagttttagaactggtcatatacacagtttacgatctctctgaacttcgtcttgattagccttctgcaattcctttctcgtttcgtctcgatatttgatgctgtatcttcctccagttgcactgagctttccagcacatcattccccctcacagttgatttcaaaaatgttccccttagtctgggcatttctcaatattccatttcttatcagtctaatcctcggtttttgttgattatttattagtttgatgcatgtactttcatgcaagtcatgatcgacagtgtgatttagcacccttctttacgccagcgcatccagcattcaagtgcttgccaggcagagtcgagcactccatcgttaaaagcagtagaagaaggcgacaaccacagataaaatacagcgccgtcctgactctgatcaacaggccagatcgtgtccggctgagagtatacgatacagatcaagagtgaagatcattcgttgtcgatcagcaaaagctcgctgaagaacagaggtagtaagaggaacaaagctgagtctctcagcacagccggctagccacacagtcaaccacaaagcgggtcaatcgtcaggaccactgcccgatggcggcgatgatgtgaacaagaagcaaccactgcgatcatggcgagagccagacggcccgacaagtggagcgccgtcgacctgaacgaatcccctcagctcaggtgggtggccgagaaagagcggcagaacagaggagcatggtctcagcgcgcgttgcgcgatcaagtgggagaaggaacgtgatgatagtgttctgaatggcggtttggcttgacggttgaagctctggagccagcgtgctgtatgacaagccgcnnnnnnnnnntcttctgcctcacacgcaggcaaccaagcatcagttccggtgtcggttgacgactctgctttcctttctgcttgttcttttctttcctctttgcttctactctctagcatatatcatggtccgttggttgctgggagctggacgcttttctaccaagcggagcaggtaagatcaaggcgcagacgtctnnnnnnnnnnagaaggggaagggggccggtagactagggaagcctatatgcgtttcgccgtgtccatcctcgaaagcttcaatgaagtatgatccatcgttgattctggatgatgcnnnnnnnnnntatggttgtttatcaccgctttcttctgcctcacacgcaggcaaccaagcatcagttccggtgtcggttgacgactctgctttcctttctgcttgttcttttctttcctctttgcttctactctctagcatatatcatggtccgttggttgctgggagctggacgcttttctaccaagcggagcaggtaagatcaaggcgcagacgtctttattacactcaaactcccaggagggagcaaatcattggatgtagcgtaagggcagcgagaaaggactgtggacgtaagattgaaaaataagaggggcttcatacggtgagagtagaagaaaggatggctcgttacaaaaagggtggaatgaaggtcgagaaaggcaggtggaaagagtgatacatagaggataagccttgtgaaggaggagcaggaggaggaggaagaggaagaggaagaggaagaagacaaaacaaagaggacgacagcgaggagagtacaaggtgagaggagacgcgtctgaaaccaagttgaatgttaggggcgctggcaagggggctgagcagggacggtactcagtacgcttgagctctcggaagggtcgtgagatatggcaggatgttcaagggtgaggatgactgtacggaactatgaggagttaacgaggttccaagcttgggagagaaaaggggagatatgttggaatcattgttggaattatctgttcgaatccttttctcgaactatctgttcgaattaccttctggatttctttannnnnnnnnnggctttgatgagctgtttcttacttttctggatgaccgagtgagataagaaaacacggagaaggacattgtgtgacgagcgagatctcatactcaagagaagaaggggaagggggccggtagactagggaagcctatatgcgtttcgccgtgtccatcctcgaaagcttcaatgaagtatgatccatcgttgattctggatgatgctatggttgtttatcaccgctttcttctgcctcacacgcaggcaaccaagcatcagttccggtgtcggttgacgactctgctttcctttctgcttgttcttttctttcctctttgcttctactctctagcatatatcatggtccgttggttgctgggagctggacgcttttctaccaagcggagcaggtaagatcaaggcgcagacgtctttattacactcaaactcccaggagggagcaaatcattggatgtagcgtaagggcagcgagaaaggactgtggacgtaagattgaaaaataagaggggcttcatacggtgagagtagaagaaaggatggctcgttacaaaaagggtggaatgaatgtcgagaaaggcaggtggagagagtgatacatagaggataagccttatgaaggaggaggaggaggaagaggaatcggaagaagaagaagacaaaacaaggaggacaacagcgaggagagtacaagatgagaggagatgcgtctggaaacaagtcggaacaaagtcacaaacaactttcaagagattcatgatttacctgcgggatagaacgaatttgttctaattgcagaacacaagttagtcatcgatgaacagaaacagaagtagaaagaaggaacacaggaaagatagatgtagaccaacctcagcaaataaacagtttatgtgaatgctaaggaaaggaaaagaaaagaagagaaaagataagaaaagaagagaaaagaaagtgtcgagcgcagatatatgagtacgaacgcagagcaaaacacaaagcagaacacaaatgccaagatgagaagaaagataaacgggaagacgtgaaaatggatgatgagaaggaaggtaaagagagtgaggccaaaaggacaccaagactaacagccacgatggaaagagatgtctgccaagatgtcggctggaacagaccgagtcaaacatgaagcagcatgattccaacataaagaatcatccttcgcttttttcctggcaaacactgttcgttccaacccctacagaaccaatcatctctgtttctttcagcaaatattggagtcactcgagtgatcagatgaaacccgttcctggcgctgcagtcctttgtaaagacttattaaaatacttcaaacactcgttgttcacgtacttctggctagacaatcaggacagcggaacgatcatgcaattctgcaagtaagaatgatgaggatgattgtaggaaactatgagagttgaagagattccaagcttgagggagaaaagagaatgttagctagtgcactatcaagtatatatacctttcgagatatcaagccaaggaaacacaaggaaacacaagcaagagtgaagagataccaggaaagagcaaagatgtaccaagggagagttaagcaataccaagagagagtaaggaaggccaacgagctacatggtctcgatgctgagtctgttgcaagaatcggtctacgttgcgcaaggtcaccctgcgggttaaaccgggtcaactcatgacattatcatctatgtacctaag

SEQ ID NO: 2351 - DNA, 567 bp, Xanthophyllomyces dendrorhous
gtccgtctagttgccaaagccatacagcgttcggccctgtcgcttgagtgcgtacaccacgtccagtgctgtcaccgtctttcgcttcgagtgctcggtgtaggtgaccgagtctcggatgacatctggcaaggatgaggcaaggatgaggcaacagatcgaggggtagtcagcatcagcagtactactagcagcagcaacagcaacagcagccacgacggcaacagcaacaacaacagcgacgaccagcagaccaagaaaaagagaacaagaccactcactctcaaggaacagcttgagcacaccccgggtctcctcgtagatgagcccagagatccgcttgactcctcctcgtcgggcaagtcgtcggatcgccggcttggtgatcccctggatgttgtcacggaggatcttgcggtgtcgcttggcgccgccctttccgagtccctgtacgtcagacggccagacaacggcgtcagtctgctgagcgcatcacacaaggcggaagagagagcgggaaagagaagagagcgagggagagagcgagagagcggggaagaaagcgag

SEQ ID NO: 2352 - DNA, 319 bp, Xanthophyllomyces dendrorhous
atcagttttatgaggtaaagcgaatgattagaggccttggggatgtaacatccttaacctattctcaaactttaaatatgtaagaagtactcgtcacttgattggacgtggacatgcgaatgagagtttctagtgggccatttttggtaagcagaactggcgatgcgggatgaaccgatcgcggggttaaggtgccggaatacacgctcatcagacaaccacaaaaggtgttagttcatctagacagcaggacggtggccatggaagtcggaatccgctaaggagtgtgtaacaactcacctgccgaataactagccct

SEQ ID NO: 2353 - DNA, 553 bp, Xanthophyllomyces dendrorhous
caaggtgaacagcctctagttgatagaacaatgtagataagggaagtcggcaaaatagatccgtaacttcgggataaggattggctctaagggttgggtacgtcgggccgttgtctgcagccccggaccgcggacggcactatcccgggcaaccgggacggagctgactgtggaccagggtgaacgacctcggctgcctcctcacgggggcgtctggcgtacgattaacaaccgacttagaactggtacggacaaggggaatctgactgtctaattaaaacatagcattgcgatggccagaaagtggtgttgacgcaatgtgatttctgcccagtgctctgaatgtcaaagtgaagaaattcaaccaagcgcgggtaaacggcgggagtaactatgactctcttaaggtagccaaatgcctcgtcatctaattagtgacgcgcatgaatggattaacgagattcccactgtccctatctactatctagcgaaaccacagccaagggaacgggcttggcagaatcagcggggaaagaagaccctgttgagcttg

SEQ ID NO: 2354 - DNA, 1126 bp, Xanthophyllomyces dendrorhous
cgcgagaagagccacgcttggaagggtatcccgatgacaagcaccgcaaagcctacaagggccgagtacccgatagtgtgcagcaggatgataagtctgtgacgtgtttgacaaagagaagcatgtcggtcaggctgataaactacaatggaacggtatgggtatcggatgaaacgcaagacacacatacccgacaatgacctgcgcaggttggagatagagctcatgggtgagaagggcagcataatccatgaatgaggcatcggacgagatgtgcgtgacgagctttccattggtatgcaccattctggcttctccggacagccgaacggactttcttgagacgaccgagatgaccgctgctcggagcatgaacctgaaagcgaatggagatgtaagccggtgtgtgagtctatcagaaggcttggtctttgttctgagaactgtgtcagatgctgaaggttcacctacccagtgatcaaccctctctgaagaaacatattcatgaacagactagaaacctgctgcatgaggtagagcgcaaagcttatcccgatcccatagcccacagacttcggtacggacaccgtttctccagtttctcgatgcgagtattcgtacgactcggtgatgtagttcaagatcatccgtgataccaaaggagaagtcgacgttaaggcgatccaacacactccaagcattcccccggtccagaacctgtacatgtgttcatagaaacaaatcacaccaagatcaacacagccataataaggagctcaacaactccgaaagtctgacacgtacctccacatcactgttctgtgtattgccagcagcaaattttgatcatagatctttccatcctcctcgattttctccggatgcgtccgctctttctcgtcatcgtcatctgtcttcttcctcttgctagtctttccagtcttacccaacttgacttgttttcctgtaagctcgtcttccacatccacgccttctccagactccacatcctttaactccattcctgtaggcttcttgtcagtcacgtcccgtttagtggcagggccagttgacgagggtcgtagatgttggggtcgtcgactcggaggaacacgtccatagaagt

SEQ ID NO: 2355 - DNA, 739 bp, Xanthophyllomyces dendrorhous
tttctcgagctctatagccagtcgagttgctttgaactcgtcggtgagctccctgttgggaaacaaatgaagaaaagagtggccagtgagcatcactcgatcgagttctcaagacatacatcgtcatgtcagcagacgacttcgaacgactgaaacacgctgcctcaccagaaatcatcaatctcgaactataccccaggtcatagagcaatcagtcagacagagcagtcttccatggttatgcaactcaacaagggactcacaggtctcgaaacaccgacctattgagagaagcaagatcacgtcatccagtcagtataccccacgtatatgacaagccataacaagcgatgacaagccatgagaacctgacggagacctactcgtagtaaaggagtcaaccatgagaacagaacccaagaaaagaagttgacatggttctgagggatctctttcccttctgcgaaccctgccggtcgaggtttgatcttgaaaccaagaaagctctgttgggcgacttcggaaatttcgcctctctcggctttgtccgaagttccctgggtcgcactcttgccaggcgacatgatcgatagaaaattgagcagacagagaagcaagcagacgtctatggatctgtttcagtgaagtcgggtctaactgacaaagctgaatcgaaagaccaccgggaatgatgagtgttggttgccacaacgaagaacaagaccgatcagatacgtag

SEQ ID NO: 2356 - DNA, 676 bp, Xanthophyllomyces dendrorhous
  misc_feature (197)..(206): n is a, c, g, or t
gagacagatcacaaaagccttgtaggagtttcactgagatagaaggataaaaatggacttttcgttctggcacgcgttcgaagccacgtcctcattgatacctcaaaaacgcatacataccacccagctgtctcagtgaggacggatcgtgaaaccagggaaatagaggaaaacgagttagaaagcctatagctttnnnnnnnnnncgaaataaaatgaaacaaaatgaagagacagatcacaaaagccttgtaggagtttcactgagatagaaggataaaaatggacttttcgttctggcacgcgttcgaagccacgtcctcattgatacctcaaaaacgcatacataccacccagctgtctcagtgaggacggatcgtgaaaccagggaaatagaggaaaacgagttagaaagcctatagctttgcggagagagaccctgggaacactgcgcagaaagaaacggagggtgttgcctgatagaaagggggattaacaaattacagataatagaatgtcaagactgctgaacacccaacatccaacaagcgatctctcgcaagctgcgcttgttccatgcgagcgccgaccttcacaacaagatcgtatagtatagtggttagtacttccgcttgtggttcttcaaccgaaacgtcaagtcgcggacgacgggtgt

SEQ ID NO: 2357 - DNA, 548 bp, Xanthophyllomyces dendrorhous
gttagaaagcctatagctttgcggagagagaccctgggaacactgcgcagaaagaaacggagggtgttgcctgatagaaagggggattaacaaattacagataatagaatgtcaagactgctgaacacccaacatccaacaagcgatctctcgcaagctgccgttgttgcatgcaagcgccgaccttcacaacaagatcgtatagtatagtggttagtacttccgcttgtggttcttcaaccgaaacgcaaagtcgcggacgacgggtgttcaattcaccctacggtcagattttttggtgtcctgttcttgcgccctttcgtttctgcttttcttgctcaacatattcactccatccgagcagtgttcacaggcagacactgaggcaaaaaagtgtatgaccacacatctgtgcccggacacatagggagacgccgaacgacacgaagacatagtgactcagtggcacggtgatacagaagcacaaagctactgaaagatatcgatacaaggatagaaggatacagagatacacacacacacacaca

SEQ ID NO: 2358 - DNA, 1271 bp, Xanthophyllomyces dendrorhous
cacacacacacacacactcacacacacacacacacatgtagacgccgtccacctcgactggcgacatggccgggcggacgacaaacgctcgctgtgatctggatgagagtgtccacagacagtcaagctgtctgactcaggccgtccgacgcaggctcatcaggctgatggatcgagataggcatcgaaagcctcccgagtgagcacgacaccccctatggagacggccagacacatcctgtcagccatggccggtatgcagaggagcttacacaagagtctcgaggcagcaggcactcacagtgttgcagcgtctgcctcaggatgggtgcgatctcgggatcatcccatgcatcgtcatgttgggagtgggatgcggctgtcgacaaggccaggtgttgtatgagtaccaagaacagacatgtcaagttgtggaacaaaccagacgaccagcagaccggtggatcagcgtgagaggagatggatatcagacaagtaggtcgtgttggtctacctaccttttctcaccagactcgtcttgaaccggcctctggggcctgcgcacccattccatcggcctatctgacgcacgtcatcggcggtccgacgtcctaggaagaaacggcagtaccactaagatgttcagcgaggcaaccatcggggtcatcagcatgtactaaaggcaaaacgcgatgtactggaagaaagacgcgatgcacatcgggagcagttgggctcacctgaaaccagccacgagggtcttgaggtcggatccatctgttatagacgtgacatgacatggcatagcatgacaaggcaaaactcagctcaccttccgacaacgaacacaaagaaagcaggaggactgacccttgcttttcccagtcttctattgactgtgatgctttcacgccgtacttgtttacttctggacggtatgtttgcgaacaaagaagctggtcagctgtcacaacaagtgagccgtccggtcgaatcagttgaaatcaggacgaatcagatcgggtcacatcatcagatcgcaaatataaacacacgtcagatcacatactatacacactgccatatctatgatgcttgctttctcaccatcgaggccttcataccattcgtccggaagcgagtcgtagtccgccggtacggttcgccgaaggacggatgagtagaactctctttgtagaatagaggaaagcttgagacagacatcgaccaaagcacggtagtctgagtagtacagaacttacctccagtaa

SEQ ID NO: 2359 - DNA, 315 bp, Xanthophyllomyces dendrorhous
ccacccggatcactcctcccagtagaccaggccgtcagaaagagaacgagaccacccaagacacaccttgaactggaagttcttgagaacgttggccgctccgacagcagactcgtacctcgatccggccttgaggacaagggtgagcgaagcggtggacgagccgttctggacggaggcgagcttgaccttgggagaaagctcagagacggtcgcgatggaccttcgtccgagggaggacgcgaccttggcggaaaccgatctagactgggcaaacatggagagattgagagaggaggatgagaggatgaatga

SEQ ID NO: 2360 - DNA, 661 bp, Xanthophyllomyces dendrorhous
ctctcccacatccttcgcccttcgtgcagcgtcacacttcccagcccaaacgcaagcaccgtaccaaagtcccggagactcaacgcctgcgtctggaagaccccctgcaggaaaggcagatagatcaacccgagctgggcaaggaacgagatcgagcatgtcaagaagagcatcttgttctggacaagtcggcagctcaggcccctgttctggatagcagatgccaggtcaaggaacacaaacgtcgtgaacgtctggagagacagtccgtcgagcacaagatccggatggggtgtgtcagtagataggatcatgatgcacactcagatacactgtcccgccaaccagaccacaaactgaccatagtctgatcccgtcgagatagtcgcccgtcctgggtttcctgaaggaacatgtacagcgtcccgaccacgatgatcgccgccgagaagaacaccctggcaaacagtcgcttgctcagaatcggcgcgttccgaggtcgaggaggtcgcttcatgatcgccgggtccaccgggtcgacgcccagagcctgggccggaggacctagagccagccagccaacaacacagacaccaagacccagcggtaagcagtccgtcagcgctggaagaacaggtgcacgaacaaatgcaagaataga

SEQ ID NO: 2361 - DNA, 715 bp, Xanthophyllomyces dendrorhous
cctgaccgggcatcacccgggcatactcaggaatgctcgggcggggctagatagcttgaactcacgctgggaagatcggatcatccttgtcggaactgctcgaacctctatcaagcctttaaagtctcttctcatcagtgtccatcgttcttcatgtttccttttcctcatctcccatctttgtctcctctctctcttgcaagaccgacgacacttcatcaccaggtaagtgctcaccgttcctcggccgtctgagagtcctctattttgcatcacgtcagtccagtgactgagcccatctttcaggaaactcaacggcaaacatgtccatagccatcagatctcttgcccgactgactcgaccctccgatctccgcacaatccttgctagaacgatgagcaccgaactgaagaaacctcttgagctctactcggcgagcacaccgaacggccagaaggccactgtgttcttggaggaactgaagcagatctacccagctttcgactatcatgtgaacgagatcgatatccagaagaatgaacagaaggaggagtggttcctgaagatcaaccccaacgggcggatccccgctttggtcgatcctaacaggggggaccatgctgtgtgggagtccgccgccatactgctgtatctagagaagcagtaagtccggcagacacaccttctttcctcttgtttctctttctttctctt

SEQ ID NO: 2362 - DNA, 3043 bp, Xanthophyllomyces dendrorhous
tgtctccttcgcgctctcaagtgcagacctgacgcatgtttctttttgtatcttctttcgcctatagctatgacccagaccacaagttctcattcggcgactcggctgatgaggataacttcagaagtgagatcctccagtggatgttgtacgttcttccttctgtctctcgctttgctgggcgcagatggaggagaaagtgagagacatcctgatcactcgggatctcatcactccgtctcgctttctcgaacagtttcgtccacggagggatcggaccgatgcaaggccaggcggttttcttctcgaaatatgcgcccgagcagatcccatatgtgtgtatctctctatgttctctctacggagtttcagcctgtcgagtatagtaggtgttgacgcactgatctctcgaaacaggccatcaagaggtaccaagatgagaccaaacgactgtactcggtgctcgataccaggctccggaacagagactatctggtcggtccgggaagaggtaagtactcgatcgcagacgcaaacgcgcttccctgggtgttttggtcaccgttcgcggggatcgatcatgtggagattccgacgggagtgaaggcatggctggacaggaacctggagagagagccgacgatgagggggctcaaggtcgggctgaacacgtcctcagagtgagtttttttgtgcctagccttccaggggttcatctttctgtgtccttgttcgtgtgatgcgtgtgtgacgaacatatatggacgaatgtgtggacgaggatctaacttctgtcttcacttccggcttcgacctgactgttcgcatggggcattgacagtatgatcgaacagatcaagaagtatggggcgcttcctccgagcacgaagtgaacgatttgactatttggtagattttgcggcctggtgttactttgtgacattggtcgatgattgcccttcggtccaactgtaggatgtgaggggactgtatagaatcagagggtatattatgagttttctggtatacatattggactgtcttgtctcagaggttatcttgacagacaacttacctcgtggctttttccgtcagtgcgtttttagcttgacaactcatgtctttcttctcatctcttccgagttcattccctcaccttggcttccaatcattgcctgttgtccttcaacatatatccccgcacccaatattttctttgctattctcctcttttctctttcttttctcatctctaaccatgttaccttattgttgacaaacccccgctctttgatctccagtaacaagtcatgacactctgagagaaaaggcgctatgtgcgtgtagtcactgaagaggcaaaggtacatcaatcatgaacgtcatgaatgccgctagtaataaagacaactgtgtgagagacattcaagacagggactattgcccacaggagagagaatagtagaaagattcgagaggcggatgctagcttatagaaggacgtttgtagatacaagaaaaaaaacggtggtggcggccgaaagagtagaatacacaagagtgttcgacggatcttattacagcgtgatatgattgaaagggacttgagctatcaacagtacatcgcgccacacacagtcatggcagccgtagccaaactgttgtctttgaacacgattctaccctcacatccctcgccaaggcagcaattcgagcgtccacatagacagggcgcacgctgcatttctttccagtgctaatgtggtgtcatccgacccagaatacacaatagtcaacacaatagaagaggagagggcaaataaagagtaggactaacgaaatcgtgagggtaacattctgaacccataccccaaccagccaacggatgatgtggagctcctaccttggtacatccccattgtccgaggctgtgcgaagtgcggtgataaaagagatctggatcatagtccttgcttgtcctacgaaacagtcgcggagagaagaggatgagacgcgaacaaagtgagcgctttgggtcgttgaacgaagcgagagaaaaggagaaaagaaggacatggaagattcgtacctgttcgatgaaagcttgtcgacggattttttagcccaggccttctccgctgctttggtgtgttgaattctatattccagcaataaaccaagacagtcaaaagaagaatgtcaaaaaaacgacttggtctatcttgttttgtactatgcactcattgagaatatatgaaacacagagatcccaacctgttttgttcccgactttctcgattcgcgatacatgccttgtttgctaccaaccatatggagttatgcgtcgaggcttgggtggcatccctatactcctcgtccaccgatttgacagattcagacggcgccgacggcttttctcgactccagaaatgggttgaccgaggtgcctcctatccaattgtgagccaaaggcaaagcatcccatttccagtcagaccctgaatactttggatggtgtagaacagaaggacacaacagtgttgtcttgaaaagatctaagtttacgaacaaggacggcagtggaacttcaatgatcaagaaagcaactgtaagttcaaatgtgaccacccgaagcgatcggctgacaatgcactcactaaagttcgttgtatcgacctgagatagcattgccgaatgatcgatcagtctttctctccacttgttatcttgactgtacatgtatagaggaagtgcttactctcccaggcctcagccgtgccaatgaaggcctcttctagtgaagcttcatccaccttgtccgggtgattaagaaagttggtcaacagtcgagaagtgtcatctctgtaagactcgatcttcaactggtgggcatgccagatcaagtcgatgtcgagcgcttgattcaatgatattgacacagatgagaatgttattccagacatggcaagaaaaattcatggaaggaaccaaagtagcgtacttgggcagtgaagaacactcgtgtctcgagaaaccaaatcca

SEQ ID NO: 2363 - DNA, 325 bp, Xanthophyllomyces dendrorhous
ttgtctctgtgcttgctcaactttctcgtccaccactttccatataagccttctcagcttcccatctcctttcttcacctcaggcatcaccagaaccccattctgatgtacaaaaccttctgttacattctgcacttcaacaaaatgcttctaggctgactcatctgctggtccatagagtcatcgtgtgcttggcttggacatcagtctgaaacccatattttaccagcgtcatcatatcacgcccaagaccggttcgttttgttcgttttgttcgttttgttctagcattctccgtttcttgtcatattccgtcagcgttgtt

SEQ ID NO: 2364 - DNA, 741 bp, Xanthophyllomyces dendrorhous; identical to SEQ ID NO: 2081

SEQ ID NO: 2365 - DNA, 652 bp, Xanthophyllomyces dendrorhous; identical to SEQ ID NO: 2082

SEQ ID NO: 2366 - DNA, 1182 bp, Xanthophyllomyces dendrorhous
ccctactcaccataagcctcgaacagatcggccacgacagaatgggtcggccgactcaagtcccgctgggagccgtgcgcccgaaggttcttctgtagaccgtaagctaagaagaacgatgcaggcataaaatatgtcatcgtcagtcttgtcattctgacaaccacacttcgtccgcccgggatggacagtagagccagaccctgttgtctttcacccaccattcgagatgtatgccaacgtcggcacattcatcaccagagactgcagacaaggcgataacgtagtatagatgacccatcgatcagttcgctgcggccgtctcgtcatcgacacattcatcttgccaggtcacgtacatgcttgagcagctgttgagatcaaacccggttgtgacaagccaggcaagtccagaaagtcagccagagagcgaaaagacatgggataaacagtataggatatgaaacaaccagagacagaacagacgacaagagctcgacaggaagaagaaaagatcaggaaagagagacgcagaacaaagagaaaggcagaaaagagagaaaggcagagaaaagaactggaagagaaacagaaagaaggcagagaaaacacagactgaccgtcatggcccctgctctcaagtgagggtagtggtcccatatcattatcgtgatcgctgtcgaaagaatgccatcccccaggaactcaagacgctcgtagtccgtcccgctgtactccggctcatcctccaccggccgtttcggatatccatagaacgaggtatgtgtccgggcggtgtcgaacaaagccggcgagcacgtaggtagacgcggtaggctctcggccgagatcgatcgcagagcatccataaacggcttcttctgcgtcagctccaggctcgtcaggttcagcaccaaaggcatctcgcagaaagaccggatcggagacttgctcggaaggataaaatggccgcagactgggcgagagcaggaagagaatgagtcgggtgtgagggcgtagatcgatctgtatgagccgtggcggcagaatgactgatgacgctgggagcacagatagaaactcggccatgtggacagaagatatcggaagcgtgatctaatgataaacgagacactagcgatctattcccccatctgagtgagtattggtctgagtattggt

SEQ ID NO: 2367 - DNA, 58002 bp, Xanthophyllomyces dendrorhous
tctaagaccctaaccctaaaatgagacaatcatcaaggggcttctataacctttctacaagtttgtgaaacttccttcttggactgtggcttgcttaaacccagacgactggagtgggtgcctcttacagcctttgacttatatcacctaagcgactgatgcgcagattgttgcctgcaaaaccaaggcaacggatgtcagtgtagcggacatatcgtttagttcccttttatttgtggcctgtaatcagtggcggaaacgcccactgatcgaccaaccgaaaacactaagttcacaccgcctgatgatgtaagcttctggatcaaaaggtgtgaaatcttaatccgaaacgcaagttccggtggatggaaagacaaatgattccccatgttttcctcgtcctcgccgtcttcctaacttgtctctcattgttttttttgtctattgtccaagggacaaccatctccactacttctatccctgcttcttttctctcttgtcaaactgacagctatcatgtctggtcatcacatacgccgtggcgcgatgacctacgtttcctgggttcttgtcaccgtgttcaccatccagatcttcttcttcgcctttgccaagccttcagaaaagatcaagtcgttcatcttctctgattcctattcctcttcctcctcctcttcctcctcttcctcctcctcttcctcctcttcctccccaagctcttcccacagcccaactgtgaagcagagactacaaacaaaccaaaaatcctcgtcatcggttcaggccatcccaccctggatcgacaaaatccttgtgccggactcggagtcaagcctggagcgcgttaatgatgggacatgtagaattggggattatgagtgggaagagtgcggagtgaatgaccggttctgcgcaacttacgggtaagtgcccggtgctctttcttttcgtttctctttatccatttttggttgacatctgttgactgagctctataaattaatttctttcgaacactgacgcctctcctcttgttcgtctctatatcgttcgagtacaatagatacgatgccattggcgcgtcgcaaatctacaaaggccgaaccagacgactccgacgggtcttgcgtaaggctgctcagggcaagccgatcactatgggtatcatgggagggtgcgggccatcgttgattctccttccccaagcttgtcctgcgactcaaaccctgtccttggtctttctacctctcctgtccttgtttctgttatagatccgtctcaacaggtcaagctttaaacgagaaatcacacagaaattataaatgtttgttcaattcggttccgttcttgttcactctgcggcgtgcataactgactggataccttcttgttatttctccttttttttgcttttttctcttggttctggctttcattgttatggatagaccaaattgctgagtggtgggagtacgcgtttcctcattcaaacttgacctttgttgatggcgccgttcgtggttcgttatcgccccgtctcttccaggtcctcgtctcgccttcatccgactaaccggatcatatggctgcatacttacaatgcacaacattccaacagctcaaggaagctctttcttttcgatttgctatggagcttacattccagttgatgtcgatattgtcttcatcgagtctgccatcaacgatgaatagtatgtcctgttcatctctcgttccacgacccactgaacaatttttctggataccaataatagaagaatagaataacctgacgtcgtctgactgtgattggtgtatttttctatccttgttctcctaacagcttagaaaagtatgcggtatatatggaaaatatgatgcgaggactcatgagcctccccaatcaaccagctatcatgctgcttcagacattcggtttggcatttggcaaaatcgccaccggtggtgcattccacatcgatgttgcagcttactacgatcacccagtcctgtcgtaaatccttgttttatatctcttacttcacaaagaaatctcatgcttagtgtgctctttcttccctcttctgtggatctctatcacgtcatttctgtgaagtgctcgtcagataatcctacctcgaatcttagatgatccaacagtagccagagactattttggaacgactgagagcgggggcattgatttccggcatatcaacgtaggggggcatactgttttggcaggtatgtttcctcctctatcatttttgtccactcctacggattatctttgctgatcttgtgtctgaacctcaaaagatatcacgattcagcttcttagttcagagctttgtaaagttcagtatgaacagttccttcacggcgtccagcctgaaccacccctactcgacccaccaacggatattcctaaggtccatctcctctgtttgactttgttcgcatctgcttgagtcgatatcaaggctgacgcaagaattgtatcatattctttcaatgccgaaaaatactcgtaatgtagcaacggctgatggatccctatgaccctgagaagatggctcctgtttatgcccctacttgcaattcgacgacttcgaaacttcgcccaattattccttcgaaatctacggcttggacgacggatattatcaatggaaagacttttttggcaggacatcgccctggagagaaggtcacattcaagatcgatctgataaccaaagggtccgtgatattttctcttctcgttttcattcactctcactttgttctgactgtcgttttgattgggatcgggcgaccgcgcagaactatacaaatcagctacttccgttcctcgacctacaatctcggtatcgccaaatgctatatcgaatcttttggtcctgaatcagccatcacattagatggattttgggatcagaatattagtattggtgatttagccacaattagagagaacgttccagcaggggagcacgagatcgtttgttcagtccaggaaaatacgaacagtccattgggcggaaagaaagtgttgattgtgtccatccaatctttctaaacctcttgtcgagtcagctatcttgtcctcgtcttttcctcgcatatatttcgtcatataaacatcatttgggcatccctcattctctcatctcattgtatagtcattcttgatagatacaaatgaaggaggaactggagctactcattgtgtaatctctgtcaacattacttcgacatgaggatgaaacgctaagtttaaaatcagcacgcggccgagggcaaatgtgacagcaatataaagttaaatgctaactctcagagtctaaaggctatgtctcgcactctaggccgtcgtccttccagatgagatagatggatggatgaataggagagaacaagatatagggtatcaggactctaattagttcacaagaagcacgaagctcattctcaatctctaattactgggtgagaacagacgagacacaaataacgaagccgacatcagccagatcgaatctcctttgccacgcatcccggccccgctcgctacatcagcggagagagtggagtgaccgattgtcaggatggacatccctgcgatcagctttgcgcggcccatccaaacagatgatctctatcttgaagacaacaactgcatctctctatctgtctgcctctttgtgtaatgattccttcgcctaaacatgactgtcataggacagtgtgccgggtgttcgctgatttccctactctctctgcttgcttccaggcttgccgaaacatgggatgttgatgctgcctcatcgacgtaggcagactggctctatggccgatgggatctcggtggtctgatgtctgatgtctggtgtctgatgtctgatgtctgaggacgtccaagtccagaaggggcatgtgtcgatcaccatcgattgcgatcactttctagtagccatatgtagaaatttcaagcagtcttagtatcattttggtagtaatttgatgtttctccttaatgcagctccctcgaatctccttttgcgcaaagttccgaggcttctctccgaagagctataggctttatagctcgtcctcctctgttttcctggtttcacaatccatcttcactgagacagctgggtggtatgtatatgattgtaggaaagcagtttggggaagcagtgaggacatgactaggaacaagtgccagagcatgatgtccgtttttcctgttggatgtaacaaaaagctgcggagggccagacttgtttagtgatatgtcgaaataattattcaactgtcgtaacgggtgaagtggccgagtggtctaaggcgctgtgttcaggttcgtaagaactggtatcgcagtcattcgtggcgcgagttcgaatctcgtcttcatcaatttttttttccgactgatagatatagtatgtcgaggacacctttttatgtatcttgaaccttatgcttgccattctttgctttgaggttgatcgaaataaacgttgcgacgatagaatctacatgagttcgtcaggtaatctttaagagtctaagtgcgaacaagtatattccatatccattgtccgcaataagatgatgatcagctactagaaaagacacttatcatagtaatataaataagaagcgcgaaagaataggatttttaagtgcccttggtaacatgcgagtcggactccgaggccgatcattggagtcacactctattcaacatatttcgtccctttcccttttttcacctttcgcttcttaccatttctgtctctctttattcccattccagtgttttcatggctcatattctcaagtcctttcgaactcttcctcggaacgttccgtctgctctcagcactcggttcgtctccaaagccgagggaggcaagcccgtttcagactttatgggcgatgtaccggacacatctgtagagatcaattcgcactccatggctcggaacgctgctaatggaagggcagatcatctgcacgactctaccagtgctctggattgtatgttcatcctttcttatcagatgtagctatttcttttcacctgtttctgcctcagtcattctcttgcctgcatcattggagttgttcttctttcccatgctacgtgcatgttcagaagaatttgcaaagtccagatagcgtcccgttactgatgaatcatttctacttctttttcctctgccttgtgtttcacaatcgtcagataagttgcacactcacaaccgacctcctcctctccccgtgttcactagggctcagaagtccgctgaagatcatgtcctcagcatcctctataacacccctcccccttctaccgagccgatcaagaggtattttctctcactctcattttcatgcgacttaatgggtgtgatatttaagatcttcaagtttgacagcctgtcgccgataatttcttaaccatatagacacttcctcaactgtcttgtacaagacgagccaggagttctctctagggtctctggtattctcgctggaagagggttcaacattggtctgtacaatccatatagtctcgggaactttgttgatgtggtttctgacatttcgctgtggtaatcttagactccttggtggtttgcaagactggagtgaaagatctttcaaggatgtgcatcgttcttaagggccaagatggtgtgattgaacaagctcggagacagctggaagatctcgttcgttcggtatctgtagatatcaatttttctgagcaagtcctgataatatttgccgttttttctttttctttcgttgctctccgctaggtcccagtttgggccgtgctggattacacgaacacgccggtcatccagcgagagcttcttttggtcaagatctctacccttgggtcagtctcgcattcatacttctgtataacctcatcctgatgagcctttatactaacaaaatgacttactaaaccataatccgcaccctcattctgatgtcgctaccattcttttccatatacagacccgagtatttcgattctcagctatctgccggcccatcgttccatcctagctccgaggttacacctttgcccacccaagggggtgaagagacccctgcgcagtcccaggaagcatacgcacacgatacccatgcgcacaacccaacgccggcagctcactcgatgctcaaccaatctgaggcgctcatcaggcagtctcagcatttggcggcaatccaggcgcttgctacccagtttggtggtaaggtcgtcgacgtaagttccgccagtgccatcatcgaactcagcggaaagacggagaggatcgaagccttcttgggtctcgtgaagccctggggaattttggaagccgctcgatcaggtctgtatcttgcgtcttttgtcctgaaacgctgcatctggcttccatatagtatactgactgctgctccgaattcaatcatctacctctattcgacaccaggtgccatggtcatgccgcgaactcctcttccaaaggaggagggtgaggaagagttccgagacgagtctgttgccatggatgcttctctccttccccctggttaaacagcaggacgagctctgtatcttagataagagatagaaagaaaggatgcttataaacggccttgcgctcagttgttgtcgatgttattttctctgttcctgtctatcgttttgtataaagtgttgttaggatatgtgtcctattaaaaagattcttctctttgtttcgcgatgtacttgaccgtcacaaacctggttccgacaacactcgcaaacagaagcctcggtaggatgaatacaccgaagctgagccactggccgtaagtctagcctgagaagcgttcatatgaaaaggacgcctgtgtaactgctgatgacgtaacggaagctaggccgggcttacacattcccgccgttagggttaaccgtctcggctccatctctgtgctctagtgtgtcatcgccggctgattcacatcgttttggactgaattgttaaaaccctgctctcttgtttctcttgtttctctctcattctcattcttcttctctttttctcttccattcacctatctcttctgccatccccgaggcagctcgtcgttgttctcaatctcttgccttctttcagtaaacacgtacctatcaatccacactgtcatagatttttcggcttcaaatggttttcggctcatcctctagacggtcgtccttggctacatctgagtacgctcatgccgagaacgaaccgccttcacccgccctatccagatcatcctcgaacgcttcaaacttgtccagatggtcccgcaagacgacaaattcaaaggttggctccagcacgggaacaccaacgatgttgtccgatgttgcagccgacaatgtccatcgtgacccctgggccggacactcgggccatctcagttctgctcaggatgccaaacttcaggcctttaaagaagcgctggctgccaagggaatctacaatgagtcaggagagcacgagttagctggaggaaagggtaagggaaagatcgaggacgtcagtttgttgtgagtcgacctcagctcgttatgctcggctatcttgcgcggtccttcttgagatcgggtatatatcaatgacggtgacaatcagcccctacgaacgatcatcacatcaactccaatatattctcatttttttctgacgaatcctctttcacattttgtactaatcgtcatatgcttgtcttttctctccaggcgattccttcgagcgagaaagtttgacgtccagggggctgttaagcagtatgaggaatacatcgcttggcggcaagataaacacatcgatggtattttcgcctcttttcttcttcttcttctccttcatctttcctttgtaagtgcctggaattcattagcccaactcatcttgttttatatctcacttgtacagagaagtatgcagaatacgatattgaagagttcgaacgactacgggcggtttatcctatgtggacaggtagaagagataccgttcgtcccctacccctggcaagtcaagacaagccacgtagctgtactgatgcatgtggttatggccttcttttatcgttgacgctacacagcgcggaatgcctatctatgtctacaagatctcgtccttaacgacagcgaagctcaaccagctgattcccaacgacgaggcttcatcatcgtccatcgctatcgtcacttttgcgctcattcgattcctacttccgttctgttcgaccctgcctagacagaacgaggaggttcctatcgcgggaactagttccatcgttgatgtcggggatgtagggctgagtaggttctggggtttacgtagccatttacaagtcgcctcggtcagtcaatctaaggtcatatatagcaatccgtgccatcaaaattgacattatatcgtttctttgtgatgaactttgtagcaagtcgctagcgcaaatttcccagagaccgttagtcctcatcgatcgaaagatatttgagcactggcaagttaaatcataaacttttcaccttccgtcttgatgcaacagatcgatcgagtcttcgtagttggcgcaccgtcctttttccctacagtattcaattgggctaagaaatggtaagactcttcgattcatctttcatctcctgtcaacttactgatctataacaatgactgcatcttgtccaggtttgatcaaggaactgttgacaagatccatattcttggaaccagtcctttgaatgagctccttcgctggatgccccgatcatctatcccaacggagtatggaggagatcgtaagttttcgttttccattcctttctttagaacgtgtacgctaactgtgtcggatctggatttgtaacgtaaacaaagtggggtggacttacggagattcacctgttctagatgaagaagcctcccaagcctttggagtaaagggatgggtccgaggtcctatcgcctggaatagcaatggtctcgtccaccttggcacagtcaatggccaacctcgccaacaggagtcatcttctagtccctctcgggcgcagccacaacagtcggtgctggataaaggtgccatgctgtctgctgagccagtcacatatgccgatggacctacaccgaagccaacccatgccaagcttccttcgggtgcccctccggttgatttgcaaaattcatctaaatcgaactctgattttggatcgatctttggtaactcacccgtcccctctaccaacgatcaggagccagttatggcagctcacaacacgcctcaatccccatcaaacgctatgcacaataccaacgtccatccccgtttgcccaacggaacaaacccggatgcggatccagttcctaaggcatcgacctcgtatgtccctcacacccatcagcctgtcgtgggcggcgcagaacagcgagagaggagagaaagcgaggggccgattggagagggaaacattaatcacaaagcaaagcaagcgcaggatgcgatcaaggcaggatggattcctggaagcggagtaacggaggaagatttcttaaactctttcaagcaggtagttgtctaagcgtatgagtaatctagattggacatgtgtatcatatcatccttctttctggttccttctaattaaatttaaactccaatcccttttgtttgtttgtcgacgctttccaaccttgttgtcttttccgttgttacattgtggttctccttataatattcgttattatctttatgtcggcctatcatcaaacacgagctctcagggaaaaaatcaagaccgcaagaggtgtacacaattcaaatctcatcatcgtcagcttgcacagagttcgtcaaccagatctgcgaagcaattatatgttgcatctggttgcggcgaggcttttttctcatctccttccctgtactttccagttttgactttgttgaagtgttttggaaacaagtttgaccagtataaagacgatcccagtcagtgcatagtacatcgaaaataagttatcaatacggagtgtatactcacctagatatctcttcaaaccgagatctagtgctccctctccgagatcgttgaacacatcgtctccaacgatacctacgttcggccagtcctccctcttgagcccttcgtcttgaagggaatcaagagtcagcttgaagaagcttgaagagggcttccctacaatttcgggcgtgacagaagcagctgaagctaatgctcggacgaaaggtccaggtccgagagagagcgcatcagtatcctgaatgtaatttgcttggtgctgttcatgctcaaccggaagatgcccaatagagacatcagtaattctgacagaatacacgcaataaggagagtcggacacgtacggtcgctattaaggaacgaggggtggtcttggccaaaggagtggttccttgagaaacgggctctcgagcgactactcatttgcgcaacatgcatgagacaggatcatatcagggaatctctcatgattcgcagatgtgggggatacgtacgaatcctaaaagccacattcaggtctttgtaattcaacttatccggggctaatcctattactacagagtcacagtcctcgggttgaatatgggcgagatgaccaaagtcttccaaagacgaaggagagagcagcaaatacggcctgttgccagacaaaggaaccggcaagtctatcaacagtgagtccaatgtagaagtagggcaccattgagaagacacaaggaaatggaatatggaacgatattgtagtacagacttgaggttcctctgctcgaccaaagttcgacaagcgttcaggctagtaaacaactcatgctccttgacatcaagctcaagcttttcgagtcgagagagaaggctggaagaggattctttagacgtattcgagcttgagattgatatgaaaaaaatcagattgttatgtaaagtcatcacttgaggcaagaaggatgatgctatcacacgctccctgctttatctacatactcaccaaaaccgaatgggaatcttggctgagcgtagcttctggatagcctcagctgcacgaggtgttggcttatcagcgatatggagagtcccagagagatctatcaagagcgctgagagttttccggtagtctgcatgttagttccgatggatgaagatgacgatagtatatgaatgtagatcactatcaggaagggatgaaatcgcgaagaaacgtgattatgcaactttcacccggttaacttcgatctccatctcatcgaccgtcacaacactcgtgctctgctctcagcattctttccaatcatgtgggaaagaacacttcaagaccttatcagagtgagttcgtatgtacaaagcgatcgtccgtgcaaccattgttctaaatgtactcttccttgtttgggtcacatcccgtagggcataagagcaaactcttctaaaccgcaagcccagtttgatgttttcctccaagaagctatcgaagagatccggaaggagctcaaaggcggagatatggagctcaaagccaaagcagtcctcaagatggtttatgttggtcgactccctctgtattggaccaagactttcatcttaaagcgaccctaactcctgaaacttcttcttggttggcgacagttgatgatgctctatccggtcacccctcccccatcatttccatttcatgtagtagaggtcatgtcttcttcaaagtatgccatcaaggaagttggatatctagctgccgagggagcgtttcctgaaggtaccgaagagattgtgctgactgtgaacggactgaagaaagtacgtgagacgcagtctctaggcccattcatcgaaatcgaacagaacgcttaccaggtcttgcttttaccacaggatctcctatcgccccatgccgctttacctcaacttgcactccacgggctggctactcttctcaacccgacattggctcgtgatgtgtcccatgatatctcttcgctactcacccattctaaacctcaagttcgcaaacgggccgtactatgtctctacaaggtattcgaaatgtatccggactctcttcaggacaattttcaacgtctcagagatcgactgtcggacgaagaccagagtgtagttagcgctaccgtgaatgtattgactgagcttgctagaaagaatgcgaagaattatcttcctctggctccggagttgtttgaggtgctttccaagagcgaaaacaactggatgttgattaaagtggttaagttggtgagtcgttgcccgtttacctgtctatcattgaaactttatgagtttcgacctagaactaactcagaactaactccttccattgaagttcgcgcttttgacacctcacgagcctcgtttggttcgcaaacttcttccacccttgacaaatcttatcaccaccacatctgccatctccttgctatatgaatgtgtgttgacttgcatcactggaggaatgctagatgattccgaggctggtgaagctctagcacgtgtgtgtgttggaaaactgagcggattcttgaaaaataaggatcaaaactgtaagtgattttctgtttaagatacgatgttcatcattaacccagacgtcctttcaacatgtataaagtgaaatacatagcgctcctagctctagtacatatcgttccaactcatccccacttgatagaggattaccaggaaatcattctgagtagtgttgatgacgctgatctcagcatcaggctccgggccttggatcttgtttgcgctatggtttgtggaatttccttgttcgcaaaagagatgatgtaaactcaaagctgatatctcttgacctgtattatgtatcaaaaggctactcgacgaaacgcgcaaccaatcatcgatcagcttctctctgccttgctcccatctaccaaatcaaccccagaccttccttcagcctcatccgccttactctctaatctttcctccacttcgacgggtccttctctacaaccctcatcgcaaactaatcttctcatgccttcttaccgcttggagctcacgaaccgaattcttctcgttgggtccaaggacacatattcttccattcctgacttttcatggtacctctcggttctcatagaccttggatatatctctcgagtggatgtagggaaggaaatccgaaggcagctagtagatattgtaggtagagtgagagactctagaaggaaagctgtcgagctgttggaaggggttctatccgacccaaaattcttgaaaggtgcaggtgatggtctagagagcggattccacgaaggaggcgaagcaggctgggaagaaatcgtggcggcaggcgcttggatatgcggagagtataatgagtaagtctctacaaccagtcgaacagttactgacgaatacacgctgaaccggtgtgtcttgttcggttcagatacctgagctctcctcctcagctatgcctggttctcctctcccctcttattgcccgtctgtcacctgaaaccatatcagtttgcatccatgcatctgccaagatctttgcatcttgggcagcagagaaggcagaaatgtgggacgtgagcgaaagtagcacagatctcaaacaagtcaaagagattgtaacgaaattggtgaatggtttgaataggttcaaacaatcagaagaggccgaagttcaggaaagagtgcgtatgttctacatggcttgtttacttatccacaccatgagctaaccttcactcctcacaattttcgatgcattatcttctctcaactttttgaagactgtcaatatcataaatctgtttgcgttcgtccaagccaatctagacagctacgaaccacctgcatccgtgacgtcgattcagtcatccatcgcgcccgaagaagaaggctttacggcccacgattcttctttggttccgacactctcatctccggccaatgcccctatcactcctgcctaccctaaatctctccttcttctttcgccccttttcactgcctacgctcttcctcctgtctcgacaagagctcaaagttcaatcattcctccagctggactcgacctagacactccgttatacgaaagggtaccggaaagcactgtggaacacagcagtgacgatgaaggggacgacgacagtcacctcgacattggaaaacccagaaacttgttgtcagaaggcagatctttgagtgatacaggaagatttagaacggaggaggaggaaaaactgaggagagttgtagccgctaccgtatctactggtcgaaagaagaaagtgaagggaaagagtaagctgatcggagagaaagatgagtcaaaggaagaacgaaaaaaagtatgtgttgttgtcgtcttcattcacgttgctacgttgtaacagtcatcgattgaaactgatataaagtattaatcatgttctacactcgcagcgcaaagcagctcgattggctcgccagggtactgactcgtatcgtcttaaagagaatcatgattctgatgatatagactctatccctgttgtcaagttagatctaggagatgtttccagtgagtgctctttcgaagtcatttcttatactcctggatgcctttgctcaaaaaacatattcgccccaaccagaaccgacaaccggaaggaagaagcctgagcgtccagtttcgccaccagtcccagaaatcgatcgagatggagagatgcccgaaggattcgagccaacatctacgtcttcttccttggctttatccgcgctgccggtcaagataagcgagagggatgaatctgtacagaaggacagcctgaaagacgtcgtcttgaatctggactcctctgaagcatcttcgtcagctctgccaaaagtcaagacaaggggaggagcatatgaggaatacgtcgaaggagacaaagacttgcccaatgttaaatctatagcgacagttgatcaggatgttcagaaacagcccgttcctctatctgggccagcagttgaagtggttaaggtggtcaagaagaagaaggctaaacaagatggaacggttagtactctcttatcgataccaaaggcctatcagacttgtctactggtctaaacaatgttctgttgtcatgggaacactcaggcaacgccttcattacaagatagcagtcagcttctggcttcttcgccagcagaacctggattgaaaaagtcgtcgaaaccaaagaagaagaagtcttcgtcggccgtttgaactcatgagttgtgatatctacacgctatcactagtgatgatgttctgattgtatgaaacgaattcaataattggacgagatgcgagaaccctaaagacgatagattgataagatgagaaagaatagacaaaccgtcgactacaagatcgaaattttcatagcaacattattaccatctcgctgacgtccgaatgattatcgatacagaagagatcttgagtgctactcttcaatgggtccagtcaagctctgcctatgcctttcctcttgtcttggtgttcctcggctacttattcactcgacgttaccttgttagacctgtagcatcctttgacgtgcagttcccaccggtgagaattctctattgcgcccatattccatgtttcttctaacccgtactcgagtacgggtgagaatctgatatagttctctatttaaaacttcgtacgattcgcgatttacctaaacactttgagataggagtcagatccatcttggaagggtaccaggatcgccaaccccagcttacaatcgcatctatcggatcccactctgcatccagaagaagtattttcgacttgtgatcaggctacaaaatatgttacctgcttcgatccttctactaactatcatttggccagtgagttcatacaccttgatctttaccatcaaaagcacttttccatatggttccccgagactgatgtcttcttcaatcgacagccatctcatcagacacatctgcttctatcgatgctaaagttagagctgcagacaatgctcagaaagcttgggcgcagactacgttggatgacaggagagtcgttatgagaagtcttcttgcttggttagtggacgagaagaacatggagagaattgtcagagttggagttcgtgacacgggaaagacctgtacgtgctttgaatatgctatcactccagttcatctgcttcttcgtcctgtgaattaattcgtgaatgaatacggaataacatgatgaacgcatataattcttcccgatgtagtactggacgctgctttcggagagatcttgactacgtgctcaaagctcgaggtatgttcagttttgatgaaagcttatcagggatatatgtgaaagcttccaccgaactgatggcctacacaaagtaaactttagtggatgatcaagcatggcgaaacgtatatcaaacccgaacaacgacctggaaacatgcttttgatgcacaaagtatcacgagtatactacgagcctcttggaaccgttgctgcttgtgtttcctggaactatcgtacgcgtttcgatgaccaactcgtctgtctttgttctagaaaacagcaaaacgagcttaccgatccattcatttatccatcagcgttccataatgctttgtctcctatcatttcttctctattcactggtgagtccgtacagatttgaggaagtcgctcgttcgaagagctgatcgacttgtcaacatcttagggaattctgtgataataaagtgctcggagcaggttgcttggtcttcgacattttatatcaacagtgttaagaagtgcttagaagcttgtggacattctccagacctcgtccaggtttgtatcaagaatggacatttgaactttgctgtctttgtatttgactgattgggactgtgttctcctattttgtatgctagcttgtcgtctgttacccagaagaggccagcgccctgacagagcatgcgcttatccggcatataacttgtgagtatttgacttatgctcgtgtccacatgtttaggatactgagaaggaacctgttgaaaatcagtcatcggtagcgagcaagttggccggatagtaagtagatagctcgcgcatccttcctcaagaatcttcatcatcaaaggttaataaatatcgttttctccgagttcttctaggtcgcttcatcagcagccaaaaacttgactccctgtatcatggaactaggtggaaaagaccctgcgatccttcttccctcggccgatgtttcgttcttttcttcaaccttccttcggtctgtattccaaggctctggccagggatgtattgcatcagaaagattcatcgtccatcggtctcttctaccaaaattaatacccgatatggagagaaggatccaggcgttagtacagggcagctcattaggcgacaacagtgaatcagcgaccgttgactttgggagcatgatctctgatgcccggttcgatcagctggagcggatgattagagaggctgtagaagacggagcaaaactgctcatcggagggaagaggtcggaaggcttgagcggtaacgggttcttccagcctacgctgcttgtcgatgttaagcctggtatggctgtggccaaggaagaaggtgagtgctaatctagcttctccgcatctctctgtctgaccaatcttgatttctatagtgtttgcgccgatcatgacaatcatcccgtacgatgatgtggccgaggcggttgaaatagctaattcatctagatacgggtttgttcagtggttttgtctgattttttctacgtttcgtcctgatgtctctatttcctttcccactatctctaaatggaatttagtctcggagcatctgtttatggtcgatcgaaacggatggcgagggatgtagctcgacagcttgagtgtggaatggtcgcactaaatgattttgggacgttttatatcaaccaggttagtttgtcccttttcttgtcaatttatcttggaccatgaagctgacagtttactatgatcttcatttggtctatagtcccaaccgtttgggggctgcaaggcatcgggctacggtcgattcggcggacctgaaggactccgaggattatgtaacatcaaggccgtcgttcgtaatcaatcttatatgtctgttccaagtagagttccctcaacatggtcaaactcatgttttgttgtcgctgtcattcttttcccgttgtacctagatcgaggataggtttttcgggattatccagacgcctatccctggtcctgtcggtgagtttctttgtatctatcgacgttttttttcgtcttgcgctacgcgcttttgtgttctgcttcctgcttcgtttatgtatactgaacgaggctttgactattatcaatctttggcgccgaaagactacccggccaattctgtcaagagctggacgtttgtgagtggacttgtccggctgttctacgcgccttcttggagaggacttttgggtggtgtgcgagatattattcgagggagcatctagttagaaccaaaaacaaggtatttgagaggaaaaaaaaaacaaaaagggagaagaaggaaagacagagaaaaggttttgtaaggatcaatcagtttgaagagatcagacaatagccgctcagatgaaatggatatacgcgtgctatttgagaaaaacaaaactacagggaagcgagtgcgagagcagcatcagcagcaggatctgcgatgtgtgtgcatccataagcaaattcgatccctacgagatacaagatagatcagagagtgggtctgtccaggtcagaaaggagaatacatgagaaggcaaatgagcacattgcacataccatgatcagcctttagagattctagaacgagctgtctatatgtttcctgaccaaccagacttccgcctagacagaggatggactgattcgggtctataccgttcggaaacggtctgatcaaacgggcaatatctgtgcagagtcgagggtgttcatacgaacacagtgagcgttgaaagcgccgagtgtaccaagaaaaaagagggagaagagtattaccatgagcaaaatgaccggcggcaagcttgacggccgagagcgccaggtctgatgacttctttatcccaaactctggtcggggaatggcatgtttgaggactagacgggcagctgttcaggtacaagagattcgagactccgtttagtcaggtgattgcgtgtccttcgttcagccaagaacggttaaatcgacacttaacgcacactctgcgattttaaacttgacagcagtacctgccgaaccggatgataaagtttgatactggataagcaagaggaaaatagaaattgaggttgaatctcagtgtcgacagttggttgagacagcaaagagacacagcctacgaaccactatgcctggaaagaggtacaggtgattgcgtcaacgactcaatgtaagaatgagtcaaagaaaagggagacctaccaagcaggctatcgacgctacggacattccagtagatcagaagttcgtcaatgaattcttgttcggtatgtaagctttcgttgagcgtgccagcgtcgaacgcgtagaggactgagcgcaaggccatcttgccgacatagaaggctggggttgtttgtggtgtgtgtctctgtgtgagcatcaggtctaatctgagacagacgattgaaacgaagagacctcaccgcttccttcgtcccccaagagccaaccgaggccacctcttctggccacctggctaatggtcttttctcggccgggatatctgtcgacggtgactgagagacagacggtgcctgttcctgacacggcgagcacgcccgagattgcgtccgagatgaccaacggagaagacagcaggagcgcgtcgttggtgatcctaaccgagcatgcgcccgagctgttcgcagagacgcatcatcagaagacgtctggctgatgtgaatgcgcagacggaaacgagactcacaaatacggtcccagatgggcggatagtaactctacatctggtgcgttgtccactccagaaaccttcatatggagataaaaaggaatgagcgtatcgacggatggcggaagcaacagaacaaagagaataaacgtactccgatccagactttgtgaaatagtgatcgaacttgagcctcattgaaatctgaaggtagtagggatgatggaagtgatcgaatggcccgtatagttgcctgtttgattctagcaacacagacttctaggccctcctgaaatgagcaggtgaagggaaatacaaaaggggatgtgagataaggccacgtgcagaggcatagacacggtgaaccccaaagggcaaagagtgcaacgaacggtggccagattgctgccgagagcgatcccttgagagacgaccagtggcagacagtctgtctgtctttctctcaggctgattaccgccctggactttgttccgccgccgtcgacggccagacagaggagcgccgtcatgacgtctatgttgtatgctgaatgttgtatgttgtatgctgcgtgtgatttatgtctgcgtctgcgtctgcgtctatgcctgtgcctgtgggtccaagtgcctgtacatctggtgacgtggtaggttacgggtgtgatctcgtctgtatggctttggttgtgccctggaccatcggtcggcggtgaccgatgatcaacacgtgatctacccgatccctccaggctgtacacaaagacgccatcgtcgcgttccttaatctattcggaaaaaaaagacggtccgtgcgcgtgaagcacgcaaaaagaggaggtctgtgcttctttatattagtggcaatcccattcggtttttttttttcgttctcttctcgtctctccttcatctctgatccctcagtgtctctattccgagtgtgtctttgagtgtcgtcgtccttgttccctctctctgtccctctccctctctcgttcctgtttctcttcggaccatctctctccttcgagcaatcgttatcggaatccctctttcctcaaagaaccgcgcgtaatcttcaatcaccttacccaaccaggtattttggaattcagagcgaacgttgaacgcatacataaacacatatctatatttcttcaagttaactaaataaaaaagtaagagcttcctgctcttcagcttacgttcatatccatatcggtttctcataatcttttcctccttcacttccaagcagaacatgacatcgactgctccctcaccctcttcgaccgtccacccgagcccatcggcgactccccggcctgctcctcctgccgccgtcatcggatcgaccacgaccccgttgacagagatcactcaccaggccgccgctcactctgctatcttcgctctgttcgatactggaaagcttgctgggttcccacttcccaagccgacgacccatgccaaggcaaccgcggtggtgtgggagcttcagtcccgactcggagccggaaactctctcgtcggctacctcaatgctgccccggtcaacgctgttgtcactgcgcttctctccggatcgaccctaccactgcttatcccctcgctcgggcacctcggcaagaacccggccgatggcaaacgactcatcatccacctctccttgggtgtcccctctgaggctgatgcgttggcgaagccttctaactcgctcgcccagattgaaaagtggttgagcattctgccatccgacttcacggtcgtcttttccggctcgccagaggaaatcattcagaacactgcagagattcataacggtctcctcggtaacgtccttcacgtcttcgatggcgtctttgccagcagggagaccgtccgaactctccctgccacaaagttggccgagccgatcgagccttttgtctacaccggctcgccgtccgcccaaaaggtcgtcgtctctaccgcatcctacgtctcgaccgtgcttgcctctggtgaccttcccgcctcggtcggccgtcttcagatcaatctgttgaaccagaccgagcctgcgcttattcaggcagttctccctccctcagtcaacgaactcatcgtgtttgaccaggtcgaatctgcatcggagggaacccccttccttaaggaagccgttctcggcaacctctttggccaggccggttcctctagaaacagagcgctcaaagtcaccggcatcaccgtcgccagcgaagagccctccttcaaaggcttgctcttcgccgccggtctcgtcgctccacccgcgtcttcggctggacccctgacgaagcagaccctcctgttcactagccagcactcgctcctgccgaatgtcttggcaaagaccttccttgaggcctccccagccctgcagacaaaaatctcaaccctgacgtccactgcgcccgctcttgcacagaccaccctgctcgtcacgccctcctccaagcggctccctccgcttacctcggttcccaaagacgatactactgactttgtcctcgtcaactccctcgtcgcactcactcagactaaatcagccctccgatcgcttaagcagaacgcgaccgttctagtatccctccctggatgggacaaggcctcggccgagacgaactttactccggccgacaaggcgcttctcagagcaaagaatgtccggctctttgtccttcccgccccgctcactgcgctcaagttgactaaagaggaggctgaaattcaggaggtcggcctcgggctcgtcggcttcctccttctttacgctggcataggtgagaacggagtgctacctgatggtctccgagctgttgttgagggagcgttgggagaggacgtcgcccgagacctcattcgaatcggcgaacagaacctgaaggaaagtgtcgtgtcccgatgggagcctgcctccgaggaggagaatgccgctgaagagaagcgagccgagctcattctcgatggccttacgtccttcccagatctcacacctaccggatcgtccggaggacaccccatccaaggaacctggcatattcctgcgcttcacctgctcttcaaggagtcctaccttgctcctccttccaccgatgagatcgtttcccccgagatcaacaagctcactccctctctcgaggagaagacctacctggccacggtgaccgagaacagacggttgactccggacacgtacgaccgaaacgtcttccatctggagctctctactgctggcaccgggctcaagtacgacgttggtgaggccctcggtgtccacggttggaacgatgctgacgaggtccttgagttcctcgaatggttcggtatccacccggacactgtgctctccctgcccttgccatccaacccggccaaggccgaatcaaggacagctttccaattgttccagcagcacattgacatctttggtcgaccgcctaagagcttctacgccggtctggtctcaaagacagacgttcgagaggatgctaggcagctcagattcatcagctcgccagaggggggaagcttattcaaaaagttgggcgagtttgagaccgtcacgttctttgacgtcttgaaaaggttcgagtctgtcaagaaaggccttaccttggttgatctgattcatcttatcggagaggtctgtcttatctgtctcattttgacttgttcctcttgcatcttgggaagttctcccagactgatcagttggctcttaccaccatttgccttccaacaatttagatcaaacctcgacactactctatttcgtccgctcagaagttcgtcggtgattccgtccatctgttggttgtgacggtcgagtgggactcttctctcggcaagccccgattcggacaatgcacccggtacctttctgggctgaagatcggacaaaaggtcacggtctctatcaagccctccgtgatgaagcttcctcctctcgacagccagccggtcatcatggccggtctcggtacgggtgctgcccccttccgtgctttcatccagcaccgagcttggcaaaagtctcagggaatcgaggtcggaccactgatctactacttcggagccagatactcttcccaagagtatctctacggagaagagatcgaggcctatctggccggtggcttactgacccatgctgggttggccttctctagagacaccaaggcgaaggtgtacattcagcacaagatgggagaagacggcgagctcttgtcatctatcctgaccgccaaggaagagaaggacaaggcctacttctacctgtgtggaccgacctggcccgtgccagacgtgtacgaggccttggtcagcagtttgactgtcaacaagggttacggcagagatcaggccgaggcggccgtggaggagtggaaggaagaggagcgatatgttctcgaggtctactaagtgtgaatgctgtgtttgttctcgtcctgtcacattcctttggatgtatgatcttttctcttgctcgaagtgtgttgtattcgattccctcgtcaatgtgctctgttttctctttgtccgtaatcacaagattatgtaaggatttttaattttgaaaaacgaactggcgaaatcgaaaaggaagagtataacaacaaagagccattagagaagggaaaaaaaagataatctagatgaagaagcctctatcaatacatccgcaaggcatgggaagaactccgtttccggttccctctgaacgtcgtccccttcttccgacgccactgtttccaaccccaagagagcccgaggatggccaactggaggatcagaaagccgagaagccactttgtcaaactactcgaggtactctcgtcctcaaccggcggcagtatgggtgagtttttgatcaattgcacaggcggcgaagaagacgaagaagaggacagaggggtcgaggaaattgaacgagcggcagacaagatccgttgaaggagagaagagtgcttcgactgtgatgttatcagaattgaaacgatcgccacattcgtatgtgaggttgggagaattggatccagagcaaacatcagcaagacttggaagaaaagattgtgttaggaggcacaaagaaaggaacaggggtacaaacctcgtatgtgaagaaccgggcgttatatcctatcaagtcttccttgaatccttcgaatgtggtgcgtagttgcctcctttcggactctagattggccaatcgagtagaaagatccatcagggcggcgctgtggagagggaaaataaatcagcctgtatgaatagggagaagaagaagaagactttagagaggaagacgtacgcgaatggacctttgttcttctcttttcctatccgtttcttctctgccttcgaaggcttggtgtcgatcaaatcacctaattgttcttccagcccttgaacctctttcaggagcgccatttggtaagtcacgattgcctcggccacaccttcgtcgacttcacctgtcgataccgggggagtgtcctcggctgcttcgagtgcggcttgagctcgggcggctatcgccaagggtgagtcccggagtcgtctaggccggccatcttctcccggtccaacgacgggttcgatgcagatgactgctcgttcgttcgcgagaaaggaaaggaaaagaggtcaagatgccaaactaactaggatcctgaagaacaagaacgagacggaagaagggccgagaacagtttcaagaaagaaggacttactatgctgcacttctccattctcgaactcttcctgaaacacaccttccgaacttcctttgttaatgacgaaccctctcggatccgcgttttttggtgcctctgggcagtgagcgcccatgacgccgacgaacctagaacccttctggacgatgttgtccagcacggtgaagttcgtacaagatgcaacgacaatgccgtacccgaggtgggtgcccgagattgtattgccgataacggaaccgtggtgaacaagggactctgtatcatccgaccaagtcgccggaccgatattgagcgctactttgagataggctgaatgggcaaagatgtgattttgtgttacaagcacagaagtgtagtctccttcccacggagggacgtcgactaagttgataccttattttgagtagcgtcacgaagttgtgtcagcgatgatcaaagagaccagagagtcatctaaagacgtttcccacaggaatggattcgagagacaaacctcctagaacggttcgggttcgggagtagatgacattattctgaacagtgctcccacggctcccgaagatgacgattgcgccatccgttgtgtcgtagacgacctgtctccgttcagaaaatcatgtcctcataagtttgatccgacttggattgggatatacggtcctcgctcaagggatggagaaggtaagacgtacgttatcttcgactacactatccatacaggccagactgataccatcactcctcggattaccgaacggtggtgacttttcggataacccatcgtacgctggatcccattcctctccacaaggtccaatctcgttcccttgaatatgtgctcttgaacaagatttccagtcaccttcacggagatgaagcgcagaccaacctctgtttcaatcatgattataatgggtaggtgatgatgagcatcagatcatagagatctcagaggtaaagatcagaaagaaagaacacttgcctaggttcatagagtttacagttgacgacttgttggtcatttgcgtttcccaattcaacgagtgccccgcccatcggaactcgtaataataacgggcggtttccgtcgatgattaatgatgagacggatacaccgttgcaatctatacagtctcctctagatgatttgagagtaaacaagatataataatcaaccaacgcacatctgaccagtatcgtgagatgcggaactagagaagaaaaggacgatcgaaacacgaactggatggccatgctttgttcgggtccttcgacgatgagcatagctctattagcatcttttggatacccttcggtatataatgcctggtcttctgccgtgaagatgataggagatttcaatctaaatagagaccgttgacaaagcgcgactttggtccctttgccacctgcattaaggtagttgagcgttgttagaagatgaagaagaagaagcaacaacagggtcaatacgggccgatagacgcgatacatcccaaccgttcgctcggtttcatcgagagagggagagagggaagagaggtatgtgacagaccatggtatagaatccggttgatctcggcttcgtctccagtagaaatacattctgaagagggcaagcttgcattcgaaactgatgcgattaagaggaaatgaagtagaaatagtcggacggagagaaagtgtgaagatttcatatttgggcgtgctcagtggcttcggcacgcatagaacggggtatatgttggacacaaggaggggatatactgagaacgatatgacagtctgtaaggcgtcacctttcaagacgtatcgtatctggtctgttgatggttgatacgaagggatggtacggtgacgatgatggatacaagaacggagggtaagtcaaaaagtcgaagattgcaaatcgggttggacgcgtcgcgtattctctccgtcctcagagccgcttctcgttctgtcctcgtccattctccttcttcgttttctttcggcttttcgaaagaagagtaagaacgatgaactcaaaaatcgcacgttcatatgtgtgtgtgtgtgactccaatgtgctgatagtgcagacaaatccatataaatagtaggtagatgatgagagattatcatgtaaggtgtaattttttctgtgtttttgtatagtactatttattctaagatcaaaaagcgtagacacaccaagattgatggaaagaattaaaaatgattaaggccctcatatcaaaagagagatgtcgaagagcacagagaaaagaatagaaggatgtacatatacgagcaaagcatcgtatcaggctcaagccttcaaatcgcttccgtctccaccacaacagaacgagaacaagcctttcttcttttgctgctgcttcttaagcgctgccttctcgtccgttcccggtgtggtcttgataacagcggcctggacaggaccatctccggaggtaaccgtggtggttccctttggatcggaagtcgacggtttgtgctcgttcacgtccgagatcgtcatcggcttgacgtcgtcgacaggatttccgttcgcgccatcacccgaggtggccagtgtagtgccttcggggtggggctcggaaccgaggctgctcgtgtgagggtgagaatcgatggcggcagtggcaggcgtagcctcggtgacaacggtcgcggaagaagccagggcactatcgatcacaggaacaggcgagctctccacagcagcaaccggctcggaggtcgtcaccgtagatggtacatcgtaacctgtcagacataacgagattgtaagaacatgacgcgttaggttcacagagcagaccaggaagccgatttgatggataatatgatattgatattaccctcgacagccaaagtcttctctgcagcgggagttccgatgggagctccgaggttcaaagcggcaagatcgctgctcgcgacgacaggtccgttgacgtcggggtgagaattgttgacactggggtgagagttatgggcatcggcaagaacggcctctctaatgaacagagacacaaacattggtttgagtctttgatcagcttggtttgaagagagtagcgaaacaaatgacctacgtggcgtgctttcccttcaagtaagtgccaatgagcttttttttatcgtacagaaacagtcgtacatatgatagatcccgtcgagaggtcaacatctaccccgtcttactgtctgctagaaagaagaaagcaggcttacgttggcaaagaaaactccttggtactgtgcaaccaacttgtcctcctccagaacaggaagctgcccctgtcctccgacaacggaacctgcaccccaggcagaaccgccaacgaccttgtcagtcaagctaagctcaggtcggacgaagccgatggggacgtagatgattccgtctatatagataaacgtaagaagaacttggcgcgtgagtcccactatgatgtcaagtctgatgggtgaagatggacaaacggtgagcgaagaaagggagagtagtgagggcagtagtctcttgccctccgtgttgagatccctgagagaaggtagaattgtgaaaggaatgagtgcgtcagattagaacaagaagcgatcaagaaagtatttgaccacggaagtgagaggagccaccaaagcacttacagaggaggtcactacaccagcgaactttccgacaagagcgcctgaggcccagagaccacccgtagcatcaaagaaggcagatacttgggcaggagctcgaccctgttttgttatttgcacatcaagagtgtattcgtggatgcgaacaaatcaattatccgtcttcctcggagaagataggaagcagcaaagcgacatacgtaacgggttccaaagcaaaagatgaagccgtccaaagtagtaagatcctggggcgcgatttcaggccagtcaggcttggggccggcgtctatgaatgacagaacatcagaaataacggaggacgtgtaagcggtggattgtttaactaaggcagcgtagctaataacatagatatcggaggcggtttcgttaaggaagaagatgaagagacacgcgtacacatctttgtcagaacctctgcgggaagggtctccttgatctggtacagcaccgcctccgctccggtcttctcgataccggccacgacagattcagccagcgtgttttggtgaccccaggtagagtatctgttatgaatacacatgagccagtcgcgtcatgacaaacacacggacttgagcgatcagtaagcgcgttcatcatcataatctcggatggatgggaaagagccaaagaggcgggcagccgctcgtatagatgaatggatggatggatggctacatacacaattactagatataagttatgccaaagttgttttatccgcagagaagagaaacagatcgaagaacacgctgtctagttagtacatgaatgccatccgacggaagatataagaaggatggctctcttcacctccgattcgagcgcgagtggtagacatgatgtttttcgttttgatctttgtttgtgagagatgcgagagcggcttggtaccagcagagtactgtatggatggagtaaaggatggatagaatacgtttaactggatggatgttgactgaacaaaaacaagaaggaagtaaaattgaaaattgagacgatgaaaaatgtttcacttcgtcacctcatatgttttttcccacgctcttgctctctttcgttctaaagatgcttcatagaataacatagacgccacagatgacatgtaatgattacacatggtatgaggataggaacagaaacgtagaacgaaggctctgatgactatagaggtagggaacacaagacaaagtcgacgctaccttccagctcaaagcggtaagtgattaaagaagaggaaagttacaaacagagagaattcacttgattgccttccttatagcctttacatgacaacgtcctcctgagagcgatcccgctcctcatcttcttcatctttgccgttatcttcctcttcttctccttcgtcatcgctatcgtcgtcgctatcaccatctccggcttcctcatcactcgacccgaaagagagctgaataaagtcatcctggtcgatcaacgcattcggattcgaagcatccctcgatgagttctctaaactacgagagcccaacgatctatccccgttcactgtcgctctggcatctacgtagatcgccggatgatcctgctcaatcgatttaccgccagacgtttcctcttcggtagagttcgctgtcttcgcctctgtcgccgccaatggtggccgaccggcctcggcgcgaaggacatgcttcagtccacactttccgtccatcttacacgttcctttttctgagaactccttgcattctagcgcatgtctctccgaacaggtcaaccctcggtcacaccatccgtatttgataaagtctccacagatcggagccgtgtccgagactcgaatatgaggatacaaacagctttcgccattccggcaagatccagtcgtctggaagtgaacgcaggacggcgtgttgtttgccgttggctggtgagagagcggacacgatgtggcagagtggttgcagtttcctcgaaggaatcgaggacatatcgatagtttttcaggatcgtgaatgtaagggcacgagagtgcgttgttacagcgacctatacgaacaggactttgttcagcaagttccttacctcttcggcattgtgatcgggtcaaacagaaaagatgaatcgtagtgcaagacaaaccagtctttgaaaagtatcgacacaacgaagtcttctttttcttctttttaggtagagaacccgtgctccgtttattattcctagagatgccatgatagcagcagaggtggggacggcgatgacgacgatgataatgagaagaatagatcaagacgtgtcgtgtacgacaaaggtgaagatgaacaaacgaacctagcagtttgaacgccattgagcaccaacgtcatctggcctaatctttcccgcttcgcatcaagctccgctctcgaaggtgccacaccgatgtatgcatttgaggagccagtcgtgggcctagatagcctagctttctcactgtcagtcattacaaagaaaacgggacaaaggccgaatgtttttgaggtcccattttgtcaaacaagcgggagaaaggaaccatatacatatgaatcactcacctcttttggaaagtagcaggattcataagcgacatgtgtctatctgtcttcttgacccactgagacgacgtgggatcgacagatgaactctcagcagcaccagtcatatcagcaccagtactgcttaaggccaccaccgttgtctttgtcgacgacgacgatcctgacgacgagcccacagagctaggatcaacagacgaaacgcgtcctgccgatgaaggattcgtcagtacgagtttcttatttctagatcccccgcctgcctgtcttggcacggtagttcgataaggatgtggtttagtagacacataagctgggggaggattaggtcgacctgctggtgtggctttgtggttgtatatagcctctgttgaatacaagggacataagtgcagagaacgaacgatgcaagaagatcagtggtgggaaaaggggactattggagggagcagtacggggagatacacacatactgtcgagtttagcaatctctgctaacagagctgaatcggatgacatgctatgatgaatttggacgctatcctctgtgagtttattcgagcaataaagaaggatgtatgttagaggaacgacaacggtggcagtttgcagtcgtagtcgtctgtaaagaagacaatggtgttcggtatataacagaacacacacatatatgcatattccgatcccgatatcctatggtatccttgcttgcttccattgattacatgtgtgaataggtttatggatagatggtttaagatctaatgtaggtggttctttgctcgttcctatgcttgctaatgttgtttgactctgtactttctcattttgctctgacaaatctcttgacaaacgacaccatcctcctcatctacagtgactatgtctcagtgattgcttgtgtacatgtcttcgaacgttttttgtgtcgtcatagaagagtcccataaagcatacagattgaaccgagacacatggtctgcggtacatcgatccaacccgaccagtccgtttttgagaaagccgtttacttcttcttggcgggctgtagaagagaaaaaaaacaaagagaaatcccgatatcatcagattccagtctgctgccgagacaaccgatagaaaaagaaggaaaagaggacaaacatctccggccttggtcttcttgactcctcgaaccttcttggacctgttcttcctctcctttcggagctttcgggaagccttctcgaccttggtggcgagtccagactaaagagaaaaagatgacaaccaccaagcattcaggtcagtcgaagctcgatctaatacctagggcagaacgataaaaaaagaaggaagaaaaacttactcggacgagcctgtgtcggggctcgaacttcttctgggaagcctcgtcatcgtagatcaaagcgaacccggtagatcgtcctcctccgaagacggtcttgaagccgaagcagacgactcgggcagcctcggacttgtacatggcggcgagcttctcagagagctcagctcgggacacgttggcccgtccggggtggagaacgtcgaggacgaactgctttcgggcgagcagtcggttggtgatgaactttcgagttcggagggtgatgggggaatccgactggaggtgagagcaacaatgtacacagccgagatgggaaagaacagacaaaccaaacgttagtcttacacgttcgacgacgatctggcagcacataaaacggttgtctcgcccaggataacccttcctctgagagctgatctgtgtgcccaaaactctatccgatcgcccgattgcccaccgtatgctgatcgacttttccaaactttccccacgcccatatatgtacgcccacttatcacagatcgacccaaacccctctgcactttacacttctcgctttccagcttcttttctttctccgtgctctctctctcgcactctcttctgactgatgcttctcttgatcggaaagtaatcccaggggaagggaaaggagaggaatgtggaaagtaaaactgcgaggtgggaagcttgtttgtggaagggtgctggggtttgtcgaccgactctgtatatctagaattcgaaactaaccatgatgggcgacgacgagttctgtcaagatcaaatgaacggcgagttttgagaacaagaatcaggaagagtagatgttccagaaaacagttgtcgtggttgtggtcgaacgagttgtcaaatggagagaaggggaaaagtttcgccgagggacagaagacacaacggcaagaaatggtcggattcggtcggttcaaaatcaaaagaatctctatcagctctcaaaccaacgacggaaacgtctccttcttcatgagatacgtatatgacccatcaaacatacgaaccaacagacctatggcttcacttgaggatgtgcgaagggactcggaaggctcactctctgccgttgaatttttctccagccgttttttttcatttttcacaagggtgggtttatatatgaatctacctaagatacttagacaaatcaaccgtcctgtttttcgaccttccctcaagattcattcatacaacacgattagacaacggtgcaagtgtagatgaatacacaggggtagagaacagtgatataaatgtatgtatatgaagaagcgaaagaacacggtcatgttctatcaatcactccagaggcatgttctccagttcactctcaagctgttcccaaatccctaggatgtcccgtgcgtgggcaacctcgtgggtagccagttgttggaacgctttggtggcgagagcgtgctcccgtgggtacattaggaatgcaagctcgtaccacattctgtgagagaagcaacagacaagtgagcaaagagaagttcagcgagatgaaccatgcgcgtttgtgctaccaaaaagaaaaagaagatagtccgcacatataccgaataaccccttgtctagcattgtgcccctcgatcgcactctcgtcactctcgatgattcctcttagtcggtcgatctctgcctcgaatccaggcttccgagcttgctcggtctgggtcatctttcctttcgtttgttcgatccgctttcgaagtttgggaactgggtcttgagatagttctaggattggagggagtgaagcacactcgatggcatcagtctaggatcggagcactactcgaagcgaagaaacagagaaacgcacgatcaatccgattgaaaagctcgcggaacgagacaaataggtcgcgttggttcttgagagcctcgagcgtagtcaccgacatctctctagactatttcagttcgattggtacagagaattccttgttaagtatctcgcgaacaagtttgcaggagagagacagaagaaagaacataccctgacatccgctcgaccggctagtagaccccaagcgtcccttcccttggccaagccggttgcgacaccctcacccaataaatcaacctcccccggctcgacgctccatcgctgactgtgctcctcgcccacaggtgtcgccgactctccggtcttccaagagactccagcagcctcggatgcactcgctagagctgatgagaatcgggagagatccgaggcgagcgcttcggctcgacgggcctgtcggtcgtacagtgtcgtcagagtcgaccaggattgaatcttggccggtagatgacgtcgagtgattctatcgaattttgaaaacaagtaaatcagtcatgtctggtccttctttatatcatggtagatcttaaacagcgacccaggcagatgaaatattgagataccaacctaagtttttcttcgagatcgtgtgggatctcgatctcttctcgctcggtaagctttcggcctttgctttcttcgtcaacgttcacttgggttttctacgttatacatatccgattgtgtgagcacggctctatcgagatcgctcagactctttaggaaacataagaaagagggacaactgaccttcctccaagtatccagtttaggttctcgcatgaatacaccaacgagccagtcagaaccaaccgtcggatggttgacaacaaaattgatgtaccttgagagcgccttgcgtctctgctcaaggaatatggagtcggctagaagagaggagagagaggtttaacagatcaagtcggctatttctcggaatacaatgaggaagagagtgatgacatgatagacatacctccaattcgtttgggaggcagattgaagtgcatccggaaaggatactgtcgagtggcggtttccgtgatcaactcagcgctgcgttcaatgaataatattccaagaggaaaggtcttacctttttgatgagacattcttctaaccacagaaaatccgaatatcgccttctgacgacgataccatcaaacgagagttcaaacacattccacttccagaaaaaccctctaccttccttctcggtcgccagccgaacgtcgacttgtttgagcttgtcgaaccagtcagggatggcgaggagacctttacgttgcagagggttctgtcctctaacagagggcgtactgagaaaagaggatggataggttggtccaagagacgatggggaatcgattgtggtcgggattggcatggacgaccatgggtcaagtgaggaaggtgcaggcgtagggtactcttccggagctgggcgatcgaccgggttcgatatcgaagacgtgggctttggagtcggaggagacaaagagagagatagggtaggcggattggaccttcgggactttgcgttagacagagagagggctgttttatacgatcgaaaaggaggtcgttcggacgagaccaatttgaaaggagttcagaaggaattgggaatcggaagacgtggcaagatgagaaagaggtaaagagagacgcgtacgttctttcgcctggactagaccgacgaggacaagtgcgagaaagaactcttgtttagatattcgagacttgttggttgatataagatctgtgatctggtgtttgggtaaagacagacgcttagttgatagatcgatggactagcgggagggaaagaagacagaagactagaggcagactcaacgaagatagacagaccttctcgacatcagctcctctgaggccagcttctcggagaactctgatgaggccagtaactgtgactccttctctgcccttaccttccggatcgatccagtcgagcgcgtcgaaatactcccttccgagtcgagcctcgtcgaccaactcaccttcggcgggttcacccgacggttgaaatgacgtaggatatccgtctgaggatgaagtcaagtgattggagggcaagaacgggggttctgaaggagacggagcagtcgaccatggagacggttccggatcagagtgaaacgccaacgggttccatgtttgatagagaggaccgttcgaaggcgattggccgggtgaaggcaacacaagggatgacgacggacgctgacggggagcgttaaacctggagagaaagttgacagaacatccaaagtcaaccacagtacatctctggttcatccagtgatagtatatacgacacttgcatgttctgattcagagacaaagctatttcttgacgatggggttgaagactacgagatcaccactgttaacgcgaggaacatcgacgagatggaaaggaggtgacggagctgatggaagtgttagggttgaaatcgatgactaagccgttctcagcttagtcatctcccatcgcctccttctatcgtttggtacctccatctcttaccatcaccatcatccatcatccatcatccatccatctctatttcgatacgggctacagaaatgaacgttaatttgtcttgtgagtgatgggtcgagatctgctgcagaaaagtcgaattattctgctgatgaatcgattggatcgcctacttggtgatctagcgcgctcccttctggacgcgtacaaccaagtcgtctcgggcgatcccaacacctcatggaccattttgtttgtttccttttttctgtctatcattcttctacttgtatcaaacttatatgtaaatcatctaataaattacctacagtacctatgatcgagggacaaacgacctaaaagtgcaggatagtggctctggtggtttggaagaagtagccgatgagttcagagacggccggttcgttatccatcacatctattcctttccgttgaagtcgatcaagccaggggtgctgaccaaccgaccgtccctctttatccatctcctcaaacagaatccaatatgcctttgttagagtggtcgaccccaactcggagcttccgaaattcgttcagatcgtacgtctctttcttgagtttttctgatgattgaacgcaagcacagcatctcaattggtacctgacatccgacctgcctcatagaactggtgtggtgatggtgtaccagagggaaagaaggggctgtttcataaccactccaacacggtcgctcggttcttgaaagctgctcacattcagatcaatgctcgaaatgaagtaacttcatctatctttgctagccatctgcacgtattcgtcatcctctacgttaactaactctatctaccttcttcacttccctacacagtccgatgttgatccgagtgtcatcctcaagcggctggctgatgctggaggatctaaatactctattcaagaaaagcaagctcctcctcccaagcccgatagaatcggcgccgtcggaagtagctacgtcccaactggaaagattgacatgaaccagctcaaagcagggtccaagtcctcaggagtctcatctaccatcgttgctgctcctactaaaaccccgtattcgtacacgactcccgcgccagctccaaaaccagcttcgtcggccgctcctgtagctccgccgactaaaaccgtcagtgttagtattaacgacgatgaaacttggggtgaagagccgcctgctgctccggctcctcgatcgaacccttcatcctttgcaccatctgttggggaaggagctaagatctctagtccagcagcaactagcttttacaagcctccgccggccaaagctactccggctgttgcttcagctcctacctcggcgtctgctaaacctgaacaggaggacaagattggtccggttgtaagttctgtgctttgtgctgagtcgaaaagccgttgactgagaacaaactcgcttctttttcttcgcgaatcattttgagaaaccaataatcatagggcacagcatacaccccagtttcgctgcctgcccctaaaaagctcatcaatcgatggggagctccagctcagcaagcttcgtctgaatcttcgtcacctactatccaacgagcctccggtgctaatataggaggcgaaaagaagctcacatggagcgaacgacaagcgatagccaaggctcaggatgcggaggatgagaagaagagtcaagcggcttcggcagggtcaaccttcaagcctgttcagtcgttggccaacagcgctcctccatcgaggtttacaccgcctatccgggcctcgcaaccgagtccgcctaaagagaaggacgacgatggattcgaaaacccagagcctgttcctgcgcctgtctctagggcccttcccccccgaatggtgcctagacctacttctgatgatgacgatgatggaggattcgaagaaccggacccgacacctgcgcctgtgtctgctcctgctcttgctcctcggggccttccccctcgaaccactccggcctcctccttcacacctcccgctcctcccagaaccgccttcattgccacgtctgacgataagcaagatggtgatgatgatgatggattcgaagaccctgatccgacgccagctccttccgcccccgctcgaacaactttccagccacctcgggcaaatcaaccaccagcattcccctccgatgatgaatttgcatcagaggacgaggcagataagacgccggcggtcgttcgacccgctgtaaacgattccaaagaagtggaggaaaccagagagccagaaaaggagaaagaggagaaggaagagccaaagtctgtcttccagagcatcaaagagacactcgtgggcaagtctgagccagagtctgaacctgtgccagcaggtactggaggactcagggcaaaggcattgtttgactatgaggccacagaggacaacgagttaggctttaacgaaggcgacgtcttagttgaggtcgatcaggttgatgagggttggtggagtgccaaagggccggatggtcgagttggcctggtatgttcttttttcaagatatccagaacaaggacggtgtggattgacactgatcttacaaaacttctctattctgtgatcgatagttccctgccaactacgtcgagcttattgaagaagaggagcgtgctgccccagtcaaggctgacgcgccagcagagcgagcagttcctgctcctcctctagctcctgaacccaaatctgagcacccagttgaagatcaggctagacaggtcgctgttgcgctctacgagtgcgtgttctctctttttatcttctgaaggtaacagatgttgttgatcaaactgagttttcaaacctcctctgttgataacacagttatgacgcggctgaagagaatgagatcacgttcaaagagggcgaccggttcgtaatcttttcggctctttctctccatttcggcgcttcaacaagcaatgctaatctagctcctggtcgaatgtatatcagaattacgcacatcgatgcggtgtcggatgattggtggagcggtaccgcaccagacgggaccgaggggctttttccttgtacgttctcaacacctcttgttaataaacttatccggtcgcatgaacaacggcttatgtagggtttccctttgatggtcttgaagccaactatgtggaggtacagcagtgatcctctatttcccatgtgtatctctattcggtccctttcttcctatcttccatcttcgtccctcccaggatgatatctcacttcttttcttattgaatatactttacgtaagaacttggctgtcgtaaatagaaaaggatcgtaacagccatttcttctaaaagctctttatccttgtcataaattgaactgggtgattgaatcatttgctatcaccatgccgtgatcagaaaggacagccttacattgatgatacacacaaaccatcagactaacaagacagttgctcatctatcaacacagacgctgttatgaatacatatatatatatcgtttctcatcaatctaacaaatcgaacttgcccaacacatcatcctcctcatcttcgttctttcttgtacgatcatccgggcgaactcccccatccgacgaaggtgtctttgccatacctctgaaaggagtagacgttcgagactgtgatggtgtagtgaacgtatccgaatcatcaggtgtagctgtcagaccgagatgtccgccacctccgttgttgctgttgttgctattatggttattgttattagtaccgatattgttgccattgctaccgctgctaccaataggaggtaatctgaacgacgacggcggtggagaagcaaactgttcttgtatgaatgccggtagcggactgcgaaccgggttaggcgatctacccatcgaaggacttctaatcattctgtttgagccgatgacggtcgagaccgatgaacctgaaggtgaattaatcgagcctggccctccatttccgccgtgatgactacctacactaccactcgtacctccgccagcggtgcctccaccgaaactaccatagtttggcgctcctgggctcctggctctccccttctcttcgccctcttccgccgcatgcgagccggcgctgccgaacccacctcgcatgagaaccagacctcgtttctctttccctttgcttcgtccgaatgagtaaggttcagtactcggtctaagaggtggcgtggtaggttcttgactagttgatcgggagggcgcgttcaagataggaactgcctgactcggttgagagcgtgggaaagtttcgtttggttctgactgaatcgggtccacctggggtggtgaaggaaggcgagatgagattagaggtgagtgtcgtcggggagagaatgagttaattgtaggtggtgcaatgtgattggggggcatcgaaccaggagacatcggaacgaacagggatgtggccgacatctggcgactagtcggggagctcgagagactgatagatggacctggagacatcgcaccactattactattgttgctgtcactactgttgttattgttaagagtaagagaggtcccggtatagctatcgcccatccgtttaagcatctccgatagctgggactttgtcggcctagcttgagtgagcccaggagcggcggaacttgtgcccgagggcccaaatgtagacgatgaagatgaggaagggtatagagagggcgatcgagaaatgaacgcagatgatccgagtccgaacggagtatttaatgctggccgagaatcaatcagacggacaaaggcggttatttcgtcgtcttcttctattgaggtggcagcagccgagaggtaactgtgctgtgaaagttagatagatgagtgacagtttgttcacaaggcatgaaaaccaagaaagaatcacattagatttcattaggttcgttgactgattgcctggaacgatcgaaagctatgacgtactcctctggccaagctaccactacctgcgcttcctccagtttttacactgccaaccgagcttccggcagtggtcccaaagcttctccctgctcgatgactaaagctactcgaatacttccttccaatccccagccccgccggcttctccgcctgcgatactccggcggtgccagctccagcttttaccatcgtggggctcatcgatagtgcactgcctcctgaaaacctacctactgacgtcgaaggtgcgggggcgaaattactatgggatgatggagagttggccatgccgggcatatagccggtagagctggatgaaggggcagggacagggatcggggacatggatggatgagtgatgtctcgggagagagagctcggctgagagggttggcgctgaaagacagaagatattggagatccgaaagatgaagaggacaatcggagaggaattggagaggaagacaatgcacccgacttgaaaggcgataccgtcgacaggcggcgtgtgttcagtgatgagggtgaagagctcaactgtagagggagaaaaaaactactgtcaaacaacattcagtggataaactgattaagccaataatactgactttctcctcgtggtgaccactccatcttcgttgcttcacaccaataggcatgactccgctctgaccaccggcaaaacctgttctctgcctttccttttcagcctccagctctgtccgactggtagccaagcgggtttgcccgctctctgctccatctgtagttccagtggcaagagaatctatcatcgcccgactagtcatgcttccaaaccgtggtctgcttgaaagcggaccatggccagttgcaaacccaagacttgggcgtgacggaagggagcctggttggaggggcggagtggaagcaggatagtcggatgatctacgggcgagtgcgatcgttggagtaaagtacgcctcgtctatgtcgtccgaggtggaaaacagaaggcgagaggagacggaagcttctttggaatcgagatagaggttgacgttggatcgatactgagcggtaagcgacagagtactaattaagcgtgttgagagaacagacgttgaaggagtagaagcttcagttcagaaatcaacgggctgagatatttgtaggcgacaacatacccgtatacatgtccgacgctaccgaggttccgtgaaggttagaataagaagcaagctgtcagatttagtacgggtcacgttttcacaagtgtatcggtgctcacccgtcaaactcccatgtctccagcgcaccctccctgacaccttctgcttctattcgctcttcaagcccaaggcatccgtcctctaaaggaccactctgtttaggccctgatcgatggtccatcgagaccttgaccccaattctcagtcctgcgcccgatcgaccacttcttagccgtctggctagcctatgaagaggcatcagtcttagaaatgcgtatagcgatcggaacaatgggatcagtcgtttgtaagtggatgagagggcgaccggtgttgtacccccaccggtcatggacgacgatggtggaagcagcgcaatccgccatctctccaaaacgatgtttctcggtctcccgctcttagggcctactcctgttgtcgacgatgcggatattggtggaggaccatggggaacgacgcctcgatggccgtcggaagattcaagcacgagaacctggtcgtccggaacggcagaggtgtcaaggatgaactctacaacgagcgccggaacgttaccaagcttgacgaccgaagaagagacagaagacgagcccggaggaacaagcgaggcagcagagctgctggcagacgaccgtcttgtatgcgatgttgtatcgctttcgaacgagtcgacaagatgggtgacggatagttgacgataagcgtttagctccgctctaaagtgatcttgggtaggggtatcgaggttgaaccacctgtcctgcttggcggtggagaatgagaatgtgctctgtgatgaagaagaagaagacgaagatatccgagcgttgagcagggtctgaagagactttctgaagaactgatgggcgagctggtctggcttgttctgggcgggtagagtagatggtcggttggccatcgagagacgacgctgcagcagaaagacggacctcccagcgggtgaaatcaatgatcaacgaagagagaaacggacgtgggcgtgagtagtcgaaacgaacgagtcacagatcgaagaaagcgaagaatgagcaagcgagtgagatgtggttgatggttgatgatggttgttggtcgttggttgtcgtggaggacaagcacgagagatgggaatcaggaacgatggatggacagatagtgattagggagaggaattcaactattgggcgtattcaaatatgtcggagtacttagatagaagctgtgtctgcaaccgatcgatcctaccactcctctccagagccgtcatccgttggacatgtatacaacattcatcgaacgtccatctctttcactcttgtgtttaatataggaactctcagtcatggtgatggaaaggaaagtacgatcaggtgagagaatatgcgttgggggtttctttgtgtttctgttcttgtcgtcgttttcgcgtctgttctcggatcaaacactcacctatacccaccgccgtcgtttccatagagcacggcgaacaggttcgctctccatctgtctccctcttggctggttgctcagaagctcaatctgaccggcccttctgctgaaatcttaggcatatcaaatacagaaagatgctggaatcagggtaggatctctttcaaataagtactccttgctggctaaccctatactgaaatcgaacacaacatctcatccggatctgacctaaccagtccatgattacttggaccatcggagccactgtcgctacgatcttggcacataatacctggcccttcttccggtatgtccctgtccttgcgcttcacccttttgcgtccctcttcctcttcatgtctcgagacaccttggctgacgtcattcgcccatctcgctcgtctgactcagcaagcagaccctgccattcaaggcgttcctgatatcttcggcgaccatgtctggtttagttatcggcgcagaaggcaaccttcaggagttcgagaagaaccagaagaagacgtacaatatggaacgacgatgggccaaggttgagcttgccaaagaaggccgtatcgcgacagagtatgagatcgccaggtatgtcatcttgactgacttttgtcgcgctttggaatttttctggcctcggctgatctcgaataccctggcttgaaatcctgctgaattcgatacgtcccctcagatggatcgctgaccacccgccctcgtcatacccctcttggtcatccttgggcgaaggcaagccattcgcgtacaactctccctcgacggatcctacatcgtccacatcgactcctgcttctgcttctgttctcgcctctgcgccgactggttcggtgtcttcagtcccggtgtcagacgctagctcaccgagtgccgactcgtcgagccaggccgaacatcctactatggttgtccggatagagggtgtggaggatccattggagttgagcgccgataaataaaacatcctggatggagaacaagacggcttagaccggaaaagaaaaagaaaaagaaaaggaaaaggcagccatcgttatgtatatatgttaatctagtcaggaacgcaagtacccagagcatatagctttaaataaggtaagttgtctaaggtataattaaatatataatcagcacagctttaccaaatttcgtatggcgtccgacgatcaagtctatcaacttgcttcaccttctctgatcgtacccaccttgcctatccccacccactcacatagacactatgcctccagccaacaaacgaaagaggccaacattgccttcgataaagccttcccgggccgctcggtcccaggaggccagttccaaaaaggcaaagcccgaccacgacgacttctcggaagacccatactccaaaaaaaaaaagtttgaaaaacgttcagattggaaagcgaagaaggctcaggctgctgaagagaaagccggccgagggaaaccaggagcaaagaacggaaaggggcctgccgaaaaaccgacgattcatgacccaaggaagaagaatcgaggggctaaaaagtcgaaaacagaggaggagagtgaggactctggatacgaagaggtcggaggcgcaggttcagacggtagcgaagactacgcgttcagcggtggagaaggtaacgggggaggctacagcgactcatccgacgaagacgaagttgatatcaccgccgctctttcgggtacgatgccttccgcgtccaccaagcgaaccacccggccagctctaccctctcaagagtctaggtattctggtagaaagtcctcttcggcacccaaaggaaacgagccagaggtgggcgacggctcagacggagacgatgacttcattgcagaaatgatggggaagagaaatattgaggatgggaaggctgttgttaaagaaaccgtaggaaagaagggagacaatggaaagaacgccaaagaggccagtggaggtggcagtttccaagcaatgggtacgttacttgtccttctttctgttctcagtcttgcgtttctatcgttccctaacgctaacttgtgtactgtgactttcaggcctgctcccgccgctactcaagatgatcttgaaaaaatacaagacaccaacacccatccaaagactctccatcccttccgctcttgctgctcctcctagagacatcgttgccatgtcccgaacgggatccggaaagacattggcttacatcactccgttgattcagagacttcaaggtcgtcactcgtcttctttcggagcaaaggccattgtgctgtgtccttctcgagagttggccgtgcagatcttgaaagttggaaaggaaatggctcgagggttcaagaatggcgggcgtggtggagacgcaggagatgacgacgacgatgacaggagaagctcggagatcagatggggtttggtcgtaggaggagaaggtcttgacgaacagttcgaaatgattgccagtaaccctgatgtgtgagcttactcgtttcccttaattcttttgtagaaaaacctaccaccgctaatgctctacattttcacggatacgatagcatcatcgccactccaggtcgtcttttgcacttggttgtcgagatgaaccttgatctacgatctgtcgagtacatcgtattcgatgaggctgatcggctcttcgagatgggatttgaactccaactacaagagattctccaccgacttcctacaacccgacagacccttcttttctcggctacgctccctaagaatttggtcgagtttgctaaggccggtcttcaaaatccaaaactcatccgattagatgctgagagcaagatctcggacgaccttcagatgaacttcttctctgtcaaacctagtgagaaagaagcggcgttgctctctttgctccgaaacgtaattggagttcctttgagagatctagacgaagaagtttctgagactgaggacgagggagacgaagaacggagccgtcatggaggaaagagagacttcaaaaagaacaagaagggcggaaagttcaacaaagaaaagatccccaagctcatggcccctcatcagaccctggtctttgccgctaccaagcatcacgtcgactacctttctactatgcttaccgctgccggatacgccgtgtcccacatctatggatccctcgaccagactgctcgtaaacaacagatggatcgtttccgacgaggaaagacttcgatcctggtcgtcactgatgtagcagctcgaggtattgatgtccccgtgttggagaatgtggtgaactatgatttccctaccggagccagagtgttcgtccatcgagtcggtcgtaccgctcgagcgggaaggaaaggttgcgcttattcgtttgtcaccaacaccgagcttccgttcttccttgaccttcagctcttcctcggaaagtcgctcgttaatgcccgagcagccatgcatccaggatacgacaggtcaagttcgatgttccttggtactatccctagagacaccctggacgccgacctggaaaatattgccacctcgttgactcaggaagcttcaagtttgcccatcttgaaagaagtcgtccggaaaggtcaggccatgtatgagaggagtaacggaaaggcctctcaggagagttatcgtcgagcaaaggagatgaccaaggatcctagctggggtctagccgggagtaccggtgaggaagcagccattcaccccacgttctcagagagtgccctcgccaatcttgtcaactcttcctccgcatctgcgcctggaataatgtcctcgagtggaacatcctcaactagcaccccaattgttcctaagcagtccgctgcggaggtcgcagctgctcgggctgctctactcgcttctgtcaactctttccgaccgaatgagacgatctttgagattggtcaccgaggaaagaaccaggcatttaagttgatgcaggatcgacgaaagacattaagcaaggtcgtccgaaagactgagatcgcgaaagccgaggaagatgcagagtacggcggggccgctagcgacgcagatagcggggcggacggtgagggtttggagagagcggaggtcgatatggcggatgaggatgacttggaggtgcgtctctatttctttctttgccctctttcttgtaaactgagaatctgatctctgccgtcgtctttcttttctcttctggatgtacagagcgcgttcggaaccaagaagaagaaggcgaagtcggaaggatacaaggaccctgagttctacatgtcacattatcagagcggagcagagcatgataccaaagggttcgtctttttcttcttcgcatctctttttgacaccctttttattaagattgcggtggaggaagagggtgattacttacggccggcccgatatttattcaacatacacttggctaccaactgcagatactctatgcgggacggagcatccttcattgagcaagccaagggcgcaacgatggatctcgccggtgacgatgggattgtctcccgagtccaacgatcttctcaaatcacctgggaccgaaagaagaagaaattcgtcaaaggagacggagttggttccgacaacaagaagatggtcaagacggagtctggtgcccgactacctgccactttcagatctggtcgattcgatgaatggaaggcaaagaacaagacctcacttcctcggattggagaggccgaacctgaaacttcttcttatgggaaccgagcattcaaccaaacgggaagtgacggtcgaaggtttaggcacaacaagttcaccgaggcaaaacctctggacaagacgtctacttcttacgagcgaaagatgcgggttatcgaaggaaagaaacgggcagaggcagaagggaaggaggtcaaatccggaaaggggcgaggtgttggtggacgaggtggaaggggtgctgcagccgtcaagagcgagatcaagagtgttcacgagatcaagaagcagcgagatgctctcgccaaggtacgccctctttactacgttccaatcttcaatgaccgaagctccatgaagttctgtgctcatcttctctatgcgtcggtgtggaacatcatacttgcagcgaaaagagaaaaacgctcgaccatcaaagaaaggcggaaaaggcaaaggaagaggaagaggctagtcgaccaagatccctcacgaaatttggttgcgatagaatgtcttgttttcccgcaaaacttatcagtgctgaagataaggcaaaattccatggagataattacagagacagaaaaggaagaattttatttgataagatcgcgagaataatcattctcagtaccactgagcttttagtttcttccttgcaaccgtaggctatgatattcatcaaaaggaggggtcagtgaacccatgagacctgtcgataagcgaaaagaggaatattaacatacctttgcaacgaaaattccgacggacaagcccaagatggtcagaaccaactgaagcttgttgaatgaatctggcaaaagatcgaatcctccagacggctggacttttgtgagtgccagatccaaggtaccgactgcaagaatctgtgaagtcgactctagaagagtagggatagccaagattcgatcaaccccaagaatctggtacatcataaggaggttgtattgtcaggatatagaagctcgtgatcgaagtgacgaagaacgaagaacttgcatcagagtctttagagagagcctttgagtcatcaagcgggataacagggaagtatggcactaagccctcttcctttttctcgttctctgttggtcttcgagcgtctaggaatctttgcgagatagccatgatctggttcttctcggtgtagactgacagaatcattcccagaaaggcgcgtacacgccagtcagcgagatgcatagggtataacgacggctagagtggatgataaaaatttaccgagtacatcgcgagcggtaattccaaacttggttcgcgagaaggatagagccttgacgcccacaggaagatggtacgtcctcgagatcaaatcgaaatcgtgatcagcagagtaggacgacaactcagagctagatcagatatgaatcatacatccgaattaaaacatctcagctttgtttttggttgccatgaatcaagaaccacgagcgtctacttacctgccaagctttccgcctcgcgccaaattcctctcgtaaagctctacgctgacaatcctgtaaccgggcgtgttgtaagtctccgaaacgctctgcttgaacgagtacaccaaccagttctcattcagaatgatttgaatctctttcgaagtgtcgacattatcatgggcgagtcgctcaaggataactcctcgaacggagtcaacaagatagatggttgcttgtgatttagaaggttgagtggacactacagcgagtaaatgcgggttcaaatctgtatacatcccgttccaacatgcgtaacatactcacactctcagttagcttgtaattcgatgaaataataagtggaaagggtctataaacatacacttgtacagcaactttttgttggcagtcacctttccgtaactggcaacgagagatctcccacccaaactgtcagcaccggcgctaacaacgtgctcgatttgctcgtcttttccaacactcaatctccaggcttccaatgcggcggaagagtcggcgacttctaaaccttgaagtgaaccgttagaggtcactttggtgagatgaatagattcatgtgaaaccgagccagtaggagggaacgtgtgtgcctatgagatttccgatcgagaaaacaagtggaaagcatcaagtttgtgctgatgattatgagaacagatgggtaacgtaccttgaattcattatcgaacacgatcacaggtttggtaccctctatatcggcatcctggctgtcactaatagaatcaagtaaaatcccttgactgaagcctttaaacaactccttgggaccgtttccaactaaagatccatccaagccattgagctcgatcgcataagtggaaaccgactttttggagaagagcaacaaaggtgatatatcacttgtcaatctccagatcacaaggagacaagctatagggaaaaaaagcttaccccatcagaaattcctctgaacacaacacccactttcccagctccacttgcccaaactttcaatacggcccacccaacagcccattcggtactgagccgcttaccccaaacaatacttccgtctatagagtctagtgcaaagaccttcccataaggcgaaccaacgagaatcaactttcgaaagttgaatggatcctgagcgagaagtgacagagcggaggacgaagcggacgaagatgaagagggcaagagcgcaacgggtatctttaagagataagagggcaagtacttctgtttgatttcagcaacgatggtcgatcagtctcgatgcaacggaatgacaagattcacaatcagagaaagcaaacacataccaagctctcatgtaaatgcctagcgacacgctcggtccagccctcttcttcgattcggctcaaaacagaaatgacccctactttttcctccactaaatccaatacactgacgtctcctccgctgagaccttcttccctcaaccctgtggcaagacccgcggagtcaaagaaatggatcgaaccggtctcagtagtgattgctagctcgtttttggaagacttggtgacctgtggtttcatgaaaggagagacatatttgatcaactaagaaggtcagatattcggtagataaggggaagatatgacttacggaagtgatagctccatagagctgttcatcatagacaatcctgaagtgtttgttcttagacaggtcagatgggctagagaatattttaacctgaggataaccacgcacggaacatagaatgaaaaagtcagcgataccggaaatgagaaacgccaggacaagcgaaacatacatacctgaagggtcgactcggaatccaagggcgtaatgtgtatgatttcgccggtctcgtatgtggtcaaggctgaagttttttcagaggaagtctgacccaggttgaaaaggacaaaatgttctcgatcaacttttgaacacacacacatacacacagcatggagcaagcgaggagcacgcgcagatagacatgaaagataattgacgataacttacagtcaagcttgcgatgggaacccctttgaagccacccttagtcgccgtgaggcttatcatgtaccattcatctttgttcgatttcgccatcacagcagcgccaggaacatgtttcaactcgacaaggcactcatccatcttcacccgcccctccgcgccggagacgagatcaaggtagtacagacctccctcatgaacatacaagaggacatgagggagtgcattcacaagagatgaaagggcgatacttgcaggaagggaaaacgttcgagagggctgagagttcgactccaaatccgataacggataagcagttaatttcggaacaacagaagagggctgtatgagaaggtagccagggataagggtgtttggagctcttgaaagaccaaagttgaaggcggtaaaattcccaagcccgaaatatcagtttgcgcttcattcttttctttgcaggattgaagaaaccccaagaatgaagaacatcaaaaaggggacaaacgatcggttgtcatcatccgatacggtccgttcccagacgatgtctccgctatctaacgtcagaccaacgagtcttccggcttgagcaagaatcaactgtttccctacagaaatatctcccacgggctcgttctcgaaacagttgggaactgaagtctcccatctgaccagaccagatgaagccgagaaggagcggatgatcgtttgggtacgcgtggtcgttctaaggatgatgtctgatttttgagagcacggtcagcatcctactcgcctaccagagaaagacaagaagaaaggtattactggaatcagcgacatggtagctttgaatggtctcgactgaggcaagctgatgtctccagtctgtccgacgtaagggggcgaaaggaaagccagtttgtcagtgccacccgtccatatctttgaagcaaagctcacgagaacaaaggagaagtaaagagtgaaagcagaagaacagaatatacactcacaaacatcttctccgtcaagagatacagaagccaacaccccgctctccgtggtgatcgcaagtgcttccaacgaggtcgctgccgacttattcaagggaaagatcaaaggtcggacattgtcaccgtgggtgagtggtttcccgagctgagtacgatgccattggaaaggtatttgatcggccgcaagacacgtggtcgacagcagcgatgccagagagaggaacgagaagaatctcatcctactcgaatgagaaaagggagtgttggtcaaagagcgtgagtgtatgtgtgcgtgtgttctggagatggataggattgatggcaagctgggtgtggttgaaatctgcttatgtaatctgagagtcacgtgttttccctcagaaatgtccactctctatgtctcctactgttcacatacgcacttgttaggcagaaggacacatccggacgatgagaaggagaagctggggtgatgaaaggaagaatctaatctggacaagaattacatgggaaatatatctttttttctttctctctaagccttaacagagaccttgtccgaatctgctccctcctcccaagcgttcacctcgagacttccatcgtgaacgatgacctcgacgagcaccttggcatcctttgaagccttgactccaaccttgacggcggctaggaacgtcttgggagacctgacaaccgaggcgacctcttccggctcttcctcctccgaatcagagtcgtcctcatctcgcgggggaggagcgatggtatcaatcttgatcgactctgcaccttcccagacctcgacgccaacctggttgacaccagcgctgacaggaagggcgacgactcgtcgagcgggcaacggggtgtcggcaggaacgaccacgtggaactcatccgatccgggaaggacgaaaccgatgggctgggaagtcgacgggatctcggatgtcagggcagcaaagaggtcatcctgagagatcgcaccagtgctagaggtcgagagctgggcgaggtggagggcctgaagggcacaaccgatggcgatagcctgggatggatcgagaaccgaggtaatggcggtctcttcggggaagatcaaagagattccagaagccaagccggggagcaacgaagacgatccagcgaggagaacctgaacgagagaaaaagataaaggaaaggagggagcgagaacgcgttgtatgatattagccgatagacaaacaaaggggaagacaaacgctgaaacatacctcatcgacctggaccaaattcttgccgcaaccttcgacaacactcctgatcttctcggcaatctttcggtagacacctccagcaagaccatcgaatcgcaatcggttgatgctcgcgctcaagtccatgccatccttaagagactcgactgcgcaagtggcagctccggtagaagcagagagcgatcgcttggtgtgttcgatagcgaggaggagcttggtctgggctcggagatcagcctggttgacgttggcgccggccggggagataggaagggggagggcaaccttggtcttcttggtgaactctttggcaaagtgggagatgagctatgaagacagcgggccggaggaagggcgtgtgagaattcatactcgaaccaaaagacaagactaccatgaagcactctacaatcacttaccaccttgttgagctctcggccaccaacggtctcatctcgccctccaccgagatgaacgtactgaccctgtcggacggcaaccatctcgacctcaactccagtatctccgacgtcgacaacgacgacgaccttgtcggccttctcctcatcctggccgttaggtgcgaaacctcgttcgagcctctcggcgggaagaccagctcggtaaccgacgaggacagcagcactctcgtcaatgatctggagaacgttgatgccggcagccttggcggcctcggcaagagcctctcgctgaacggaggtgaaggacgaaggggcggcgatgacacaaccgtccttgggggaagttccgaggaaatcggtagcggactggagaagagtcttgagatacagagtagtcacctcggggacagataagacaagctcctggggagtgggctcggcgttggcaggagtggccgtgccggagggcgcgggagtgtttcgggcagacttctttccgacaggggtagcgctaggaggagggacaaggatgtcaaccttgtatccagggatgtcatcttcagtggagatcacgggagcggatgcagtcaaggtctcaggagcagaggaaccaatctgggagaacctgttgggtaacagtgataacaattatgatgaaaggaagggaagaaaaagtaaaagagagttcaggctggagtccacagtgaagagggataaattcggcaaggcgacatacttcttgcccaaaaggtttcggaatccggtgatagtgttctgggagttcttgacaagctggggcttggcaccgtttccaatgtactaaatagaattgaagacgcaagcgaaggacaagagggaagggagtgagttgatcggagggagtgaagttaggtagatggacaggtgtttagagactagtgatggaaacagatgggacgtacgacctgctctccgttgtaagagatggcacaggcaatctgtcgctctccgtcttcgttagcgatacagtcggcgtgtccttcctctgtgaatgtaaaatgatgggtttaaagggggaaagaagagaaaggcgtgagcatgagttatcgacgtggctcaaaagagacgacgtatgtgagaacgtgtataggcgaatagtacgggacaggaaattggaagaaaaaaaggaaactccaagatctgaacttactaccaatgacggcgatggatccaaaggaggaaccaaagttgataccaagaacggcaggagcagtggaggacatgatgagttgtaagaaacaagagtggaggtttgatggaaggagagcagaagagaaggaggaaaagaaaaaaaatgtgagtaaagtaaaataagataaaatatgtttattacgtaagctagacgtggtagtcttccaccaacatatccacccccattagcgatccttgtgatcaggttcgacataggaccgagagagaaggttgttaccggtagctgttcatctgttgtttcatac

SEQ ID NO: 2368 - DNA, 43331 bp, Xanthophyllomyces dendrorhous
agaaagtgcaatgtaagaggaggaaaaacaagggaaggagagcatcagatcatgtcgagttcaatcgcaagacctatcctgaattctgatactgtctgttcaatctcgcctgccaaccgttgtctcttgtaatgtcgaacgaatggtctacactggcttctgaactcatttatatataggtacatattaattgcatcttctctcggtctggaggatgtctatcaacgatgctggtcttctcatgctggtgcgccatccttctagatctccctccaagatgaattcattgtaccctcgacacaatttaatctgattccacaaagccaacggcctcggtgagatccgtttatgttgttagacaagtttattcatctccaacgagcactccatccatcatgaatgtcctcatcgctgctcaagtaggaagcgatgttttggagagaaatatgaaataaccctaaccgagtgtaaacatggttacaacatcggctacagccctggtttcacaaggcctggacctcggtgactgcctgcgtaaccgacttccccgcacgcgcctctcttttttttattcctttcttctgttcctgttcctgttcctgttcctagtgttgtttatcttttctttcttcatctatcaactcgtcccactcacattcgccatacccacactcattcaatctcatacacactcagcatgatcgctcttaccctcgctaccgctctccttgccggctcccagctcgccagtgccatcgccgttcccacttaccctgattcaaccgctgtcgttaagatcggagacgagctcaccactctctggacggccgacaccactggcgaatggaccgacatgactatccaggtaggttctgtatctgttctcctgtgtgatatctcttgacatccctgctgatgtttctctctttgaacccactccagctcatgagtgtgtaattttcctctccttctcttccccggcctctgttgttattttcggcgactgatcgtccacctctctctttttcctctctcttgtcttcagccggatctaatttggccgtaagtcaccaatcctcgtgctcacaaaacgttagctaacagtctgacaatataatcatattggaccttttcaatcattctgtgatgtcctgctctctagatggtcgccctcaccagttcgttcattcgttcatttattcatttatccattcgttcatcgtccaaccgggttaatcaccacatccgcctcacctgctgacgtcccgactcaatcccttctcgttctagccgttggaacaaacattgatgccaccacctctaccaactacaccttcaccattcctgacgtaactcctacctctgccatctacttccttcagtaagctcatatcctctcgtctctccgccgtctgtcatctcggcaatgtccgtggctgatcataataaacataacatccccatttcctcattccagatacactgctaccaacatgaacgcgagtgatactcagtggaccacccgatgggccgtaaatcctcagtttcttttctttttaaaacatcatcagctctccctcaaagtctacgcgacactgacttcttgcttctgactacttcctatctactctctagattgctggtaccgatggctctactaccactcctgaatactcaacccaaccctcgggcgatgctattgcttggggtaaggttctccatgctttaaattattcgtgaagtgcctcaagctgatccatactaagatccatcatgaacaaacacaggtcttggagccctcgtcaacggtaccacctcgaccacttccaactcgaccacctcgacctcctcttctgacgtcttagccacaagctctgcttccgcttcagccgctgcctcgactgcgtccaagtcggcatcttccatggtgtctgttgctgcgtcttcgaccgcatctgctgcgtccagtgctaccaagtcctcctccgccgctgcttcctctgctacttcctctatcagtggtgcctctgagcgagttgttggtgccagtctaggagccgtcctcgttggtgctttagttgcccttgtcatgtaaaaacaaagaaaagaaagaaacacagattatccaaaatcaagattttctctgaataaaaagacctgcagtctgcgcttgcaattctttatttatttttatagttatctcgataccccaattattcacctggcccatcatccataacagataccacactctttcttctctcttctttttctttcctcatctccttatttccttctcactttcccgcactaggagtgccggtggactttccatatacatctatcacatttgcctgataagtcctttgaacgaacctcgttctgttgtgtttattgccatgtacgtttctgcgctcttgtgagtgtggcgagtggataggcaagcggagcacagctttcgattcacctctcttccttctccatctcgcttgtcgtagttctctcaactttcacactccttggccttgaccatggcgatagacaacacatcagcattccgaaagttatactctgaacgcgtctcatccatcacgactgatgagcctgatcgttcgtcggcttcctcctcaaagacaggtctccgccgaggtcaaaatcagcgtcagggtcgaggaggaagcgttgatacggatgatgggaaggatgagtttcttgcagaggcttaccgaatcgtgagtcgatttgatccttttcttcttttccccttttgattcgattcgccttgattttgtgtactggtatagtgcgttgcaaaaaagtacggaatctgatcaagtgcttgtatattgaacgtactgtgtcaagcatcaccaccttcaagggctcttgacgagtctatcagctatcaaaagacagtacctctctatcagctcttcctcatcaaacccaatggcatccagtggactcaaagggaaatcaagagagaacgtctcaaattcgacaaaaatatttggggagaccgagagagaagaatttgatcttcaggcaaagatcttgttgaagagatgtctggaacgggtcttaagtttggaaaaagccgaagaacagaccggaggtttgttcaagaaaggaaaatcgagagagtttggttcgtctcttctttctctcttcgatgtcactgttcccagagattgtgctactaatgctaacgcattccaacccactgtagatctggatgaggttcctacatcgactcgattactctctctcatcctcccaccttcgatggtgcccaacatgacatcatccagcagctccttcaaaatacttatcgcagcacaccactcatccatcctattttacctccatgcttctctctctaaagccggtcaagcgctttcggatttgcaagaagagcgcgtgaggaggttgacagaggctgagagtcggtcacttggtggtgggcttagtatcctccgagaccagtacaagtcgtcttctaatccagacgcagataagaccggagaaaacagttcaacgacgacgacgaagatgatggcggggctgggtatcccagaagcaccggttgtgaagagagaaggagagagcgaactgacaagagaacagatccagttgtttgagagtgagaacgaacaaatgatgaagacttacgattcccatctggaggaggtgcgccgcttttcctccttctcccacatatttctctgatgtcttcccgtacttgacgctccggttccctcctcctcctcctcctcttcttcttcttcgctttgccaatccagatccaaaagactcaaaagacattgtcccagatatcaaccctccaatcgctcctctctcaatccctgatgcaacaagccgaaacgtctgatcgtctcctactcgaagcaggtcaaaccgtgtccgatgtcaaagcgggtaacgaacaacttcggaaggctcaggagcgaagcggatcgggtaggatcatgttgctcaccttcctcatcggtgccagcttggctctacttttcttggattggtactcatagtcgtgggaaacggaggagagggtcatatttgaattcatctttgtagaccttatgtaaagattattataaggaaagactgattagataacggtggggtatagaagaacacctttttgtctctctgcctgatgattcctttgtctgttcatgtctttggctataaactgcaggatgatcactggtgatcttcacggggtcattcatgatgaatggtggtcagtcgaacccatcaaaggcgaattttgtaaagaaagaggcatcgatctcatcggcttataagatacaaagaggtcgaggtgttgaggacagtctgccgcgttggaacactccccttactccacctgcgttcacatcagtctccctctctcttgtcgcctttcaatctttctgatggcacaaaaccaaatcaagcgatcggttaaggtggaaaacaaggagctgtcgatcccctccggtcgtacagacgatgtcaaggctgaattacccgactcgccagagctaggccaggaacttttgatcaaacccgatttggccgaattatccaattcatccatatcgacatcggatcggagtctcaaaagggaagacagaaatcatatagacccagaagtggacatcaaggaaaggctgaatagtgatgaacagatgtctgatttgatccaaagcgatgataccaaagtcaagagtgagaggaaggtgaaggtcaaagtcaaggaagtaaaggaggacgggggtatcagcatggaagaatcaaattacgaacagacgttcgatagagtcgctcctgaaggctattcattcgtacttgctggatcaccttatatgtctgtattctttggttttttttcgttcctcgattgaaggaggatgctgatttctattgtgtgttcccttcctatggatgtcctgtagaacacgtcattgtaaagaaattacgcttgcagaaggtctcaaagtctgggaagtcctggtaagtaaagccttccgtcttggaatgacacgctacctattcatccgaccactcctcttgtcgattgacggtcatcgggctgggttggactgggatcaggagtggcaaagaaagacagtcagaggggtcgccataggaccccaaaggatcggactacacgttccgactacaatccgcgaccatgtaggatctcttcttattctaattctcttcatcaaatccagatacttattctgattttcatgtcactaggttcgagtgatgtctgcacaaaggaacgagaaaattgcggcgagcgcaagttcattcgccacaatctatgatgcttttcatcttttcatcgaatccactcactgtcttactttaccattctgtatcttatacagaccgcgaggagtagagagactctccaatccaaggcacgcgcattgattgcacaactttaccctcgtttaccgatcgatcgactggaatcagttcgagagtttgtctacgctgggtttagggcaaagcctgctggaggatttcataaaatgtcggtctaggtctttctttgctgttgacttgtgctatcgctagcatcgagaccaagggctcttgaatttgaacactaatacttgaagatgatcatgctggacgataagattcccgggttcgatgtggaatttggttgatggtcgagtcaagtactactgtacgtccattactggctttactccatagcctctcacccctcacgatcgattcttttgtttctctcgtgtgttgcaccgaatagttcaatcagagaacgtcactccacctggccaaatctctcaacctgtcatcctcgaatggcaacccttagaaggacccctctcaaaccctcatcctctttctgagtctccgccagttgatgatctcgttatcgattccctgccaactccttcacctcccgcttttaggcgcaggacaccagctagacctgataggaaactaaaaaagaagaagacaaagacaaagggaaagggaaaggcaaagcaatctgctcttaggccacttgctagacttaagagagaatttgtcgcttctcttcctgatcaggagacgaagaaggccgcggcggcagcggcgtcgaagaggaagctggcgccatcaggggcggcaaagagtgaagagcgaacgggggcaaaacgagaacctgatattcagcttaaactcgaaccggatgtcaaaccgaagatcgagcacgacgtcaagatggaatccaaacctaaacttgaagagaaggccaccagcaccaataccatcaaatcatcaagtgagagcccccggaagaaacctcgtctggttgtcacaaaaaccaaaccgcgcgagttcaaagaggagatggtcgacatcaagccgattctttcctcctcatcaagcggaagtggaaaagaaagaagaacaagcgctcgtctgtctgggcgtgtgcctggcgtcatttagaacagcttgctgcttagtctcgcctcacggacaaagtccatcttgattgatcgggatccttctttcttgggaggagcttgcttacatctttccattcatactttgtattctgtcgtttctccaacttgtatgcttgctcaagttcatacatttgaactggtcgtactctgtactttgtttaaatatgtaaacaccatctgaagatatccaaatgaaaatggggtggtggggtggggattacaagcaagatatcagaagagcaacaagaatggagaaggtacaagatggtcctgaaaaggatgagatgaaagatgctttgtctttttgcttcctggtcgttcgattcattatcccgtctatcatgacttggagagctaagaaggaaggggttcatatgttaatactcccgataagaaggaatggatacaaaggaggggcttgaatatatggcgaagggagggacaaacctcttttgatggcgaggtaaccttgttgccttcttcactctcgaatgattccagaagtttgtccaggtccttctcaggcgagagggagaggacaaaaaaaaggtcagacaaagatcgataattgagacgaggaaaacaagaacgaacctcatcaatcgagtcaatcggagttcctgtgcaaattgcgatgaccttcctgtacaacccatgtttttctgctgagatctgatcgattgatctgatcttctcctccagaatgttctccgccctactctgccacaatctaatcctccttaactcgatgagttcctctttcggatcagatccaattttggtcgaatcgacctttggatccggtccggtgtaattagcgttcggctcaaacgacgtaggatggctgacaggcaggtcttcccctcgggttggttcgatcgactggaaagacgggccagttcggatagaaggctgaccatccacatctgtgcggccagaccaatcgaacgcgtcttcctgatcgagagcgcgttggacattcttggtcctttgggtgatctgatcgagtttggctaggttcgcctctagtgtagagactgaccgacgggcgaaagctagggatcgagtgacgcctacgacgtgtgattgagcgaccgctaacgcatcctctttcactttcagctcggcgaggaaggtcgtattcagagtctcaatcgtttttgtgatatctttgtcgtaaagatagtggaaggacgtcaatttcaagagcacatgtaaatccagagcaaccaagacatctacctgttatcacgtctttgctcttctgtaacggaacagacgctggctcgcgtaaactagcgatgatctcttctccaggtgatactcgcaataactgatgtgcaacgaacgtgactcatgttgagcaaccttgatcggattgattgaagaagataacaacaatagtgataatgatgataaatcacttacctcctcttcaatcccgtagtctcctgctctaagtcccaacttgttgaccactcccttctctgctccaacgtcaaccaagaacctggtcaacgttcggtttcctactctggcgctgacgattagtgcagtgtcaccgttgatgtctctcgcgtcgacgacgctcttaaaaccttccgtgcccttgacggtgccagcgagactttcgtgtttcgctatccactccagaagacattccatgtagtatcgcgccgcacctgctcgtcccggcacacccgcgaggagcgcgacgtgatgaagaaccgaccgatgggatctgtccattgtccgcaaagtgagcgcgagcgttgagtctgccaacgaaagcaacgatgggaatgccctttggtcataattgttcgtcgccaagatggacctcatcagcggagtttcacctgagtggtttcctctatgaggatcagcacctcggttcagcaggtaggtcactaagttcggtcgagcaagcgcgcaggcccaatgaagggcggtatgaccctgggggtcgatgataagattcggatcaaacggctcggtcggatccgcaagcaagctagaaggatcttccgggtcatctgcatggagaaggtcagatgtctgttccctgcctccattcgatgtcgatggggtggatgtagtcgcaggaatctgccgctcaaagaacgaaagaagaatcgcccgttggcgcgccggatcagcgttttttgcaggatccgtcggcttgctcgccagtcttgtgtgaggcgctaaagcatcctgtactggcccgggagatggccttgagtcgggctgtgaaagaagatgggtcgagtgaatggagggaaatgaatctgttgatgtggcttccttcagcgaagggtcaaccagtccgtaagcatttgtatttgatggcctgatagaagtagccagttgggatggagaaggtcggtgatgctcttggctgtgaccaggagtgggcgtcccgtcggcgctattataatccacagtgtacaatccgttaccatccccatcgatcaagctgtcggcgaaccgctgcatgtcagctgactcggacgttgtcatcggcactcggtgattacttcgaggcgggaacacctggttggtcaacgacgatgaagtcgacgcggaggtcgacgcgtcgtactgatccaacggaaggtgattctgaaacggagatggatatcctgccaaaggagcgccactttcatacagacctggctctgtgcctgctggattagatccatcctctgttcgcatccgttttgtctggggcgctttggaaaaggaggcaaccgagtcttcatgctgttgatgatatccatttctgccaccgttttcttctttagggatttctcctctctcgtttacgtcctcggttcgagctcgtttccggtctcctcctgcctctgttctgcgcgagttctcttctaaagaaccagaagtctcacccccagcttgatcgtaatacccatggaacgcgcccgctggagttctgacagcaccttgacctgcagcgaggatatcagccggggtcatcatcgcgctcgagtgaacggtttgtccattgtaggatcttcctccatgatgaggagcgggaattggatattgtgctacattcgagccgccgctaggaaggaagggtgacgtgatggcttgctgctgaagcaaaatctgacgagattgactacccgaagggacgatcgttgtcgcagtggtcgtcgttgaggaagctgcgttcgttgtaggcgcagatgtggaaggaggattagttggccctgtcgaattggacggggttatcaaggttggattggaattagacccggcctgtgatttatcgggcgaagactgacgaccggctgggagggacgcggtatatgtcgcgtcattcagcgacgtatccacgatgggcgctagtagactctgaacgccatattgagcggccagctctagaccccgttcaagagggatcctatgagaggtagagcgaattcaagtttaacgaacatagctggagaaaagagcatgggggtttagaataaaaataaaaatggagagacggaccaggttccttgatactttccataaccgccttgaactttctcatagagtccgacaggaataatttctttatcaaggatctttgttcgtctacctttctcaatgcccgctactttcagaatttgagtctaaaaggatcaagaaaatcatcaggttaggaagatataggagagacacgaccgaaacaaggaggtcaatccaatggggcgacatcggcatgatggcggatgaagctaatgtcacgtacagcgtttaaccatctaggttcaggaagcgaattggacattagagaagaagaagacgtgaaaccaaatgggtttagtcaaaagacaaccctgacagcggttgaacgtcgcttagacgacaagtagggagagactcacgaatccgaccgacgtctcatcactgcgattccacggatcatgcattcgaacaccgagacctgttcgtttaaggagtgacatcaaagagagcaagagacgagaagaaaaggaagacagagaagagagaaacagttgggaagtccaaaggaacgcgcatcagtgatcggatgcatcatcccaaaaaaaccgcatacatccatctttctcgacaggtttagaccgacgaagagaacgtgtacaaaggccagatgggctcggagacacgagagagcaacaaggaaaagaggacaagaagaaagaaagaaaggatcgtcacgaacgccagagtacacggctgtataaaccgaagccaggccgggatctgctctaccgggaccatcaggatggctggccgctgaggaaggaccgccatggtttccagaaccggacgagcctggctggccggacggagagggatagaacgccagtggatcttgagactggatggaagcctgttgatcggcctgcatctctcgtagggtttgtaagttgttggatcggaagactaagaatggacagttgctcgtggacggggaatggtgagaacacggatcgggggtctggttgggtcgtgaagcgattggaaaaggcggaagaggaacgcgttgaggccacggaggattttcatttgaaaagtttatagttactttatgggttcctgtaatctctgttcgtagtctatcttcggttctgaaccatctgactttcaccactcgtgacttgacacagcagattacccatggcgaatgaagaatacggaacatggagatcatcagagtagagtgtgaaacagaagaaaaataagcagggatatgtgcacactaggaggttggaggaattcgtggatgtatgcagataagaaaatacggaaagcgaacaaatagtgatctacggacatgaatagttaggagcaaaggagaaagaatgacttgagaagagaacgagagaaagagatgtcaaactgaagagtagaagggaagtcacagctagacctctcccgggttcggtcggaacgtcatgatctgcaagaccgcaagagaagaagaagaagagggaaaaggaagagaacggtcagcgtctgtcggcctggttagaaggctttcgaaagaaagagggaaagaaagaccacgaacctccatcacggtctttccgtcttgtttggccagcacgatgcacttatcgactaggaaagtgacacgatagatggcctcgcaaggtttactgagctcccgaatgaactgcccgcttcgaaggtcccacaacttgacccgaccatcgttcccacccgttacgctaattcatgtcaaaagaagggctaagtcagcgaagccggacatgacatcgttgagcatgggaaggacacacatgaatcgattgtcgaattggagacaggtcacagagttatcactataagagattggcgatcagaggcgtcagccaggctcttgacatgctcgaacgcgctcagagatcaagatacgtactgtgcgcaaagacgttgaaggcattcaaatgtggacaatgagaacacaatgacccgaccgtctgatccgccagtcaccaagaggtcatttgtcagttgaagttgtcccacgagtgaggtatgtccttgtaagagcgcgaggcattctctacagagaaaatcgtgaaaataaaccaaacccagtggtccatgagttagaagaggcttatttccgaacaggaagcgaacagacgatggcaacttacccggtatgagccgaccaaacccggacagtcgagtctagactgcctgtagcaaccttgtcgccatcgaacccgacggcatagatttggtgatagtgcccctggaagacttgcaaacactctccagtgtccacatcccagagctgaacaacacaacagagtgagttgaaaagaaccaaacacacagattaagtatacgccttctcgagtagtacactttatgaaagaagaaggaaagacaacatactcgagctgtaaagtcgtaacttccactaacgactctgttaccgtggacctcgatacaccgcacactatgctgatgacccaacagcagatgaattaacttgcccgtctcaaggtcccagacccggagtgtcgcgtctctcgagccagagatcgcgatcggtcgaccgtcgatgactttgatacatcggatctggaaagaagatgcgcgcaggttgaatcatagatgagtcagcattggttcaagaaaaaaaggaagagagaaaagacagggcgaagggaaaagaagagaagtgtacagtggaggtatgtcctggcatgatgtgtttacataatctgttcacgccgaatttgacatccaaaatccatgtagcgaatcagtttacccactctttcagcttcttcgaagaacgctagtctccaaggaacgtagaaaattcaagaaggagtgatacgaaccccgtctcaagatcccatactcgaacggatcggtcacagcctcctgtgaccaggaccgcgccctcctgaccccaacctctggatgatccacaggcctcatacctttccttcgctctcgggtttcctcgtccagtctcatcgcctcttcctccggaggctatctctgttgatgacgaagctgccgtggttgatgatcttgagagatgaaccgaagaagacccgtgctcccactgaggcggcaagctcgccgagcttcctgttggattcgcagagcccagaagagtcgtgtgcgtatacgggttagtcctcgccgatcctgactgtccggactgttctagaccggggtgactactcgagtgggttgctgccaacgacgaagcgcttattccatcggatgatctgcttctcgcgagtctctgctcatccggtctaagtagatccagctgtgagttattcttttgaccatctctatgatcacctgtgtccgttgtccaagggttgggttcttcggatccaggtcttggacgtcgaacaccaccctgactaacgagggtaagtgcccagacaccttggccatgaccttgtagactccggaggaacgcgccagtctcgcaatcaaagatatgaatcttggagttggccatcccgatgacgatatgtgtttcgtccacggcgagcgaagtgacgactgcttcatctgtcgatgtatgagtagagagtatacggcctcctcgaagccaattggattctgtgattgacgatgatagagaataagaagaaggagagtgaacaagaccagtcagtgacaaggtcgattgagttagaaagaaaaccagagaagtgcgacgataggagaggagaagaggagaatcattttgacgagagacacacctgtcaagtaggcttctttgaaatactttttgtaactgaatcggtcagttctctccctctccttctcgttcagaccctcgatgagtcccatggatgccctgcgatcagcctgtcttgatttgcccttgcccttgcctttacctttgccctcactcgccgagctgataatttgctgatcggccgttctatccgccgatcgtaagattagaggcgagcttgcgcttctctctggcaagtcaaccaaaggcattggttcgttccccgaggatgccggcaacgattccggaacagagttgctcgactctcgcctagtcaactcctttgccgacaatgtcgccagcactcttttccttgccgattgcgagcgagacgaaagcgtagacgtcaagctagacacgaacgaaggaggactcttcagcgttggactctgccagcggggagtagaaaacatgtcggaagaaccaccgtcaatgttgtcctcgatgaggtcttccgggggctgggatgcggtcggaagttgagtattggcggaagaggagctggaggaggcagggttgtaaccaaggaagctgtaggcaagataggacgaggacgacagtgacaaagatgatgatgagttggccgactggccggaatcgaacgatacgtgcggctgcgcaggaagcaggcttgacgctgttgatggggatgcagtcaattgtggatgatcgtcaatcagactggatcgagtggataaaggttggatgggcgtaggtcctggaagttctggcggtgaagatgtcgctggatgatgagaaggtggttctgaacgaccgggtgattcagcacccaactcggtttgatccggaacgctctcggcatcagcttcggtcataagtagggaagacgacatggaggagaccgaggcaagttccattcgagcaaatcgatgtcgggcacacatctccttccatgtccactcgtcctcgagaagcctcctccagaccttgctgacctgactggctcgggcgagtgttcgtggggagtctatgaaagagagaacatggagcgagagctcaagaggaaggtctcgaagaaagtctcgttttagccggggagataataggttggataccgaaagaagttccgacgttgtcagcagtgggagaagtgcggtgaggaatgaatgccgggcggaagccgggagatgaatgaactgggcaagaagatgctgaacggtcggttggtctagcgagaatgaagcaaagcaagagaaaaaccatcaacagggacggaaggtatcatggattgtgagtaaaaggaccacaagcacgtacctcctcctccaggataggaatatcttatggagcccggtggagtgatcatgattctatctctcggtccaggacttggagccggtgtaggtggcctgacggccgagctgagagccaagggtgaaggcctggtatgagtgatagagcctggcatggaagcgagagtgttcacgatccttgggtcgaccggagaaggctcctgagggttgtacacatgtggcacagtgttcgaaggaagagaagtgcctgagggaggggtagacggaacgaacggatggttggtgggtggctgcatgatcgaaagctcggaagcgaaaagggagtgtgatggaggatgtcaagagaagagggaggaaacgacgatgcctgaagaaccaggtatatgcactgagacgacagcgaacgtttgccgaggacgagcaggacggcaaaaagaggatgatcaagaacgaaagaaacggaggtgaacgagagtcgataagaaggcactgtcgggtgggaaggctgacaaagtacgaaccggttgggtgtgattctttgtagatgggcctttctttgaggattcgttgaacgtttccctaagagtacgtacgtgtggtcgagtgcttgtatagatgtatacgatgccaacatacacacacgcaaataaacatacacacaatcaagacagagcagaacagaacagaacccagtactcgacaggccaagagaaggcgaaggcggttgtctcgtcgctgtcgttctcccttctggacgatggggttcgtcgattccctcatcgtgcgccggccgattccgccttccggttgggctgaaagtgattaggtaagcggagaggaacgggggggaggggggagggggagaatagagtttgattaggtaatgccatttgggccctggttagaatcacttggtggaaccgattgcataatcacgactatcggtaaccatcccgcagcggctcgcgcacgcgcctctcgccgtcacctccatcggccaatgtttcccttccacgcctcttactcttcaccatctccttcttgaccatctattctgttcgtcgtacatctgatcaacagggttaaacagtcgtttggttcaactctattcacctcggaagtctcgaaatagagagccgacgatctatgctccctcttcactttgtaaacaagagtctgggcacacttctcctcgctttggcatccttcactctaggaggtttcgcccagcagccgtcgtccagtgtctcaaagtttccacatctaccttcaaaaatattctattttgaagacacatcagtgagctttgttcttctgcgtttgtttcgtcactttcgttcgagtataccgcaacctgtcatccacagttcatgctcctgcttctcgcgcgtaccgggtggatccatctttatttttaggattaactcttcatactcatgcctgcatttgatcgcttgcgccactatctaggacgtcctctatcatgaccctctcctccaaaacgtgtatcgatcttccaacgagggtaaagactggagcttgatcgaaggtgtgccggacggcgaggctgcacatctgatcgaccatccgaccgacaaccaggtggtacgcctgtctctccttcaccttttgccactcgtcctcatttcggaccgctaacgatttgaatgttgtctttgttcgataggcttttatcatcacccgtcagacaacacattatgcaacatataacagaggagccacctggcaaaagtttgaattaccagcagctgcgtcaagaacgggatcaccgctttccttccattcaaccgagaagggtgagttcctcgccgtcgtttctggcattcgcagcaatgttgcaacttctccgtttttctgaccctacttcgtcgaaactttcaaacaaggttggataatctaccaaggtaccgtctgtgaaacaactggaaccggccactggggttcgggcaagacatgctgggatgatgcctactacaccttggacgcgttcagatcgtcctctaaactactactctcccaagtgaatcagtgcctgttcgcgcatcaatctgaatacttcaagacgccaaatccgaccgaatcaaactctttggtgtactgtattgcttttgactcgagtagtcttccgggagaaagcaaaggattgagcgagagtaggctgtttagcagtcgaagttggtttgccagtgaggggtctcaaggggaggtggtcgactttgggatcggaaagcgagcaagaggcattgttggactgggagtcgcaggtggtttcgttgtagccgcgctcagaaaggatctggtcgccggtggtactggaggaagtgaggatccgatgtccctttatggtgagtgctatccttgttcttgcttctttctttcttctcggctctcggtcaatcatcttgaccaaccaaacttgttgcgcgctgctccatcagtcactccgaatggagtggattggagtgtagccaaatttccacacggctcgatcgccaatctcaaagaaaatgcctatgtatgtcttttgcttcttgcgcacgcacaaacaccctgtgtgctaacctttctctcacgtcctattaatcacagaccatcgtcgagtccacatctcactcaatctcgatcgacgtcttggcctaccctacagcttcgatcggagacttgtttgtatccaactcgaacggaaccgagtttcaagtctcattgcaagactcaaaccgaaatgctcgaggaatcgttgactacgaaaatttggttggtgtagaaggagttgcagttgcaaacatggtaagaaatagagaggaagtcgttggatggggaaagaacaaggaggtcgtcagtcgaatcacatggaacgatggtctgttcttctttcttttttcgtctatcgatcgtctcgtgcaagatggagtaataagccgaagcatcttggaatcaagtagctcacccaaatctttgctattcgggcccggggcgacaataggacgaacctggaaacagctcaagcctccggccaagaagctcaacggtgatgattgggaatgtcaaccgggtgaagatgtacgccaacgccgcttttatccagagtttctcgccggctgtgttcttaaggcagcatatgtagctgacctgagcattgtcattgtcgtgtttggcaggatgattgcagcctccatctatggtctgtttccacacctcacaactttggcaaagtgttttcatcaaccgctcctggttacgtgatgggtattggatccgtcggttcttagtatgtacctgttctcatatcacgctattcgaatctacctctatatctatcattcggtctcacacggcgccctacgaccccgtagtttgctcccatatgaagattgcgatacgttcatcagtaccgatgctggagtaacgtggaacatggccttgaacgacgccagcaagtacgagtttggagaccaaggaagcgtattggtctctgtttgggacgagggaacatcgagcgagatcaagtactcgttcgacgcaggtgcaacttggttcgtttttgctttcaacgagccgcgcgtgcttcttgccttcccagtgaagctaatctctgttgctgtgatcgtcctttccttgatcgatctcctataggaacacttacgattttggtgttaccatcaagccgattctcctcacgaccgttccggactcgacttctcagaagtttctccttcttggcactctttcccgcgcggatgcaggtaacaacgccaggcatgcgcttgtcttcttggatttcgcagatatgcggaagagaaagtgcacggacaaagatttcgagaagtggtacgctcgacctgaagatcaggagtgtcttatgggccataaggtttgtctctgagtcttttttgtttccccctctgttgataaatttacaaggtcggttcgttaaccattaattggttctttctctctcgcttttccatatcacatagcaatggtaccgtcgacgcaaggtcgacgcagactgttacgtcggtgacaagttcgaggatccaaaggtccagatggataactgcccctgtacagataaagactttgagtggtaggtcttcttctctcgttccccttgatatcaaatagacgatcagatctaactttcacttatcaatatgaatcacgtgttcttgaatccccaagtgacttcaactttgtgcttcaagccggagaatgcgtcctggctggcccagagcccgtcccagcaggaacatgtacaaaggcagacatccgaacctatgaaggttcatctggctacagacttattcccggaaatacatgcgatcgatcaaagggaatcgcaaaagacaagaaggtcatcaaggattgctctcaatgttcgtgattttttcttgataacttgcgttctcatcaactagcatcaagatgatcgaatgctgactagataatggtgtttgatacatgacagcccgacctgcagatggacaagtttcgcatcagatcgtatgtcattgtcctctgatcaggttctctgtatgagattggctcgataccgtatttacctgatgttttcatgatcttctttcagcacgacttcgggtccaaggtcatcaagagccagtatctaggagattctcaggtatgttgttgactgatttgattctctttgatcctgtcacacaaactctcataattttaatcactttacaaccaaccaagactgttctcgttcaacttcaagacgattcgatctggcaatcgagcaatgaaggttttacctggaagcagctctatccggatgaaagtttcctcgcgctcactgttcacacatattctaaagatcgagcgtacttggtaaccgacgaccgcaaagtctactttactaccgacaccggtcgaaactggtatacgttctcacccccctccgaccccaatggactaggcgtcccgatctttgatttccatccgaccaagtcggattgggtgatctggacaggtcaggtggactgctcgtccgtcacgtcaaacacatgcaggacggtctctcactattcgactgataacggacgaaaatggaggcagattgaaacctacgtcaaatcgtgtgtctgggctcgcggcagccggctcaagatcgatgagaagatgatcatgtgcgagagttatcaaaagaaggagggctcacaacggtcgccagcgtataatccactcaagttggttgctggccaaggatactactacaaccaggaggacttgttcagtagtatcgtcggattcaccacgttctcggagtatctcatcgtggccgaggttcgtccatgctttcctcaattgattgcaatcctcatttgttctctgcattctctggcctcctcggtacgggttcttactcgaggacctactttgggctcttaacaatgttagctcaacgagcaagaaggcactctgaagcttcaagtttctctggacggtacccactttgcagaggggcagttccctcctggtatgggtgtcgaaaataaggtgcgtcattttacatcttttcactgtcctatcatcttgaacaagcgtctgacatgcttttatttcatgcttcttttcttataggctgtgagtaggcggttgttatcaaatacaatcacaatgcaatttcatcaagccatgctgatctttaaaatccgactggatacgtagtacaccattttggagtctagtaccgattcgatcttcctacacgtcactactagctccaagagcggagacgagtacggcaatgtcttcaaggtcagtctatagtcaaaccgtacatcagcttaaaaaatagaagaaaactgacttgtaaaaccctgatccgtcgatagtctaattcgaatggaacggtgcgcattgattcacaacatatacggacggacatgtcttcttccaggcttcttgaaagcttatcaaaaattgcttcatgtaacagtactttggcctttcgattgagaatgccaaccgaaataatagaggatatgttgatttcgaaaagatgattggcctggatggtgtcgctgtgttaaacattgtttcaaacccggatcaagccgccgtcagtgggaccaagaaactcaaaactatgatcactcacaatgatggtttgtcccattcactctcctttttattcgagatttgagtcctgactgttgttaatttctaggtggatcttggaatccgatgactcctccatccaaggactcgttgggtcagccttacccttgctcgagcactgtgagtcaatgtgaacgcttggcttgttcatattgtgatagcaagttgatcaaatccaacaaattttaccttcggaaactttagtcttgcgccctgcatattcatggatacaccgagcgacgagatcccaaggctacctacagttcgccttcagctaagggtctgatgatggccgttggaaacgtcggtgagaacttgattggttatacgttcgtacctctactcgtgctttttctctactttctttttgtgaattttctacgatgtatcttaacttgtgtttcattcacctatagtgattctgatacgttcttgacccgagatgctgggttcacgtgggaggaggttcacaaggatgctcacctctgggaatttggcgactatggctcaattttgatcatcgccaagtgagtattcataaaatgttgctcggattaccagataccaagacatgctatgctaacctcgattcctaacttttccgaattgcgtcataaattagcgatgaggaagcgaccgatcacgttctttacacaactgacgaagggttgaattggaaggagtacagctttggggaacgactccgaatctctcaaattcagactgttccctcggacaccagccgaaagttcttactttacggaactcgaggtgccaagccggatgagactgtcgcggttcatattgacttttctgccttgactgcacgaaaatgtagggctgtctacttagttgtctctattttctagatcgattgctgatcagaggcccgcttgtctttcggtggttggttctaaataggcgagcagaaaatatctgatcctaatcacgatgatttcgagctttggtctcctagtgaatctcgagcagagacatgcctgtttggtcgtcaggttagtttcttttcctcgccttcttttcgaaaccaggtcagttgatcggtttgtaaactgtttcgtttaaccgatagacactctatcaccgccgaattcgagatcgaaattgttttattggagaacggattattcagcaagaagagtttgtcaggaattgcacctgctcggcatctgattttgaatggttcgttcattcttcagtttgatgcttttgtagtgcatagactgattggttgtggcatcaccgccatccaccacagcgaattcaatcaccatcgagatgcttccggcaagtgtgtcttgtttccctcggctactgctctctcgccgttgaccacggaggaggaacaatgcaaaacaacgaccgatgggtactggtacgaacgtacggcgtaccgaaaaatcccttactcatcatgcgaaggtggcgaccgtccggatcgaggaaagaggcatcgatgtccagaggtcttcgtcccgacgagccatggagcgctgttctggctgtcgatcgtgatcgcacctttcttgtttgcaggcttgggtggaatgtggtgggtgaagaagagtggaggaagctcagggtaagcttgctctatcttttttaaccttcatcttgctcttgtccttttggatgcttttgatctggtcgtatatgtggacagctcttcaactgaactttgactcttcttttgactttcggcaggtctatccgattaggagattctagagcattcggaggaggaggctcatccaaccaagtcatagagtatctagccgcgatcccgtatgtccttatcggcgccacaggtgccgcctgggcttgggtggaaagcaaagttcggacgataccgttcttcaacaagatgcaatccagaagaggttatcgaaacgtcccggtggatgatgatggtgtgtttgctctttgtactcttctccatcctctaaccggaattactgatgagatcatactttcgtgatgcaacttggggtcacagctgagattctgagagggacatatgacgatgaagaataatctggtcaatccttatgtacacgggagttttttattttcctctttacgatttgattgatagattcaggcatggtgtacaatataacttgggtatgcagcgatatggccaaaatatggcgattgacgaagcaacactactttcattgttttttctccctcttctttcgaggtcctttctcttcactgagtggtctttggtgtaaaacatgacattaaagatattccactgctagctatgcgtcaaaacgaacagaacaaagtgaatggatagagattaatcgagatacagtcagacatgccaggtaagaacattggcagctcagggaactagtgataaaagggagaaaggagattctttgtacaggaactaaggggtgagtatctagtgagctccaatagcctgtatgatggaaacaagaccggcaaaacagaaaagacaaacatgattgatgtgagtaatcgagggatggtagagttcagatatggaaaggaggtgatgaaaaaaaagggggatgagaactaaccttctctcctttaggctctggagggaagagattcttcacaggagtgttcattccgtcttcagtgacatagctgagagtgttatgagctcctgcaagagctgacagcgcaagctgatagagcatactatagaagcgcgcgaatgaaggcaaggaatgagatcagctattcttgattcaaggcaacgtattcgccgaacggaaaaaggaaatatatgagagagagaaaatacgaacacaaagatgaaatcgacccagacgaaagcaacaagtgcctttcgcattccaccacaggcagcgaacgtctgtccggtgcaagagtagtacgacttcttaaatctgacggagtaggccacggcgagagcaaaatagaatgcgagaaagaaggtggaaaggctaataacagatttcgtgcggtagatgctggtcctttttttgccaaaaacgatgactatcaagacagaaggtaaaagtggtctgagcaaacacgcatgatctagagacggaatgcatgaaggattggcaaagagcgcaaaattcgatcagaaagacaaacttgacaagaaccagaagttggctaggacgccgcagacgatgaaagctggatcgattctgaaataagacccaaaattgcgctcgatctgtcggatagaaatcgaagccagcacccatgagctggtcgaggagaagtgacgtataagaaatccggataagaaaaattggttagtaacacatcatctgagaacgataggaactcgttgaaggaaccccaaaagccatacgcaaaagccatgaccgtgttgagcgcagtgagcaagaaggtggccgtctgaaggatcgtcatgtttctagatgaggtttttccaagagatcagggaggtgtacttctcgagtatgaagaggttgagtgtggattgtaagtgcagatgagcgaaaagttggattgaaagctgttgggtgctctattatataatgaacccataggagggcaaaccatgaaaggggacgtctcgatctgagaccctcgaagcccacggtggcttccgtctccgtttaccatcagaaggaatcttctctgcccggcatgataagactaattatacgatgacgacagcgacaacgacagtgattatgctgacgaaatcaggaggcattcaatccatagtggggatgggcagggaaatgcaacaagacggaggagcatgaagttttagaggctgcccggattcgcgaatgctcacaccatcaaattggatagaaagaatgaggaaaatcctcctgccaacggacggccgagagcataagtcaactgttaacctaaaaatggccaacgactagcgagccagaaacggaagaggatgcaacccgagaagaccagggttgattgaagtcagtcagtcagccagccggtcgatcgttcgtccatttcgctcttcctgcacggccaggtcaagccgatgccggttcacggcaagtcagcatcagcatcgtcagcattatcatattctgtccaaaggcgccatcgttgtctactctttttatgtcaagtgccccagtttccatcatccttgctggctcccgatgccgtttctctcatgcggcagatgatagaggcaggatgacgtaaacaattcccgacagcttctaccatcggattcttccatattcccgcatggaccatttagacatcctcgtatctgaagaaaccgaaaatgcatacatagagaaaggagaaggtccgtagtagtgatagtggtaaaaatgttgatgttgattataatgatagtagtagtacatgagaagagctatagctatcaacttaacgagcaaaagtgttcacgctcaagggagggcgacccctatcatcagccataccgaacaattgtattccaggaaaccggaagaagaaagagaagaaggacatcaaagaagcgtcagctgaaataacccgaccaagcaaagaatagatcaaacatcgtcaaactgccgatttggaaaaataagttcgaccttacccggccgaaggaaacccgctcggaaacggagacggagacaacattccgttcgaattacccatatcacccatcatgttgttgcctccactcgtcatccggccaaaggcagccaaatcttcggatccggaggggaggataatcggctgaacaggcagactgtacgtcatctctaatacctccaaagttgttttgaggctatggagatttgagttgttttatttgatcgtttagtaatcccgatataatgaaactctgtgagtatgggtatgattcaatgaagcatcaagagagacactcctcatacaaattacacactttttcatgaaagccgttcgtctagcccatcgagctccccaatcgtgccaactgtcaaatacgatatagattagatatgtcaagccgtcgtccccaacgagaagacaaaccgttggcagaatcatcatgtgggtgaggactcacttgctcttgtgctctatcgcgatgtcgactgttaaacaatcacgataacaacgatgacagtgatcaatacagttcccctctgctttggaagacgttacttgaaggcgaaggcaaaacaatggtatacttactataaattgcattctgctgagagatattattgatgttgagctgatgagatccacccctataatgatagcaccacatattcagacggatcagacatgttggttgacttccttgactgtggacaaaactcggaacgtaccactctcgattattatccatcaagtactgtttcacccgaacgttgagatcctcgatgacctccagcggagtactacatccgtgatagacggaaacatcagtttagtttattccatctcgtctacggaaacagcccgatagaaacaagaacccactcgtatgcaatctggatcgaaataacttcccacatagctcgagatcgacctaaacagcaaaaacataagcagaaaaaaagagaagtccatgcggaacgaggcaaatcccttacgaatgttatctagaacaaccccgtttcatcagagatgactcatcagtgtctatgatatatgctgaatctgaccaactgattgataggtaaagaaacgtacgaatcaactttgcgcttgccagcaatgcgttaggagcgatgatctcctgattatcaacccttcggaacgtagtagacacaagcccgaatctaaccaagaagagaaagagattgatacttgcagctgtttgataatagggtaataaggataagatggaacaacgtactctttgacgaagagataatcggtgtcaatcaagaccaaatctccaacatcaaacggatgagtagcaaactactccgaacagccacgagtacagcgcccaaggacacaaaaccaaaccaggatgtcaggcgagcaaccaggttctctcatccgatatgaatggacttacaataaagatcaaactctcaaacaacgttttcgcagtattcgcgaagataaacgagaatccaacgacgaaagtacagacgggaacctatacaaaacgatagtgaaagcaacaatacatgagtataacagagtagaagtgaaaaggtgcgtcgataatcaaatcctgtgagaaaactcacgagcgaagtgacagtcgacgatttgttgaagatgagtaaaaagacaaagacgcagatgatcaaggcaaccccaagaagcacgccatctgttagatggcttgaacgttagtgcttgaatctaggactgtgatgaatagataaaatcagaacgagaaagaccagacaacaactcacccatctttccaatagccgaactcatatctgcgagtgaagccgtcaacgcttttctctctcgatagattcgctaaaaaaaaaaagaaagtaaatttcagtgctgaaagcacgtcatcgacaattgagatggatagtaaacagatgatgaactgacctgaacggctcctctcatctctcgcttggagagatcgccatttccatcctggtcgaaatgcgcaaacgccgtctgggcatcttcctgagaccggaaatactacatacacagcaaatacatcgagtcagcatacaaaatgagaccgaaaaagttctcggatgaaggtgagcttccagatgatccgggtacacaccggaaggaagtcatcgacagtaagggtgtgtctcgtgatacctcttgcattctgtccggtctggtactcgagctcctcgaacagcttcctagccaactgtctagccgaagccaaacttccaatttctggtcctttgccaaacattccctccattgcaatatccttgatttgccttcccaaacctgttacgacctttgctgcgctctttttcttccctttggccttgactgtcagttcggaaacgtctgtctgtctgcttagaggtgagggacgaacggtggtagtcgtcatagaattgtgatcttgctgatgatgcggagcaaaatcgataggttgcgattcggtggaaggcgtacctggtcgagtgaaaggagttccggggatactaccgggcgtgtcgaaaggagagttggttcgggagctagagatgtttcctgatttacctcgcttatgagctccccgaagacgggaggtagggaaggttcgtatggctttcgagagtttgtcaagagcgcgtaaagcctcggcattcaatgtcaatctgtccttcaaggctttcctatggaagttgatggcgataatctgcagtaagaccttttcggtcaacaaaagtatactagcggcgaagatcgcctgggcgactcgattgatataaacccagtaagatccagatggtgaaatggcagctcgagtgacagaaagagtcacccagatatcaacagagtagacgaaaatcttgacccaggtgctcacagctgtttgttcaggggaaatagagaatttgcaacaggaaataaataccagaattggtcattgtgttggtttgcctgtttttatcaagactcttgatcggaatgatatacgtacccagcatgagctgtcaaacagagccacaagaaccgtgaacggacagccgcttcaataaatttacacggtacaacgagagatttgatgggcgaatcaaaggaaaaaaatagagcaaacgatgaccaacctcaacataagttttcaagttctctgggaccttgccggatatccacatgatcaacatcgtgaacaagtgggggagaaaatcgacaaggacattgagcgcgcaacctatagcccaagaaatggtcaagaagagtgacctgtttcatcgtttcatcagaacaaacaaattgtcggagggatgggttaggattgaataggaaaccttgaggtgagaaactgatgtaccatgtttgcacttgagactttgcagggttgtttttgaactcggtcatcacgacgatgaagggaatcatcaagattgtacatctggcaatgatacaaaacacccagatctctgggtaagctcgcttgtctcgatcatagaggaatgatatatgcaagagggaaggaaaagtaaactcgaaggaggaaatgacggacccaatgaacgcagacataaacgctctgaaccacctgctcaaccctttgaaccaaagataaaccctccttcccctccttgctctaatggccttcgaggttcctccacccagagcctcaaatgtcttagcctgatcatgattgatttcatcatcgacatcccagtcaaactcgtcgtccgtgtgatcggaggctgtgccatcggatggagtgtcgtcagatgtacctggatgaataggttccatgtaggaaggccctggcagtcggaaagcgttttcatcagtgttttgttgccgctctgtaggtgagactgagaaagacctgttcgaagacgaccaaggttggggttgaagttcagattgaggctgattttgaggaggaagatccggttgaaacctgccggattcatcatgggtctcattatctgtcgtccctaatgaataagccgaaggattattcaagtcgtttcccaagctattatcgttgtatctcattcgaagaggtgtgtttggatctgaattggaagatgatggagatgaatggtccgttcggtctgtccgtcggtattcttttggttgacgggccggcccggtggaagtaggtgtatagagagatcgggaaggagcatccgtccggtttttaggagacgacatggtcgaaagaggtggcttatctgacttttaaactcttcctctcttttcgatgagctcagctgggatcttgtgagcacacaagaaggagagatatatagggagactaaaaagaaggaatgctgttcgagatggaaaggaaaggtaaaaaagaaattccacagccggctatgaccgcagcggaaaagtacagcggcgcgtcatcaccaagtcccaatttgtcctcaaaaatgcaaaagtctcattgaatacatccgtttgttcgttcgttcattacaacagagaagtgttgaaagtgaaagacaatatcagatcatagtaagagggaatacaattgggttcgtcggtctggacgaacatagtccagcagtcagagggaaagctaaatgtccaccctgatatgattcaagattggaatgacctgtaatttaaggaggttgcaaaagatgacaccaagcttcagcattgaatacagggtattaagaatagtcgagacagaccttgtcccaatcgtccatggctttctggtacatttcaatctgcgcatcagcaaactccccgagaacttccttcatctcttcctttttatcgagctcaaagttctcgtgttcgcgtaacgtctcgtccgaaaatgcgttcgaggtgtctacagcagagacaactgcttcttggagctgttcaacgcggagtaaaatttggagggttggctgtgatctacaatagcccgatcactaggtaaatgtcagaaagaggggacaacaggactaacttccttgatccgtccatccaagcgtttcatccgctctcttcgactggcaatatcgtcctttcccctgagcgcatctactcgatccttgaggtaggttcctatgccgaccggcccgcctggagggacacctccattttcgaccagactcgaaagtctatctcgctcaagaacaaccgaggtaagatactcggatagaatctctgaatcgagctgcttctgatcgcggagcgcgaggagagctcggtgagtctgggagtagtggagaagcgactcgaggtgggagatgaacggaggtagcggagtagttgactatttttttgaattcgatatgcgcattttttgggcatgagtcacagaggtggagtaacaacgagaaaccctgcgctgtgcccattatgaagagagggggacttacaacatgtcggagaacatttgaaaactcggtcattcgatcggcaaatcgaacaagaggttcggtgattccgctctccaggtaggcgagttctttgatgctctgtgcgaagtcgttgtagtccgatgcaagatctatcgcagaagagggggagggagtaaaagaagaaggaagaaggaagggggaagagggaggaaagggagacaaagaatggatctagcttatatctgggagatagaatgaagaagatttccccactcaccacccgttctaccttttaacctgccggcacctttgttaacgcctgcgagaccatattcaaacctttcgacctctcctctcatttcctcaaacctttcgtccggctttcgaacttttccactcgtcagattcacaatcgagtccgagattgattcaaggatggacgaaggtgcttctggattgggagggtttgccaggtgtttatgcattcgtatattctgtcgatcaagcgaaagagagtaagacaaaagacctcttagcaagatacgtgtgttaagggcaaacccccgtcaaaacaaggctaacccagtctgtcgcttccaaaaagctcgcgaaaagcgttgatcgtctgagggtgggatgccgggtcaatcgggagatgaaacgctggagactagaagagaacgaaatagaagcgtaagtgattgttgaggacgatgctaatggataaagaagtacaggcgcgtactcttcgattcgtttctccaggaactcaggcccgaaccggtctcttcctggtagatattctatcaaaggtgtggaatccggaaaggatcatatgtcagataataggtatcctagttaactctgatcagtcagacaagagaagatgagtcggacctatacggtgcttgtctggtaacggagggacgatgcaagctgggaaatccttcgcgaggttgtcatggagaaacacaaaatcttgaaaccgtctgcggactttggcatctgtcgtggtaaatgtcgggagatttgtctggtggattaagaatagaagattgatcagcatataactcactggatgggaaaatgaggcggaccgcgacaaaagggattcaactcaccttgactctcactgtgcaaagggaatagaaaagagttcatcgtcagtcgtcaggaatacaatacacacgcatatatacaaactctcactcacaaccataagtgacgtatttgtctttgcctccttcgatcttgtaatccattattctagcttcgacccagttggatccccagacacctgtccggtgaggagagttggaggaggacgaggcctcggctggtactgatgttggtggtggtaatgattgcggtccacttgaaggcgaagcaatcggtcggaaggctgattccgggtcatctgcttgagtgggagactgtggaatggcaatggtatcccactggacagagtcaaacacgttctcgtccggcgtactgggcatacgtgaaaatgaatatatgtaggcttaggcttaggcttaggcttaggctgtggtctgtacgggagtataatactgtaggtgtgatggaagtaggcgaggcggatgagatcgatgagatggatttcaggaacaggaatgtaaccctaggcttatatttgagcgcgggcgttgaccgatgcgccgactcatccatatatcgcgatatctcgagctcaggcttcttgctttctgtcttcaaaaaatgctattgagaggaagagggataggtcgatgacgagagcagacttcttattgaagagaagaaaagtatcagaccatggcctgtctcagactgtatagatagagacaagctaaattgatgggtatgagttgttgatgattctctttggtcaagaatgccacgtatcttataaccctctactcttgattcccttgtatcatcccgtcctccccattacctctcttccactcaatctgaacatggccgatattcatcgggccaaattctctgttctgttctagttcttgtcttctctttcgttctctgtgtttctcgttcaacaaagttgtcaataaagtcaccaaccgacggccatgtcacgtgactatcgcggtatttgattcctgtttcgactcgagtcctatcgagcccctttgcttcttcccttctggacatgtactctctatctgtaagatgggccaaaagacctagcatgttctggtatagatgcaacggactgaaatggggatcgagagagtaaaccatggtaattacaagctcaatacatgaaacaagagaaagacaaagataaatcgatcaatcgttgtactccatctagtccaatcgcaccaaacgaccctcgtccttgatgttctatcttcctcccttctttctttctttccttcttcgccgattcttaatgcctcggtttggtctctcaagaaggtatactacttgctgtagccatctgtattgaatgacgctggaggcactcaagaaacccataagacaaaagtcggagtttgaaatggaagtgtgaccgacggcgtgaccgcccaaccctgttcctggcgcctgccctgggctctagagaagaattgagcaaaaggaaaaaaattcctcaggctgaagacttcaagactcctcgacacccgtcctcttccgtaagtgttatgcttctaaagcatcactcttgtacctattcttgctgtctctcgtcacattgtactcgtcattccttcggatttcaatcaaaccggtccatctaggggatttttttccttctccaaaaaacatgacaagaggaggaatcataaaaaaaaatccacagtaattcaagaaagggagaaagcagggatgatcttcagtggaaaggatattgcgtagcagaagaagggcagggagaacggtcagatttggtttataggagaaggaaaagagaaaatagctccaggttgcccgtcgtgatgaactcaaagagagacccagaactcacagtaatggcaaacgaaactaacctatcaatcactccttcaccacagcccctcttcaacttcttttttcctcaagatgtcccaagatctccagtggctcctcatcaggaagtctaactccttcctcgtcaagcgaactgccgagggaccgttagtctagctcttttctcatagttatatctgagcctcgaagttgaattttttccctcttttcttgtccttcagcatcttctccaaggagcccggaaacctcaggggccttcactccttcaagcactccggacttgtcaacaacaagaccgtcttcgttgcccccaccaccgagacctccggcttgaccttgaccacccgagtcaagggtgctaacccccgacacgtcaagaaggccctcgtctcccgacagatcaagggaaactcttccgcccgacgagttgccaagatcatcgccgtcgagaccgccgcccgaggataccgacctgatctccgaactgttagtcctctgttttggcaagccgatgtgacatctccatctttcgtatcttttctctgtcctatcaattctctaccccatgaccgccaaaaaaaacaaatgcaaaaggcgcaactccgtcatatctcaacctccgggttgctatcgtggtacagcacggtcccgccaacctttattttgctagaacaagcctacctcccacttttttccgtgccctcttctcttacctctatgaagaaccggcctcattgcgagtgggagacaacacccacatttcttaccttgctctgcatcatcttccgactaacatatgactgtcgtccacaaatagagaaactaaccgctactgccttgttttatctctatcttctccccatcgaaataggctgctcttgcccgagccagcgccatcaccgctgcccagaaggaggccaccaaccccactgccgtccgagagaagaaggtccgaggaaacaaggccgcccccgtcgaggcttccgcttaaatgcgattgaagttttggatgagatgtcgttttgtaggacgtcttaactaagagacataagaggcttgagaaaacacagagagaacatgataatatcaggatagacagaaacatgagcaaaactagaaatttgcaagttttcccctccccaaaagcagtctcctctcgttcaattgactgagagtatgtttgatacgtgttgtaaatatcaacaatgtgccccttttcgatatcttaatttctgtccctcttgcaacaccaagggaacattaaaagaaaagtcattgaaatcgttaaaactttcgactcttgataactgtagaaataccagtctgttctcctccgtaatctcctttgagagcaccttgaccgcccttgtagacggcctggatagaagacactttcttctttgctttctcgtattgaagctttttcttgactcgggggtttcgcacagacttgtttcgatgcggagtgagtcctttgttcttgaggatcgcccgagtgagggttcgaggtccggtcgagctgtcgtcctccacgaatctgtttatttgggagtgtgcgagagtaagaaggaagcatatcagcatatggtagattgagcgagacgatgcagaaagaagcaaagaaagggaacgaaccgctcagcttccctagcctcatcgtaagcgacttgtttatcctccttgtggtccctctttctctttttgaccaactcgtaataaccatcatctccttcatccgcctcacctggatcatagtcctctctgacttctctcgctctcttcctgtcaccctctccccattcttcaccatcgagatccatatcatcaccatctgctcctcccagggaagcagcagtcgactttcgtaaagcggcatctcgaccagcctttcgatctctatagggaacatcatcgtcaccacccattcgaccttgtcgagcgttcgctcgtcggttagaagcagattcaatcttggaagtgtggaaccgaagggaatggcgagctgcttctttggcagaggagtctgccagaccaagcgtggtaggctccaaatgagcatcgtcttctccagccgatcgagaagataagaaagcagtactgctgctcgaggaaggcgtagaccttgaggatttcgatttcttggaagacggaatggtggaagttgagaagactggggaaggttcttcgagcgtagggaacggaagatccttggagaccttttgcttcttcgtcttctttgtcgattccactggggttgctttctccttcattgagctcttcttctttgacgccgacgatgacgatttagtcttgagttcttcgagatcacccatcaactcggccagctcatcttcctccatgtttgccaacatctcctttctccaagccatctcgtcctgaccggcaccctttccaagcagtccgaattggatgagctgctcttctgtcaactcgtcgtcatcttcttcagaatcaccctcttcctcttcttcatcgtcgtcatctccatagtcgaattcggccatctctcgatcggcgatggctaaatcgtcgtcgtcgtcatcatcctcatcgccggcaaagtcctgggattctaactcgccgagtgcttctttcaactgaagcaatcgagtcatcacagggtgagacgacaagtctggtcgggaagtcttgggaagggaagccaagtgaatgtagaacgctagcgtggtggcgtaggtgatgagggtttctggatttgaacacacgattgagaaaaggaatagtatgagcgtaggcgcacgtcgttgaaagatatagatagccgcaagattgaaataacgagaaacgaacggcagtgtaaagcagacattccgagcgcagggtgatcaggatcatcctttgattgattattgaaagcttcggtcactcgaggaagtctatccgccaagtcggcccattctctagcaagagccagggtaagcgggttcgtcagctctaggtgtcggagaagcgcagctggatcggtgggtaggggtacgtcggactcgacctgcctgtgaatgcgtttgaaagaggtaaatcacgaggagtagcgagaacagttagactcagtgaagggtgcaagggagggtaaagaatcgactacgaacttctcgccttcctcttcagcatcatcatcagctaaggtaaacccttcatcgataccgaaatcccctcgacccattccctccctcatcttcctctgcaagactttggcctctctctcctccatagctcttctctcttccaagtcctcatcaccagagtcagagccctctctggctcgtctggtcgaaggccgagcatagtaagccgacgggttggctccccacgtctcgtcctcatcttccgaatcgtctcctcctccgatttggtctgaccgaccagaatcggaatcatcctcgtcggatccatcggagagttcatcctcgtcggaagaggtcggctctggtttggcgtatcgtccctttggcgtagagtccgcctttgccttcgcctttcgagctcgagggaccacttcggacgtatcggggtgttcttcaccatcgtaatagatctcgttcgagtcgtcatcgtcatcctcgtcttcagagccggcaaatcctttaccagcgaacacatcctcttcgtcgttgaaggcgtcgtcgtcggcgagaggttggaaccgacgagctcgttcgttcgaggtatcctcgaacagaactttatctctgttcacatggactagataattgggacgccagatttatagtgggacgtaaaaaaaagggagacagaacccaatcagttgatctgaacttgaaagaacgataggaaagcacagaataaaaatatatacaggtatcctcgcctccatcctcgattgtatcctcccagttgaccatctttgccactgaggcatcgccacctctggaagcaatgtttttctttctcgctttcgttttcgatcgaggggccatctaggtagaagagggcgcgtttcgatagagagagtaggagggtgtgtgtggttgtgtgcgtctatgtatccaaggtgtggctcttgggtgggtcagaaggatgtatgtagaagtgaaatttgagcccaattgcaccccgaatgaccccattggataccccaaatgaatcccccgatcggggcattctctctatgaagcctctcgttcctcctactgacacttgctctttttttcctttctacaacgaagcaaccatctctcaatccgatcgaccatgtctgctgctttgaaagctaccaggaaggacttcgctctccagcttccaaagccgagatatgtcccgtcggctatcaggaatgcgaagatgtacgtttggacgttctgctatctcttcctctcttttctttttcgctttcttctcccttgatttcgtcactcgttttgtttggaataagaactgattcggtctggtgtctgcaacattcctcctttcgggctctctgtgtctaaacctcattagtcgacttcgaatggcattcactactggtcctcgagacttcagacgggtctgcatcgtcgccactacatcccggacgagacgagacggtatgcctctcgagaaacttggtgaatacgatccgacccccaagaaccgaaagttatcagccgcggaaggtggaatgaactttgcaggaagagacgcgactcgatatgagaagagggtcgagtggaacgaggagcgaattctttggtggttgaagtacggaaaggccgagccctcaacaaaggtggtcacctatctggagaaggttcgttcatagcttttagtttcctaggaacaggtggtaggggaagaggtctgtcgcatctcggctcattatagctcaacttgaattatttttttctttcttatcactggaatccctttaggctggcgttctccagccgggacacccctaccgaaatggaaagccacctccggtgcccactcgacctttcatcggtaactggcccgagtttgatcccctgactcctgcaacagttccgaacggtcgggtccaagggttaggatacgtgttgccgaaaaagacgccggtggagagcatggagttgttgggttcgtctccggtcaggtcagctagttcaccgaagagaagctggagagatcacctcaagggctggactgggaagggagcctcgagtggtcaggcatcagcctgagcagcaagggaaaaacaaaaggtagaagaaggaggggggggggaaagagatcgaacagaaatatatacatgtcattccaatctcagtatctcttgatgatcgtgtatgctgataatcgcactaattggttaaatgccgttgatcctgacggaaacggctgactgaccgcaagactggctaactgattctgaagctgaacgattaatctttcggtttctttcctgtttctcgagatgaaggagtatgacgggtgggggggttatttggatggtaacctccttgcaatctttctatattcgcgatcagacttctcttggatagaaccaaggtatgtgtataatgtttaacaacaggtgtaaagagagagcagagaggctgaggttgttgtagagacaaagagaaaagaaggatgtagaagagaagatgcatgtggtacggagatgtgtcctaagagaagaaatgaagaaatggaagtgcagatgtatgaatcaacaaaaggatgacaggagggggttggacaacgattaggtccgttacctttcggtaagactcatacagaaagccgtggctttcgattaaggtaaagtatagaaacctttcctgtgggaatgagaaatgaataagaggaagataaagatggatctacatgaaggtggtgacggctccaatcaaagccaccagcacttccactatgaatttttggttagacagcttggcgatgggcgaggcgttgttgctgaacgggacgtagatctttgttgctgtggccgcgggagcggaagagtcgagagtggaggagggcgagtcggttcctccgccagtcaattcgctgccgttcggctagaaagtcagaggaagtgggagccgggtagtgtcaatcagatgagatggagataacgtgagagggataggtcaacagaagcttactccaataggtcggctagtatcctcaaagagacagtccgaaccagaaacgcaggtgttcccgatcggatcccaacaggcggtcgagcagttggaaggtagtctgtgtcgaaggccagagcctccgacaggaacctgctctggattcggatcgctcacactgggctgactctttgggcatccgtagcaagttgagaagggaaagtccgagaaggagcaccgggcgagcaggctaaaagaggaagagagaagaaggcgatgatcgagtcatgttctcacgagtcagattgatgcgcgctgatgaaggaagcgggacagaagagtagacacaaaggaacgtacgaagagtcgtaaccgggaagaccgttacagatgtttgttcctgcgggcaaggtgacgttctggcacttgagcgcatcagactgaccaagatctgtgatggacttaggatcccgaacccaggcgagcagctgctcacttgacacgatccaaactggaggacggagggagagaggagagagaaagaaagaaagaaaaagaattcgttcagtttaggctgatcgaagtacgaaaccaagagcaaactgcttaccgttctcttgctcctgagcccagtcaaggaactcattaatcatactgacaagagctgcaggcgagctcaaaccgggataggtagtcgagagatggatcgggtgggtgtacaatccaaagggttgacggtttccattgtagtgcgcggtaaaggtctctttcataaacttcaaggtgaatgccggatccgaattgtctagccaagggtcctgagatagcacacaaagaaggtagagaaagtcaataatgtatggttagccttgggtatcacacgatagagaccgaaaccgacgcaacagaaagcctgaatagaggagagaacccaccatgagatggatgttgttggcgttaccggaactgtcaaagagcgcatacatcgggatctcccagaagccggggagttgcggcttgccgaagcagatatcctcgaacgtattgcaatcgttgagaagtccgtgatcgagcgtgtatggccaaaaggcgtcagtgtccgggtcgctgacaggtgagctcgaggtggcactcgagtcgtaaaggaagccagactgggcaagttgattgagaagaccggccgaatagttcaagtagggcgctcggaaacctttgatatcagcaagcgggatgccggcgagggcattaagggcgatgaggttgccattgatctcgtccgctcctgcgagttcgatgtgggtcatggtgtggtcggcgatttcatttccgaggccataccactcggtgaccatcgaaaaattggtatacgaaatctgggtgtagtcttgtggggaagtggcgaaagtggaaagaccaacgggggtcaacacggattgagatacagatacaaactcaggcacaaaacactcacaggtcatttttggagaacaaccgttggggtttgtcctcttctggagtaacgagttgacggcgtcgatggtgtacgactgtagggcgtcatcagcggtgaagacgatgaacatcggggtgtctttcggttgaaggcctcctggcgggctggtactggcgcaagcacaatccggtagtttgcagctagctgggtcacaactgtaggccttgatggcttccgccggggcggcaccagcggtgatcgcaccgtcgtcctgagcgttgacgacaaaggacagaaggatcgatagtgagctcgtaagaagaagggaaggaaagagggatttcatcgtgtggtggtcgtgtgagcttgtctgtgaaagaaagagtgagtttgtttatgtatgagtatgacggtgacgatccagaaacgaacgagaggaacaggaccgaacgaaaatccaacaaagcaagacgaagagaaagaaagaagccacgagagaaacaagagtgaaaacggaaaacagccccggctggtttcttcgttcccacacggctcccttcttcctctgggcccctctttctgggaacttctttgtgatcagtcgtccatcgagcttgtcagccgactcgatccggtgtggtgctctggtcagtcacttcttgcccgatgagttactcgtctggttagctctgtttcccggtcagcgcgctctcgctctctccgatcagctctcgttagtcgtgtttcccttcgtcttcccagggcagatcctctttgcccttggcggtggatgaaaacagattgtcaggggctgaattcatgagagggcacaaggcacagttttcgagcggccctttaagtgtccctgaatttgaccggaggatagttaccggtggatcatcaatttgttaccatcaggtactgtaaccatcccccgccggtcgccccacaccgtcacgcctgtgtgccctgtgtgccttgcgtgacacgcctgcgcttgggccgcccaaaagagggaaaaattcctttccttcttcgtctgtttcttccatccaacgaccatcatctctcatacaaccatcatctctcatccatccatcgatcgtttctttctctattcctcagtctttcttcctattcctgccgctctaacgaagcaccatgtgtacgtacgtgtccccgtgtttttctctttttttctctttttttctttcccttccgttctctcgttttgtccttttgcagcgttctcatcatcataccatctcctactttcatcatctgtttggcctccgtcaaatctcgtctcttcacatttctgtcacaccccccttacagacaatggaattggtcttgccacagcaagaggtagtggcaccaacggttatgtcgtgaaaaacttgtcagcctttcgcccaagagaaggcccacccggtggattcggaactgcatccaactttgatgactttcccaaacaccgacaacccgaccagggtattctcgatcacgaacgaaaacgacagattgaggtcaagtgcgtcgagttgacggacgagctcgaagagaaagggttagttgtggc

SEQ ID NO: 2369 - DNA, 11396 bp, Xanthophyllomyces dendrorhous
ccacacgcaacctttcctagacagtgccccctcctacaattctcccgggttttgggggcgattaggttcgcgaagattgattcatacgattcaggcatgttctagagcccgcgtttttctggtctttcaattccggcttgacgaatcctgtggacgatgctctacgaggtcggccacagaaggacccttgccggaagagaatacgacggccgtcgatggggacgtgggtgtcgagcagttgacctacatctctattctttctttctctacttttctgtttttttttcctttgcgactgtgtccttgtgctgatcctaatttacttgcaacctgcacagattcactgaagatcaaatcctagaagaagtcggagctttacgtacaaaactccttgccgccatgccttcttccagccagggtcgtcatttcaaaccgcacgaaacccattcgatcgctcaggccaaggaagccgagcttgcccgaatgcggggtgctttcggtgtcagcaacgattacaaggagggggcctcctttgatagggaggagcaggagcgaattcgggcagcaaagcgagctcaatatgaagaaaaggataggatccgagcagaaaagatcctcgaacaagaggctcaggccgaagagcgaaaggaggaagagaagaagaaacgacgagaacaggagcgaagacggattgctgatgaacgtgaagccgcgagacgaccccatactacgactgttcgggataatgatcctgcccctggctcgagacggccaaaccgagactcacgttcccgttcgcccgttaccaaacgtcgatctccttcacctagagatagtcgttcaccttccccggttcggagacagagagatccgtcatcctctccacctcccagggctcgaagaagacgttcatccacccctcctactcgacaaagacgatattctagcagctcaggctcgagaagtcctagtccgcccccgaggagtcgtgcttaagccttgtttctttttataccccttcccacttggttttttcttctccacccgattgtggtctcgatctatccacgagttgtatctttccaaaccccttgtctaaaccatataataatatctcgacagtgtctttgttcgttctcaatgccatgccttgtctatctgtgtgttcgttattgctttttttaagcgtcgcaaatataaacaaagataacagaactgcatatacatcacatcttttctacgttaaaagagacattgaggaggaggagtgttcgctcgacaactctgacgatacaacgctctctcaaccttgtcccattcttttttactatccggcactgaaggcggcgttagtgctgcagttgaggtggtggtggaagttcggagatgatgtttatcaaacctgtacggcggattaaagaagaacattttcaatacaactctacctcagaacgattcttctcctgaaaacaagagcagaaatggggaggacaaacaagtacgtcagaagatgcgttcgactttccgagatccctcgaaggaactcgaacatgatgatctcatctttcaagctgattcaagcggggtaaagccaagtaggacacaagtcgtccgagttaacacgcttttacttgaaaaatgaaagtaaagataaaataagcacgtacacaagttgagcggccaaggcaagtgtcgttgctgattctcggacagtcacattcgaggcgttcattgcctgtaacacgaaaaacacccgcagtagatgatgaaagaaaatgatgaagtctgtcctttagtctggcgccattccaatgtgtgtgtgtgtgtacgaaaaaagagaagtagaagatactgacgggtatgataagatccacgatccttgggatctcttcctgcaagacctctgctggtaagagcaagaaacatcttccaatctgaagtagaccgaaagcaaatcctggaacaaatctccgatcgatcatcacttctttctcatcgtctgattccttgatgtcggtcgagtccgatgaagcatcggacgtggtaggccaagggaacggaggaagaaatcggcgaagagaggtgacaatcgttgccaagcagtacacgggagaaagttctgaggcgagggtcatgaacaacatgctggttgcttctcgaatctatcgtatccaacgcgcaacgagagtaagaatgaagaagacacagagtatgagagaggcttcaaccataagaactatacagtgttagggatagatacgtacagattgtcgatagatagatcttaagttgagcagaatttcgaacagacgaggttcatatccctcgaacaatgtccactggttgttcaccaaagattctaaaagaaccaagcaccactccaccgctggctcagtctgatagttcagggtccccaatatatacaagtcttagtataggtagtcacatatgaaagcaaactcgaagttactcactgtttccttcttcaagaattcctctatcgaagtgaacagcctatcaaacatcttttcatcatgccaaatctgccaggttggactcgaagactcttgtccactgacaagcgcatgtctctgtgaaaacgagatgagatcccggacagcggctatcgatgacaaattcttctctagtatcgaagatggatgttcaagcgaagatgtcggctcggtcggtatatctttgaggacgactaaacaagttgaaacaaagaacatccttctgtttagctcgagtgaacattctctcataggaatgtggagaagaagagaagtagaagacttacaactcgaaaccgttctccaactaggataatctccagatgtgtctttcagcaagtcgatttgtttcggtccagctccagattcccatgttgctttttgctgaggggattctaagaacccatcgaacggtctagcaacctcccttagcctattctgctttccttgcggcgtccgtgttactcctgctcccgccgccgccgccgcccccaccgctgctgtggtttgattagctctttgatcacgcgcggtggatccaaagataggtcctctcgcccgtccgctgctttggattctagaaaaagtcgcgttcatcggtttcataggggtcgacaggtccgagattccttcgtccagcgacataaagtcctgagggactggaagtgatttactcggctctagtgccgatggtagtttgggtcgaatagaagtttcagctgctgagccaggtaaagttcgagagatgacgcccgtcgaatcatgtttctcttcaagacccgatttgctggattttttttggccgataggtgttgaaatagaaatcgaaggcgatggcggcgcggaagatgaaggacttaactgattggatgaaactgttggactacatgaagatggcgattcagatgcagcagcaatagacacagaagcaaaggtattgacaagagaaggggattttgattgccctggagtgtcaggtaagtttgactcaatggatggtcgtgacgataaactcgacccagaagataaggacaacgggatatcctcatagaaagtcggcggtggaggtgttgattgggttgtcgattgagagttatccaacgaaccagtagacgacatcatgtcttctgagcctgtgccaggcgtggccgatttgctctgcgcaatctttgcctttctttgggcagcaatcagactcttcatatccaccttcgccttcccttgcgtgctcgaactcgccacagctgatttgggcgacaccgcccctttagctacagaccgttgggcggtcttgccctgttcagcctgcaacaactgtttcttctgcatcccatccaacttttcaatcatctctcttcctaacgccggccatacacctataaatgcccaaaacgcggctctgcaagattctctcaccgtgggatttgagtctgccagtccttttctgatcatatcttccaacgtggtcgtccctcccagggcttcgattccgtgtttgctttttacaccatgaatgtctaggtaagttttgcagtgtgagaatgcgcaagaccgagcccgaacggacttgtcggtcgctccctgagtcaaaattgggaggattgttcgtggaggacaagtggttgtgcgaagaaaaacggtgatggtgtcctgtgtttgttgaacgacgagattctttgtgaaggtagccatctttgacagagggagaaggacggtgtcgatgaaagggtcaaatgaggctcccatggcatgagctagagatgagtagcaaaaacaggcggacgtgcagaccgttgttcgaagactagcaagctgagtgcatagaaaagatagtgatcacaatctcattagattcgtgtttgatgagaaactcaggatcagtggattttctggaataagaaatcaactaacagctttcaaactagcctctaaccagccagcccggagacacccaacaaacgtatccggatactgcttgaacgcatctcctttgatcattcctcggacacgaatcatcgatttttcacgtaggaaccaattatgttcatgctctttgccctacagcaacatatgcgtataggccgtaaaagaaagaagacatacacctgtcgtcagtctctttttcgattgaccaacacatactaagaggagatatacgaacctcgaaagcaggaagcatgtctttgaattctgtctctaggtcccgagccgacgcgatcttgatcaacgtgccaacaaggaatcaaccggttgtcagtttcagggacggtagtcgtgaacactgtgttccttagatcgaacttacatagacagtctcaacagattcaaacccgttagggtccgattgtaaagaggtttcattcctgctgtgggttgaaccgcttgaatccacctggttttgccttcgctcgcgaacctcttttccttttccttcgggcttgctttctgattctttgatatctgtctcgttcttactaaggttggtcttgacagaaggagaaatgactgctggctcagtgacagaaacgacgaagactttcgctagtacgctctctgagatcgcctttctaacacccttcaaaccaagaagcttcttgagctcagccttggcgggagcggaagtagtggatgcggagaacatagcgatcaccgtctgagtttcatcaaagagagaaaataaaaacagatcgagtttagacagggtagggcgaaagaaggaaaagataaagaaaaagcagacctacttctcgagcggtatcccggactgccccatcgccatcttccaatagatccaccaacacagccatgtacggcttcagcggaaacgttgagttacctgcgcgaacttgaccgagcgccagaatcgactgtttccgggtcaaccatcgatcggcaaacactcataatcatgtcaggctgatatgcttccaaggcggactgattttgttttgtgaagggtcaagaagaaacggacctgttctttgatccggacgttcttactactcagcccttgctctcgcatcgccttctcccagagattcagtaccgtaatctcctcctttcctgctgccgaccctgcgagggatttgcttgtgagcgcgcttgtttctccgagaattactaaggattctcgagccagctctctgagtctttctcttggttcggcgagtcggtcaattacaccgttcccagttggaagaaatgcatggaggatggatcggagatgagtttgagtctggaaagcggatgagcgtatccgaagcggagagaagaatgtcatgagcttggatcaagatcaacaaggagaagaagaaacagacggatgcgcatacgtgtgtcgtgatgggtaatcttgcaaacgcttgaaggaagatcaatatcgtctgtaatgcttgaccggctactcgttgaaatcatcagacagataaacaagaaatagacctattctgtgagtcctatcgtccaggctgttctatcaccgcaagaggaaaccgaaagcatcatagacaaatgaagaacaacgaacctagttgggtgtttgggtgccttagggagagcttgagacctattatgatatcttcatacaaatcctctgagatctacttttcccgttttaaacaatataaaataacagagtcgtcaagtcatgagacatctgctctttacactcgacagcttcatcacgaggagtaaaatcaggagcaaagagagtgctaacgaacctcatcaaaatcaaccatcgattccctcagctttcctaaggcaagcaccttcccgtcgacctcgcccgttcccggcttggccagtatctgtattatcgattccatctttggccgtctagctctgttcttgttcctattattctgagtaacgtagtatctctcttcttatctttcgagaggagagaacaggaggacaggtaggttgacgagtgggttgtagaaaggaactgccagatgatgattggaacaaatagaataaaagatccacaagaaatggacgcgactgcctttcaggcacgcgtcatgtcttacacccgtctccgcttcaagccgatgtaccactggcatggttctatcagatccgccttacaagcgtagcatatgattaagaaaaagaagtgttcattgatagcatggaatcagagaagatctcaaggaaacacagagaaagaggctgaaggaacgaggtagcagagttgtgacatgcgtattgaaagaaaagatcgcggagaaaacgagtgtccgttggagagaggtgtacaaagagtatataccgtagaaaacgtccttatgaatagaagaagagaaagacatatgagcgttgcagtggaaatgagcaagcagtgagaaggctatctcattctctacagcaaccccaacacgacagcgataccgacagatccaccaaggacactcaacataacatgactaccgctcaatcggattttctctggagcagcactcgcccggtagctatcgtttggtccagtattcccccctccactcgcgcccggactgggagcagtggcactttgaccaccactgatgaaggaagatgcacgaggtagcgtggtagccgtcgtgctctgagaagaggcacttgcctatttggataagaacacccaagcccagggtcagcaatcgaattacatgagagaaactcaagagaaagaggggacctacgctctgagttgtgcttgtggcatttgaagaggccgtgatagtgaacacaacagggacggagctcgtgacggctattcgtgatccactagatacggagacaccttgggcaacctgttgtgcaatatagtttggaggtcaattacggaggaaagaagggattttacggatgaaacaatcgagtttgtcaaggagagcaaaccagacgcagggcatcatatgaaaacatgcatgagcaggtaaactgaagcgaaggattccctgtgatactatctctaagagccggagtatataaaccgacttccaagaacttacgctatagcttgtagacaacgagacggaagcagaagtgcttgcagtagagtttgagcttgtgttgtttgatgaagaggccgagctagatgctgagctagatgccgagctagatgctgagctagatgccgagctagaggctgagatcgatgctgaggtggaagaagaggtagtggactgggtggacgaagccgaggactgagattgggattgtgcaacagctgagagcggtgcaagaatcagacaaagcaatggaagagcactgggaagatgcatgttgagagagcgagtgatgcagagagtgagtgagtggatcagttagtcggtaaggaaggaagtaagggagcgagtgagtgtatggtcaagatgctgaaaagaaggtgaggatcgggagaatataaatcaatacgaaatatctgtagtgtgtattacaaatagtttgtattggattctcaaaatcgcttgtaatacaaactttttgtaatgcctaattaggaattcatcgaaaaggactacatgaaaaagctatgctcactcgaccgcccgtcatctctccttcagtccatctggtccatcttgtcgactttcaaaccatcatccccgtccatctctttcaatcgtcatcgtcaatccatccagtaagtttgttcattcgtttgggctcatctgtattgaacaagtatttatgctgacagatcaacgttgtgaacgaattgtctcatctccctcaaattagaatgtcctacgatagctcagtccctctgatcgtcgacaacggaacgggggtacgtgttcatggtcgtgcttcttaagcttgcattcgtcttctctacttcctcttgtcgttgtcatctgctctcggcacatcagacgtcccggtttgaattcttgtctcactcgtgaaacaaactatcactttgcttgagtacagttcgtgaaatgcggttacgcaggctcgaactttcctgaacacggttcgtccttccatctcgtttccacttccttgggtcttgataaattatcagcaattcaacagagaatgtcactttgctggatatcatatctcagtgtttccctcgatcgttggtcgaccgattcttagagcggaggaacgactcgggaaccaagagatctcagatcttatgatcggtgatcaaggtaaacacatttcatctttgttctctcttagcctctatgaagcgctacaacatggctgacttcgattttctggtttactgataaatacatctgtctgataatacagccgccgagcatcgatcgtttttgaatgtaacccatccaatggagcacggtatcgtcaagaattgggaagacatgattcatctttgggactacactttccgagaaaaactacaggtcgatccggccggacgaaaagttctgctaacggaaccgccgatgaacccgaagcgaaacagagaaaagatggcggaggtcatgtttgaaaacttcaacgtcggtggtgtctacgtcgcgatccaggctgttctcacactctatgcccagggttcggtcgtctcttttgctttttacatcaccattaaccatttgcctccgcaaggctaacctctcgtctaccctaccattgctcttggatgcgaaaggtcttcaaaccggtgtggtcgttgactctggagacggtgtgacccatatcgtacctgtctacgaggggtacgctctccctcacttgaccaggcggttggacgtggctggtcgagacgtgacgagatatttgatcaagctcttactcatgcggggttatgcttttaaccggactgccgatttcgagaccgttcgaggcatcaaagagaagctctgctacaccaggttggctcaaactatcgatcttttcgctctgcgtatagttctaccctcttcctgagcgcttatctcttccttttttgaaatatatagttatgatctcgaacaggacaagaggttatcagaggacactaccgttttggtcgagaactatactgttcgtgtatcttccttctcatctactcgatgtgtgttagtttttgttgttgtgagatatctcatgtttcgttcatcttctctgtcatcgtctagctccctgacggacgagtgatcaaggtcggctcggagcgattcgaagctccggaatgcatgttccaaccgcatctggtcgacgtcgaacagccaggcatggccgagttgctcttccagactatccaagcaggcgcagtcgacattagacaggaactgtacaagcatatcgtgctcagtggaggaagctcaatgtaccctggtttgcccagtcggttggagaaggagatgaagcaactctatctatcaaaagtcttgaatggcgatgcttctcgactcaaggttcgtttgttttccctcacattcttttcttgatcagctgactagacaggctgaacccgtcgtcttttcgttcaatctcgcgtcgttaaattcaaacagaactttaagatcaggatcgaagatcctccccgtcggaaacacatggtctttttgggaggtgccgtgttggcggacatcatgaaatccagagaagaattctgggtgtcaaaggccgaatgggaggaacagggtgttagagctctcgacagactgagtcgatcagaatgagcgttgtctttggctgggttagccgtgttcgttctttgtgtgaaggacttctttttctctttcctgtcctactcccttccttccttctgcctttattttcttcgtccagcactttcttctcgctccccctttttttccctcctcaagccgttgtcgatgatgtcataagaacaagcagaaggatagatggcctttcttcaatcaaagtcgtcctcatacgttatctctcaactttcgccttctcaactcatctcgctcactttgacgggcagaaagagggagagaaacaaacatatatatatatattttcaaagatagataaactacctcgaaagtaacacgtgaatcgaacgaacttgtgtatgaagcatatacgatagagatagacccgctgcgaggagggaagagaaagaagaggaggagatgaacgagaaccagtctctgggcaaatttatagaaaaacaaggagtaatattatgaacgagtcaaattagaagcgaggaaagcaagaggaggacgaaggaggaggacgaaggaggaggacgagacaagaagtaacgtggtatggatagaagaggtgaaagaaagaagaaaaaaaaacgactagcgttcgatggagcgaaacaaaccatccgcgcgaggaaatcacaggaaacatcgagagaaggaaggaaggatgtactaatggctgagagaagaagtagacagacagaaacaagagattctcagtgattctttcccaatcgactcttcctcactttctttgagccggactcctgccttgatcggaaatccgactcgtcaagctcggccatctcctctcgaaggagttggtccattgcagcagtcgtcacggatgtcgatgtggagaggaaaggaaccaatcttggcttcaatggaagaggaagggaagccttggcctgtataaatttctctcataagcttgtcagaaccagttccagtcaactataagcaaattgatgaagtaaaggacgaacgacggatctagatgcgtgaatgtgagcggaaggaacactcttttccacaacatcggacgcccagcccgctccggtccctttctcggcagccgattgatttcggatccgtccaaatgttcgaagggaaggagggttcgcaggtgtcgctcggactgtgtcgggaccgaggaggaggacggacagaagaccgagaaggaggatgagcatgagaggtgacttggtgtgggacatcttgatatatgtttcttttc

SEQ ID NO: 2370 - DNA, 44846 bp, Xanthophyllomyces dendrorhous
tatgtttcttttctttttttgtttcttttttttcgttaggattcaggttttgagtctgttcttgcaatttgctctgacggtggagagttcaaagggggtagcgcgggtaaagaatgtgagaagtttgagaaaagctcggctagcgatactttacgggagggaatcaaggacgagaggtgaggcgagatgtcaaccagtgatacacgtataagggaaggatggtaggggaggggggagtgagatatagaggatggatgaggacaagaagtagaagagaaggaaacagtctatatatacaacgcaaccttctccccgcttcccttccccagtctcgagtcttctactcggaagaagcgaaaggaaagtttcagggatgttgaacgaaacggaactggacgatcatccatcatgttggatgattgttctacggtttcacgaagttcacttttgagtatctggggttttatggacatacatgggctttcatggtcaaatctggggttagatcaagagataagacatcccgcggatcatacgtaaggtatcaaatttaagttaagtatatctcagttggcccgtcgttcttcaccgcgtcgctccatactttatcactatctcgcttgcattcacgccccaactcatcatcacaccatcccaccagcagcaacagcatagacacactcacctaggcacacccacagatacacacggacacatagatgtctcagcctcctcctcctcctcctacacgaacggtccccgggccagtgccgaaattttcaacgggctcagctgcgcccgcgaactctacatggaaagcgaaaggaaagacttgggggatggcagcgatggagaagacgatccaggtgtcggactgggcaggtgtccggattaatggggtctctgagaaggtacgcttttcaagtctgaggatacctctctggcgtccggagggtatgtccaaaggaaggctctgactgatgattgtcattctcacgggttaatccgaacatgattcgcacatgcttccctcaggtcggtgggaagaggttttggcccaccacaggtgatttccctcaggtgagctagccttttcagtcgtatctctggaatccatcttcacaaaagctcatcgttcgagatatcgggactccctcgtttcaggaaatagaaaagtgcgctcagatcttgcgatcgttcacaggttcggcttcactatctttctgtctcagctatcagccaccattgtctacgatctgaactgaaagtatatccctcttaaatttcgctcttctcctcctctctataatgaatctcagtggatggaatcgcacaagaggaaactgtcgaaattgaaggcaagaaaaagccccgtcgggtgttccgaaagattcctccagagatcatacagcaggcatgcggtcttgcgatcttcaccgccttccgttccggccttgcgcctcttggaggtgccggtggagcaggcatcgtagtagccaagttatctgacggaagtcagtgcatttttctcgtgttgcgtgctttctttttgatgatcattcctggaatgaatgctgagcatgtttaaggttcgtgatctccatatgcaggttggtcagcgccatcggccatgtcgcccaacaacttgaccacaggtgagcaaggtttcatcatcaggatctgtcagacttgtgttgtgtgtctctctgacagtgataatctcttcgttcgatccaaactcaggcttcatggtatctatctttacttttctttccctccttcctgctctcttctaaaccttacgtttctgaccgttttctttccaatcgtcttctgctctacagattggagtcgacatatacgatgctattctcgtcattcgaacgccatccgccctcgcttcgttttcgacccacaaagctaccctaggaacagacatcggattggccgtcggtccatacggagcaggcgcagccgtagaagctggtttggagaaagcagcagtgttttcgtacgtgaacagtagaggattctacgcaggcgtccagctagtcggccaagtgtttgtcgatcgattcggtaagtctgagggatgagtggatgattccttcctttccttatttttgggatggacaacaggggcgtacaacgctaacaacatttacttttttgacttgccaatacagatgagaacgccagggttagttatgggtttttttttcaaattatgtgatagttttaaattcatcgctaagcgcacacccaaacaccttgcttgtacctcactatgtagatgtacaactggccagggtgagtactcaatcctggttgatacttcagtcaatgccagctatctgaactttcttatgcttctcccctcctttttttttcttcctctcgtccacgcacatacaacttttcctcagaatcaaagcagctgatatcctttctggccgagtcaaagtcccctacgaagcaaaatctcttcaaatcgctctacaagaagccacatccggtcgagcgcaaactctcaaacattccactttggacgttgtggagcttgtgcccgaaatacctgatacacttattcttgaggacggtgagatcctgaagctaccgccgacgccgactgcttctgatgaagcttgggtgagggatcctgatggtgaggaggttgagcaatttgtcatcagggaaggtgagagaaaacgtttgaaggaaggttggagcggggaagtcaatgaggttgaacagcgttccggagaattagacaagacactggacgcgagtgatggacatctcttgagtcgaaaattagagaatgtaaggatcggagatggaccagagcaagatgtcgaagtcaacgtcgtccccatctcggcccctccgttaccctcccgagtccatgcggctttagccgatcatcaagaagtcgtggatgcagcagagaaagaggggaaacagaacgctccggcgttaccgaaacgatccattcctcctcctctaccttcgcgaaaaccaatccaagcttcgacctcgaccgagggactcgctcacccggaacttgcaccagaaacagagacggaaacagatctcctaggtccagaaataccgagcgcattaccttcatcagagacgacagatcaggtcaaagaggagaacggaataccattacctcgctcctcatccccgccgccgccttttgatgcggtcgttcaagacgcacacgagtcagagttacatgatgtcaagctatgattttactctgggccatctttctatctactgttgccctatcttgaaatcacggcatgctcctcctcaagtacatggtttctatctgacaactcatttgaaaccatgagtatgtgccttcttccagttctcctcatccatatgtacgctcgtctctgagtttgttcttggatccagttttttgtcaggataaataaattgaatggtatatgatcaaaaggagccaaccccatcggcaaaggcaaaagagagcaaggtcgttattcatcagtgtttactacatccgctaccacatatcgctattatcgtatcaaagcagacactacatcaacaaaaattagagataaacaagacaaaagaagtgaattccaagtgttttcattacaggatcatgaccgtctgacaacagctagtacgaaatcatctccccaccaaacccccttccattccacaagtcttacaatctccttccacgattcttcgacaaatctctgagcgatcggttctcgatcacgttcatccaagaacacgacatagtccgtaggagtgaagaaagacctgataagcgaaccaaggaggaatgagatgaacgctatgaacaacatcgttgggaaagataccgtggcgggaatcgccgtatgagaatattgtttgaatgagcgcaaggcgagagaaggcgcaggtaaggttgggcgaggcaaattttctggaatagcaggtagggtggcggcttggctagggtgttccttggtaggcgtgacctctcctccgcctcgacgggaaagaccaaaaaagttgaaaagaggggcagacgcgttactgattttgcgaagtggcaaagtaggtgtagcctaatgtagaaaatataaatgaaatgttcagtggacggccagaatcatatgtcgtctgagaaaagcaacttactggggaactttgtaccgtagcggtatccccgatctcagtgggtgtatcctcctcttccgtggattcaggagccgtggcaggattgtcgtccgtgattagctccaatgcagtagcgagtatcggcaggaggtcctctgcaacagcgatgggattcaagagtgaagaaggaagagacagatgtgtgtccgtagatgccggtgtgagagctgcgtctaatggctcagataatctagtttaatgacatacaaattgaaagaattagtgtttgtctactatgcaatgatgggacacgatacaaattataacaaaaaccgaaccgttcgagtttgggccactggctgaaccgaatttcatctggctccacatggagcgaagctgaaggcgatcctatacccgaaacagcatctcttcctaatacctgagtcatagatccctccactgtgaccaagatctggtctggttcatcataagcctgtcctgctaatcgatctactccaatctccactatagcgcccttcagctctaacgtttttaaccaattaggcttggaaggctccgtcttcgatgcatcccgcagtggatcttgtaatgggggttgaaggtgatgtgtggtaggaagcgtgatccgaacaagatgcttcctgctcggtcgaacaggagtcaaggaagcagaatggagaatcgaaggcgggagagcaacgatgaccgtcctgaagggtagtacgagcttcttaagattaggagaaggatggaggggaaggcgaggtggagggataggaagatcggacgatgcggtcacagttgtggatggcggaggtaacgctacaggatcagcacctacaacggcggatgaggtgacgttatatcccgctggaaattgaccagtatctacaatgaactctgcgacgacaaaatctgtcaagtccgataaactcttcagttgcgatcctacaattgtctttgtcgacgacaagctagttgatgaatacatcgaggacagactagggaccggacgaatggtcttaatagttgaagaatcggatgagattgtgtctaggagggcttctgggctatccggcgaaggaagtctcattgataccgatcttggtatcgaagggcccgcgcgtgaatcaggcagaggcagtcttcgaggagtgctttggcctcgcttgtattcttccaactgaggcctaatgagaatcgtcaaccgatattcttgttcgataggatctagagagtgattgagcagtatattctcttcgtttacgtcagaaagcgaccatcgttcgttcttgtttgaatttgaggtgggagtagcaatatccgattgaaggttacttagtttcaagccagccgggggaaaccgaactaaaggagcacaaggctgggccttgagataagactctagactgagaagaatcttaggtagagaggtgttgattgaagaattaacaacggaaggaatcgagccagtgtaatcgatagcagaatagtaagtgcatcgagttgaagggatggtgtactgttcatttccgtagggatccaaagtctatatccgaatagaaaatgaaaacatcagcttgcagttgaatatatatcaacatccatgagtagacccacctccataacccaaccttccaacagtagccgaccaataggaagtccatccggattcagcttttcgatagcaaacttagaagccgcactctgagggtatgacgccgagaccagaaacagagttgatgtcgatgaactagtcgaagggcccaatccgataggtgttgacggagcgcccgtgtgctctccttgagctgataccgtagagacaaagaaccctctgttcctgaacggaaaagcacactttgaggtataaaatgaggtggagcacccgttgccgtatgattctaaagaaacggacgattcgaatctgtcatcccaactcggtctggcgctaccgtttgagacgacgcttgacacgtcctccgcggttgacccttggaacactttagacgcacgataaaccgcatgggctgttgaaagagaaggtacgtttcgtttgctcacaaccaaaccatctttctcagtagtcgacgtccagagttccggatcaagccgctgaaagtagagctgtcgaacgacatcaagaacctccagtgcgggttgcatcgcatgagtggatggaggggccggaatggtcgtaccgacagatggtggaggaggagtgacatgagaagagttggcatttggagtgaaccaaaggcggctgaaaggcgtcgccatctgaggaatagtgtttcccaaagcagagaagactggattatatgcggtcaacgtttgcgctacccttgatgggttcttgatcgacactgttgacaaattggggtcttcaaaatcacccgtcattcggcgacgtcggatcacccccatcactggagggcgatccaatggagttcggttcggtttcgtcctcttttgtttggagagtagtttcacctcggtctccggcaactcctctacatcgaccttaatctttgttccattcacagtaacaacgttcttgtcttttgcactcgacgttccttttgagacgatgatcaacacatgctcctcccccaaaacgacggcgtcatgttcgatagtgatccatcctccaccacctccagctgagagtcgatgtcgtcggagacacgaaaccgattgaggcggaggatcgatcactaatttcaggctattcgaccaagtgtcgaagtcgcatcgaatttcacactccacgtttggtaccggaccaatttctggctcattgaaactagctttcgacgatacgttcgaatcctccgaaggctcacttagagattcgctgggtaatgttgatagaccagagacgatgttggatttccgccaggaagcaggctgatactcgacgcggaatactgatttctcaagatcaaaccttgaattgagtaccttggcatggctaagccgagtgactacaggtggacccccagactttattgtgaacgagcctattccagccagagctatgattgtttggttgtagtaatgattattttcatggtcattctcaagtcaacagctagctcgattgaaacatgatgaaacgtaccagtagccatcgtttgtgggattgatgtcttgttcgaccaacccttaggatccgactgctcgagcaacgtaacctgagttgtcgtcggtgatagagcttcaattgaccagccttgcagatcaacttgggttcgaataatacctgattcagaagcaggaattgcaggaaacaaccctcgatcatctgtcgagaaagaaaatatatggacactcgtaggtgacttgtagattgttttgagaacgacactgtccctggcgctattggttcgagggggtagggaaaggtgaggaaaggtgttgatattaatcgatcgatgcaactagcatgatgggagtaaatgaggagcaatagcaagctacgtacgcgacaggccaggctgccttagatttccaccaccaaagttcgctcaactcgttcacgtcctccaatagaattgcatcatcaaacgtcttgtcccaagcagccctcgcccctgggctgttaatagctgccaggagatcccagatgcctacgccaacgaacacagcttctgcccgatatacgactagtgtgggatctaacgagtccaactgatggacagatacaccttgactggcttcaaggatcggtttccatttggcttccggttcttggagtagtgaagtaaaatcttaatagatagccgatattcccaactcgaaaatatcaacaccaggctcatgttgagtcaaatccaaggcaaagactgagaggacaaacgtacagatgtagcttcttttaatgaacccagccactcctctctcagccttttctgaccttcccttcctcttttctccgttgccaaccactccattaaagggtgtgcttccacccagtccgctgtccactgtttccatcgtccttaaagacaccccgctcagactggcagtatcatctcctccgaatcctctagagagcctcttgttcgcctctccggagattcctccggcttgtttgactgtcagatccttgacgacttgcgggatgccattgattcggatcgttcgactcgacggatccctcgcaattgagactttgaatcgagagagttgagaaggatccgagagcggtggatgggttactctcagcaagagtgggcgaacggacgatgggttcacgcccgtaggagctagagcgggaggcggcttgccaatgatggcctcccaggataaacccggatctgtctcggcagccagataggatttgacagaaatttgaattctccatccttgggaagaaggtacatcaaactctaccgttcttcgtgtgccgtcgtccttccctttgtcgtcgacggatttgatttcattttcgtcttcttggtgtacgactgcgtactcgatcgataatgtgtctcttcctctgtcaaacccgcttgaactcaagctgacatctttgccacacgcggtgagcagaggaatgtttccaccgtttcctcgagcttgatcgacgagatttgaaagcaagtccgggagatgcgcgccgatactggaacctacggcccaagttcctcttgggttccattgccaaaaacacgttagttgaactcgattcccgctcatagtactcccgccacttggtagaggtagggtatcagatttggaaggaggaaattgaacacagaacgcgagaagagagaccgtcgcccggacatagggaggtgcaggtcgtagataggccggttcatctggcgaacggggaagggaagtcgaaatattgatgactgtctgcgcatcgctgaacgttttggagattgtgatggtatctcttggactgagacgttcaagccagcagatgaaacataaatcacaacatcaggatcaagatcacagagtctcgttctgaaaattcctgacaagattaggtagccagaaagacatacctggaaggccatccaagcttgtaggccgttctgacaattcgagtctcacaatctaggtgttcgaccgtgtttgctgattcgaccatactatcccctagagttcgatccacgccatttttcaaagctgatcagactcgacttcaaactcctatacttggtctcaaaagaaacagaaaggaaggggaaaagaaaaacgaccacactcacatgcgcacctgacctctgctgtacccaagagcgctctgaatgcctcggcctgtaggccctcgtcgtcgtcttccccggtttcgacctcaagcatggccctccatacttctccacccttaacgctcctcttgtgaagctggacagctccttctgacaggcttctggcctttcctgatgctgacgacgaaggaccaccgatcgacgtaccggcagatgagccaacggcagcaccagtacccgtcccgatagttgaactagtagaggacgctacagtagagtatgatgatgacgatggcgatgacgatgaggagccattagggagggtgaccttcttccaagattgagaggatgaggatgccaggagagctcgaaagtatgcggtggaagtgtggagggtggacgtatacgattcgagaagtctgagcagcaacacgtcgcgaaaggagagaaggatgtacgttagagaacagactgaaagacgaattcaaaaatgacgagacacagatctgaacgtagagaacagaatagggagagcaacaaatgtccatgggatgggtatcgacatcaacgagaaaggctcacttctgaccatctgattgagggtttaccatctgaacctttggggagtcgatactcggagagagttcgtccttcgatgttattggccttcgactatcgttcaaaaacagggtcacacggatgtcaatacgatggaccagtagatcttctcgagaaggaagctatgtttgatgtcgagagcaataagatggacagagagaggagaggcgaaatggatgtgttggagtaaatccttgtgagctttgctgttctttcgttgggtatccggaaccgtcatcgttcgactttctttttcaaatatctcttctgctttcttgttcatccccagaccaagtcatctttcaactttcatttcaacaaccagaggcaggcaattccgctacagcaacagcaaacaaagagaccgaatgtggaaaaaaaaaacaaagatgagaaaaatggcgaaggatatggtgtcttgttacaaaaattgatactatgggataggggtaagagagagacacagagagctgaagctaagaagcggaagaggatagagcgcaagattttaacgctacatcacaaggagattgtgcaagatagaatgattcgttggtggtagaaactagaggattgaaatgtataagaagagaaaaagcccaagttgaagatttatatgctgatggagacaacgtcaaaacacaggaaaggcagtaaagaaaagctgataaggggaatccaacgaaacataaaacgatgcacaagaggtaaaacggtataaggaagagaggaaacaagacagagtaccaaggggagcaagtcacgagactaagcaatttaggaggaagcagcaggctcggcagtctcagaagcaggaggaagcgggttctcaggatctcgctgggagtcaagagcaaccttgacagcgatgtttcgctatttggtgtgcaagaaagatatggtgagtatacgatacaagaagtgagacgatagagaactaaatttgttatatataaaaaggaaaactcacgccatctagatccttgccgtcgatagacaaagccttctgctgctcctcggtggaggtagtgtcgacaaacccgaatcccttggatcgcttcacaccaaactgcctcctaacaattcgagcagtggcaacagagctagagggagaaacacgagtaaacacatgatacaagtcaaatcaagggaaaggaaatattcagacaaagaattttgccaacgacttacattccagactcggtgaagagcttgtgaagaccttcgtcgtccatggagaagggaaggttggcaacctaacagtagtatgaacagaaggcaacagagtgcaggccgcaggattagtagtctgtcaagggcagtgcgcaatgattctcaggaaacagagcgtacaaagacgagagtcttgtggggctctccagtaggaggctctctgggagctctgggagctcgctccttcttggctcggggggcagcgtctccggactcatcatcgattcgggtcgaaggagtggccttctttcgtcgggcagtcttaggagcctcagcctcaccctcggcaggagcagcatcagtctgagaggattcaccctcgacagtggcagcagtcttctttcctcgcttcttgttaggtcgctacatacgcatatacccatatgaaagaagcgtcaacacgtcttcatctcgatgctgagccaatcggtaagctaaaagggtcaaacgaaccttcttggtcttgggaacggtagctccctcagccgtcgaggcctcagcaccttcagtctcctcgccgtcaacagcatcctcggctcgggcaggtcgtcctcgaggagttgccggcttcttgtttcgaggcttcttctccttgggctgcgaaggtcgggcaagctcgacaacgatggctcggccctccacatctttaaggttcaaggaacgattgtggtcaacgatctgtcaagactaaagtgtgcgaaaagcaggagagaatgaaccaacccttctggttcaaggcctgaacagccttctcggcctcttcggtcgacttgtaggtaacaaacccgtagccggaggatcgctgtcctcggaagacaatctgagcggacacactgtaagaaaaggtacgaaaaaaagatcagcatgaatctcttccacttgaagtgtagagagaagatgaccaggagacgatcaacatacatctcgccaccaacaggctcgaacagcgacttgaggtcctggtcagtcgccttgtagctgaggttacccgcgaagacctatggggaagagaaatatcagaaaccatgatgttaggagctgcttggtagtgtgaccctatttgatatcgaccagagagaaaagttctttttttgcgatggaaaaagggagggacgagatgacaagaatagatcagaagagtggcgagaacaccccaaactgttaggtcttctaaggtatctagcttcgctcgaaggatgcgatcgatgagagtacagttgagaggagggtcgtgtcgcgttcgattgaagtgggtgggattgacagcaagatgagatgaaagggacacggtggcgacgttgccgatactgatctcttttccactcgtttctttgacagatccatcagtttcttcctggtctccagccatgagatcttcggtctgaccattagatagtcggtggacgacagaggaaggaaacacaaagttgaaaatacaagatcgatagatgaacgaaccttcacaccatcctccttgggagcaggggtagaagcctcgggggcagcagcctgagacgaagagacaggctcattcacggcgttggtagtttcttggggagcagacatgacttgtttgttgaattaaaactggcaaaggctgggtttatgtttaataagaacgtttggttaaggaatagaatcgaaacagcaggcaaacaaagatggtcggtcggtttggtcgttggtagatggaatcggccagggaagaaaaaaccgaaagaaggcgaagaaggcggtggaaaaactaagggtggttacggcttatgtaagcagggatcttctggcggtattgatggtactaacggtgatggtagtcattgttctgctggtatatctttcttttggtcttgcgccttagacctgggttgatgtttcggttgtacatgtgtatatggatgagttcatagagatcatcttgtgtgctatgttttcatttcttttgggttagacgtcgagttctcaatgagtgtctctttgggcgacaatctggttgttgccgttcagtcacacatctttttaagtatgtatcgggcattcagaacgtacttcctttgtctcttcataagctcctgccgtgcgctatgcacctccaactagagtggtctgttatgcttcctgattgttcgagttgatggggtctgtgtcttgatctgctctgcaacctgagatacttgctctcagtgttagggttgttagacccgtaaccctaggcacacacgatcaaccatctccttcatcgtctgatggagtttccaattatcgagcaagctccctaacgctatcaatccaatcatcaatgtctgctcctccaacagcagtcgcatcaccagcaggaggaagaggaacagggggtggaggaggctctcaagaagaatctactgcatccaccctatggtcctatgctcgcacggccatcatggtctacgctggttctcagatcatgaacaagctgatggccaacgtcgttagtcttgctctctcgaatcgaaccgactgaaactgtatggaagacaatcatgctgacatcagctgagaactatgtgacccagatacctcaaccaccggctgccgttcctacggctgactcggttggtgagtcggcctcgggcttggctggagctccgctggaccctcggctcaaaccgaaggcagaccccatcacctacagacctgtgagtgatgcctttcaaatcttgtctggccttattaaggctcaacatagctgatggaaagctaatacttcattctatacggtagttctgggaagagagtacctcaatggacatgtctgtattgtcattcagttttcttcttttgtgagcattgctcctgacgttgtgttccgctcatgaccaacaggtacatctacttctccacatccccttcgggcgatgtagactttggtcaagatggaggctctccttcaatcgtatggaaagatctggtctatggagattggaagatcaatgatttcaaggatattcaagtcgatctgcctgctgtccgtcgcgtcccttggtctctctatttctatacctaaaaacgcgtctagacgctaaaaaccgcgtcactcttcactttttctagtccgtccaacgaaacgcgtccctctgggctgatatcttcttgacaaacggacacgtttctcctgatccgtctgatccaaagtacaatgccagcgctgttgctcactctcgaaaacgtacgcccggtctcgtttgatccatcctgttctcaccgtttgtatttgctcttaccgtttccgagaatctgttatcagtcctcacgcggtacgcccctaagaagaagatcaggaaggagaagagcttgattggcggtaaggatgatgaagaggaggaggatgtcatccttagtctagcacagattgaggaagaggtgtgtaaatcgcattctttttcttcttcttctttcgcctggccgccgggtctctcgacctgatcatctttcgccgtttcttcaaatggaatctttacagcacaagacgacaccaatcatttcgtactggcatccaaacttgactttagccatcgtctctgatcgaccgaatattatcgagcaagccttgccgcctgattcgaaggagttcgttctgctagagccaagtggagaaaaagacaaggagggaagactcggccattatcccatcgtctatcccaatgagtgagttcttatccttcacttccctccctgttctttcattgatacacaacttatctgacgtggtactctctgtcctttcgtccgttcagcttctggaacatgaaggatcaattgattgagatcaacagcacgacgcctactcttcctttgcgcatctcgatctactccatgagctattggaagtttactatatattcggtaagagacatctgccttccttcacatcctgccaagtggagtattgcttctgggtctgttcaaacaattcaatcttctctctttctatcaactgtcataacagagtgtgggagctggaatggagaagcaggcggcagctcaaggtggaacgggcggagagatggatgagttcaaggtgtgtacgaacttatcgttctaagtaatttcatgttgtgttttcgtcggctgacatcgcccatcttttccccctggttatatagcgagtgctggtcgaggttcgtccctttgtcgcctatatcactgtattctcccctgatgtaagagtgaaagcatgtcatgctaaccgatgatgtttcctttgttgcctacttctagaccaatcctttcctgtccgtcaactgccgcttcagcctctgctgttattgagtcaacctaaactgactggactttggtttccctacaggttgggagctaccgtcttggtatccatccttcacatgctcttcgagttcttggctttctcgagcgatgtcagccattggagaaagaaagacggggatatgactggagtctccctgagaacaattctgacgaactgcgtggtacaagtaagagtttcttcaccttgtgcgcatcccaagaggaacgtccaaactgactcttggacaaatcgacacgggtcttgttccctagcttgtcacgttgctctacctgtacgacaactctcaagaaacttcttggatgatccttcttagtcaggtaaaatctgtagaactttttcaaaggatcgtatcggcctgtcaactgattcaacatcctgtatactcttcccccatcagggcatggggttgtttgtagaagcttggaagatcacaaagatcgttgatatcaagttggttcccaggtctgccgagtctcagtctatcttaccttatcggttggcgttcgaggataagaaggtgttgagcgaggacgagcgaaagacccaggagtacgacgctttggccttcaggttggtcagctacggggctatacccgtgttgatggcttataccgggtactctttattctactcgaaacatcggtcttggtactctttcacaatcaacacactcgctcaagctatctacatgtccgtatattcattttctccttctcctctttctcttcttctctttgttcggccagggtttccgcgagagatatctgactgatactatgattcatgacaggtttggtttcgttcaacttgtgccccagttgatcatcagtacgatctctattgtcgttttcacgagtgtgcgcgtatgcgcatgatgttcttggactgacaagaagttgtaacggattttgctcttgcttgtcctcttggtagactacaagctcaagtctgttgctcatatggtctgtcttttcaaacctattcactgttactctgtttgttttctatgatgaacatctcatctcttcttttgcgttaaacaaatgatggctgtagccgatgaaagccatggtttacaagacgctttcgaccgtggtcgacgatttgtttgtcttccttcctttctttccttttgcgtcgaaagatgtataatccgctcacgcgtttctatttcattattgttgtcccacgtgttaaattgatattggacacgaatcgacattgttgttatttactgtcattgaacggttccgggaactcgataaacaaaaatacaaaaatgaaacactagcttttcgtttgtgatcaagatgccattacttcatcgactggcctgtttccgagatgatgttgtgtttatcatcctgctataccaacgatggatcgtgagttcaatccatcgaaccggtggttccatataccatcttcggagattttttaaatagaacatattcggtcgaacgaggtttctgatacacacatacacacacacacacacgcatttttctctcgtccggatttgaacaaaagtaccgagtggacaagacccgagctaatgaggtgagttcgtttatcgggtttctcatccacgttactactttcgactgaacaaagaggttttccttctcttccactttctgtttgcaatcttcatttaaattatcgaatcaagtacggccaagtggcggtagaccaaagtgactcagattctgcgcccgagggattatccggagacgtcgattcagagacgaagaagactaagtagagaaggagagaagacgatataaagcaaaggagaagaaaaaacaaacaaacaaacgttttggaaaagatcatgttcataccgggtcgggtgggtacacgtggctgtgttttgtttattatattctatcttcttcatctcgtttccataatcttcttgtttttgcatattgtttatgacccgggatgagatgcgatgagacgtcttggtgtgtaatggcgagggaaaccctaaactgaaggtgtgttcaattatactatctacatcctgtctatcgtcggcgatgatgatgaagacgaggagagagttgagaagcgagaaaaaagatacaatatatgatgatagtcaatagaaatggctgacagaagatccctactcgatcaatttgtctaaatccaatgaggattctttcactccggtgaattgtttttcagctgattccatgattacggtcccattcacccgccgacacaagcctctaccatgactgtttatttcatttatgcattcacatttatattcacacccatctttatatatatttgtttactctgtcacatctcgggcgaggagttgggatatcaccagaaggactgtttccccctctctcctctccctctatcgaaccctggcttttaccgtttcatctagattgcatcccaaatttgcatttattttatgaatccatccatttatctcgtatctggagcaagcaaggtatgagagggatacgaacaagaagagaaagttgtaatccacggaaggacggaacgacgacaagaagggaaggacaagaacaacacaagaggttatgcatccgagaacgtttattagtatgtaataccaagttagtaccattagcgatggacaggcgacaatgagaatcatggaggatgatccatatgatacagcctacaggatccaggattctcaagttctgatctctttgaatttatgactcatgacataagacctatcaaacgaagactccgagctttgatgggaggccaacgtcgagagttgagaatttgctgatggcttgccagtgtctctttaactcgacacgtttttctatgaattctttccgagagatgagatgagagtgacacgagaaacaattgcggtaaaaggtgtaggcgagagcgcataaagaaggaagaaaaggctagagtgaacgggagaagaacgatgaagcgaagcaagagccatagagtgtaggcgagatgagtgtagagagacgggattcatgggcacctcgatacacggacccacgccaaaagcgcgagatgaggcatttgatgctggactggtgaaaggccatatctatgatcgatcgacgccacgatcgacaatttcagctttagatgatctagatcgaccgagatcgacggtctggattgcaaccgaatggtgctgcgcaggtgttccgagggaggaccgatcagcagcgggccgccaagttatagctaaaaaagaccggtccggggacctcaaccaccggaatcatgcgggtcacgacagcagctatctacgaatgttccgggagaaggaaccagatagaaggaaaagcatgaaaaaagctcccgagcggtccctcttcaggtgccgaggctagagtccaccctctcgtcgattgccgcggttgggcgcccagattggtggcataatgagcactcacgtgtgaaagagaagaaattgtttcctagcccgtcgccttctctgcctttttttcttctatcctttcctcttagctttcctttcctcgccttctcgccatccgttcttcaaagcattcagaggtcgacagccaaacataaccgaagagagacatagcaagccggtctgtttgttggtcaaagaagaaagaaaacaatccttcttcagcctttcctctttcgtcttccctctttcctccctctccttccctttcacctctttcgttgttaccttcttcaattcttcttcccttcgccttctccttcgtccttacatccacacatacacacgtgttgccaaaaggaaacactgcatccgtatgcaatcgagcccacgctgacaaactcttacagtagccagtgatcaacacccagagtaccagcccacatactcaaccttccactcgcttactcgctcaattaactaaagggtcaaccaagtgtcgtctggttcagcagaaaggttcgtcccagagttcgtcgctctccagagaacgctaccgttactgatgatcaatcttgcttcttctatctctcttttctcctgttgccagacatccaatcctcgcctcctatccatcaaatcaaaatcttctctttttccatccaatagagtactccttcctctttcaccgcctccctctgtctccccccacaacccacgtggagcgagtttgtgcatcaaatgtctgcgctcactagtcaagtacgtcccgaatctgtctcattcctcccaacgcgcctttctcgttgacacgaggtctcccgatcttgcttagtcctcggcgatacaacaaaacttcacaaacccaccaggattctccacggctggttagtccgatcctctctttctttctttcgcgtgctttctacctctcctggtcaatcctgttctcactcctcttctgtcacagtccacctcaaaccaaagatcacgtacattgatttgattagagaggcaatcctatcgtttcccggtaatccctcgcttcaagaggttcgccttcctctctttggctttctcattctccttagattgggtttctaacgcgctttttccatcggtatgcaaccccccgccccgatgttttttcgagcagatctataactatatccaaaagacatacccgttctatcacccaaaggatgatggttggaaggttagcctcgattcattcgatacaaatcccttcccattcccgtcgatggaaactgagaaattttaatctctttttccttataatccggccgttcacagaatagcgtccggcacacgttgtccttgagtcctttgttcaaaaacgtccgtctgttctctctttctcttcatcgccagacagaatcatggatgctgacatgtcttcttctctgtttaatcaagatcccgagagtttacccacagccagggaaaggaggactctggcggataaatccagatgtatgtgtcttccttcccctctctcgagtctctcacacgcacacagagggcaaaattcttcgattcctaacgtctatcacccatccaggccccggtccccacttctaaaaggaaggacaagtcgtcgaagggtcctgctctctcaggcaaatcttctcgatcaccttactctcccggaggcaagaaacggtcgtccgggatgaacccaacctcgcattcaacaacgacccatcctctcaacccaacaccaatcacagacacggcaacagacacggcaacagactctgatcggtcggacggaaggttgtttgctacgccttctagcggaactagaggtggctcgacgttcacctcttcctcttcctcttcgacaacaatgaccgaaggatacactcctctatccaataacctgtatggccctggaccccaactctccccggtttcacctcatgatcaccgattccgtcctctacaccagcacccacaacaacaacagcagcagcagcagcagcaaccgccgctactgcagcgaaatccgagtagctggaacattccaccctactcggcccctctatcgacatataccgaaccgtcctgtgtgactgcgagaccaggattaaatctcaggcagacctacccagctcccaatcagttccccactttcaatacgcctacagctcagttcggctcccacgctagcctctcaggctcaagcagcctagctacaccagtttccctactggatgtttcatctagttcatccacttccaccttgtcgacaagcagatcgcccaatttatcggatcattcggaatcacatccgtatcctaccccaggatatgacaccaggtcgttcgatcagaattcgccccagtatgaatctgcaagacatcccaataccgccccggcggcggcggctgtgtatcgtcctcaactctcatatgcctttcctacgccccaacattcccacggaacaaaccatccgggtggtggtccgtcattgtccgatcaccaccatcagcagcaacagcaaggatactatcagtcatctgtagcttctcaacaacaccagtcagctaggtacacctactcggaacctgttcaccagtcaacatcatcttcaacagaccctcggtcggcttcgtcgataacgacagatacgtggaagccatctcagcgattatcacagaacgcccatcaaggtcttccctcattctccacgttgcttcctataccgggatcctctttatcgtcatcgtcatcatccaccgcacaggtcgtccctccagtgcctccgacatcaacaatgatcccgtcagagtccgctcaatcgagcgcgtataaccactatcagtaccaacgaccaatcgggaacgatattcactcgaccgacgcgcgcggaagacctttcgcttcccatgcagctcagaatcaacaacgacagtcgccaactcagctttcccagcagcagcagcagcagcagtaccagcaacatcagcacctgacagactcgtacttccctcctcaaccaccgaaccagccattccaatctttccagtcgtacccgatccaagactcgctcgtcaaccagtcatcaaactaactccgtcttagcagttagccataagggaagctttagggtggcggtgatggttgtaagggatgagcgatgaacggcttgtctcaatcttttgtgttctctttcttttagaggtcttcttctcttctcacagttgcttctttaaacctgctttctttgtgctttgctttttgttccttctctccattttttctttccattattctgtccgggctttatcgtcgttgtttgcttctctctctttcttttcctttttcacttccagaaatcctctgtagccgtctttttcttgtcatatttacttgttctttatctcttctttcaatcctgttctgctcatttttttcgtcgtcttttcctcttttctcttcttgttctttcgtctgatctgcgggtctcttcggaaaatggtctttactcttctatcttcctgtctctctctttctctctccctcttcgtcactacccttctctcacctgtcgtgttcggccgttataccaatttcaccctacagatgtttctatatgaatatcctggttcacaaaagtggtttatatatgttggatgtggtgatcagaccgttccgttttcttttccagtctatccctatttctctctattcttcgcgtgcatatcctcttctgagctttgaggcagacaaacactagttagtgatgtgttgggttgcaagagaccgatcgtgatggtaggaaaaggtgttacatcaccgaacatagaaacgaccttccatcacctttacttcagatatagaaacacacaaaccacgcacacatacacatcgccatcgaggttaggactatgttctcatatgctcatatcatatctttctctgtctctgtcctggtcgagtctgacctagaaacttggccgtctacctggtttggggacgatatgatagcatactgtttatcgtcgagaaatggccaaacgtccttccccttcctcctccagcagctcgaaagatgatatcgactttaacacgagctcaaagaaatcaagccaactagagatatcacacgaagagcaactccgactggctagagagataggtgtcgtaccgtccgatgtaccggtagttcatataaacggtggaacattgttagagaggatccctggccggccgatacatgaacagaaccagggcggggatggggctggagatcaggatggaaatgggatcagagaagaggctcttgagggtgagatcttcaaagctatcactatggtttgtctacctttactacctctactttgtttgctctgtctgtggttgagttcctcgtttcttctcccttcccaaagatcatcccgttcagcttcttgtttctagcgatggacatgtgaggattcttccactgaactttcatgagatgtctcttccatgtagctcacaaggcaggtctgatatctttgacttgtttctctttgtttcgctcctctccggacgatgaagaatgatacatcagcagtatggtgaacatcctacaccgatggacgaactgggaagactaaccaccgccgttccaggttcgtcttcgtttccttccttcgctcgtcttcctctctcctatggatctctgctaaactcatctccaattgttcctctttctcttgataaacggatgactttccggttgccggaatatgcgctcggtttgggatgagatagtcatttccgccgtggtgtattattgttagtgttctctagtttcgagtcagagaatcgaataggcagccatctaacggatcgtctgttcgttctcgtcccgactcgttcgctcttcctcatcccggatcagctaacaaatacgcctatgaaagatgggctcagctcttgcttctggtcgtgtcgatcgtttgcggaagtaggttgatgtggatagtcaataaagcaggttggctcgtcgtcatccaacaagtgagcgcgcgcccttgtttgaatcttcttttcttttcctttcttgtgactcgacttgatgcagagctgacgatccttgggagtcgaactctactttccaacaaaggctccgccgatatcgacgatctgggtgatcacgatttgtcaattagatctgctgtttgccgtaggtggtttaggcgtggtgtttgctttcaaatggtggaacgggttgaacatcactttttgagcggaaaagaccagataagaggaggttttgtttcatcctgagcgtatacatctgtcttgtcatcaaccaaccaaggccttctcatctccaaacgattcatcctggaggataagctgaagcatgttatcttcccactcgatacctgtgtgctaggcttctctcctaaggttgtaaccctaaccgtaaatttggtgatctttttcgtccacaaacttctgccaatctttcctccgttctccctaccagtcatcttctcttaataccaaaggcgatcgatagcatgatggaggcctctggatcgacagcttatatctcgacctcggccaacaagtactctcattgttcggacatctcacccgacaacaaaggtctcgtcatctttggagcagctaacggagtggccctgtggaacagtctggacaaagaccaaaagctcgttcatcaggttctgcccggtcatctgaaagaaatcacatccgtccagttcgtacccactagatcggacagcggcgagcttagattcgtgtcgggcgatagagatggaaaactgatcttttggagaagaagatctgaggcgggagaaagagaggttcgtactcttgtttgcagccctcatcctgattgcttgtcctgtccgctgtggctctcgaagtgcggtccttttgaatgataaagcgagacagataagaaggagaactatacatgaactttctcaacagatcgactgaatgtttattctcgttctatctcacttgctctgtttaaatagtggacttctgtccaagacatagagtccgggcactcagcttcggtaacgagcatctgttccctggccgatgtttcttgcttagctggagattctagctcgagctcaaagaaacaatccgatttgatcctcaccgctggctcagattgtatcgtcagagtatggaggtgggacgttgatgaggctggcgaaggcgagtccttccttagatttattcttctcttcttgtaagagattgcgttggcgtatccgtgatagctgttcgttcgtaaactgactatcttctatttgtagacaagcccgagcttctccagacgatctccactaataagaaaattcctctggcttctgctatctctttcttccctggaactaatggtaatgtcgtctcaacagaaatcttatgaccgtcgatcagacgtggacacaaacactcactcgtgtagggaacatggttcatgacagtcccggtgcttgcgctatcctctaccgaccgaaaagttcagatctttaccttccagccggacaccaaccaagtatgtgaccatccttttgaatattcatcaacgattctgtaggactgatgtttgtatctcatcttcgttcagttcacgttctctctctccctcgagggacacatcgattgggttcgatgtctcgctttcgctcctacaacctccaatagctccgatcttttgctggcttccggctctcaagatgcctacatccggttatggtccctctctcctctcgttgaatccagaaacgagaccgaagttgcgccaactgagaaggagactgatggatcagatgaggctgatcaagatcaagagttggaccaaaagctgatggatcagttcgaaggtcttgccaaccagggtgatggagagggcccagatggtgaggtcggtactgtcaacatgagagctttccacttggatgtgaaggaaaagtctggcaggtaaatatacataatccttccctcaataagatatctcaatcaagtgctgttgctgacgcaactgtcctctctctttcacacgcacatttcaacagtgtcaagaaattctccctttccctttctgccctcctccaaggtcacgacacttgggttacctcccttcacttttcaccacctctaccctccgggtcagccagaaagcaaccgttacagttactttccgcttctgccgacaactcacttatcctctggtcgcctaccaatgcaaacgccacctcgaactctacagcagctagcactaccggtatttggttcgctctctctcggttcggtcaagtctcggtcaaaggtcttggtttcttcggcgccctttggggaggaaactggacggaacctgatggcagaagacaagttctggctagtggatgggcagggggatggaatatctggcaagagccgttgctaaaggaagatcagaaaaatcttgatttgggattgctagctgatgcgtgggaggacgtcgaaggtcctacaggtcactttgatggcgtcaaggccgtcggttggggtggtggaaaggaagggagagaatggatcttgagtgttagttcggacgagacatctagaattcattgtccgtggaccaggccgtctgcctctccggaggaaggcgaatcttcttcgacagcaaaaatcaccacttgggcagagatcgctcgacctcaagttcatggatatcccttgacgtccctcgccacacttccaggaacacacggtttcgtaagcggagctgacgaaaaggtcgtccggatctttggagagaccagagggttcgtagagagtttggtcggattaggagcagcaaagttggaagatgctcagacttcggaagctcctgtgggagctagcgtgccccctctgggtttgagtaacaagatggtcacaaccgatggtaaattacctttctcttgctccttcctatcgtccttttctcccttttctctccgcgcctcataactgatcgattcggatatgatcttttgcagctccggaagaagaagatgcatcagccgatgttgggttcaactatactcggttctcgatatcggaagccctcacgaagccgcctacagagaacgcgctttccacgtccaccctctggcccgaagttgagaaactctatggtcacggatatgaggcaagtcctgtccatctactgtatatatacataaaccagaatgtgccgattgaagataagaatatagaagagcgcgacagtggctgacaaccgtctggtttattgtgggaaacagttgatggctgtggcagcatcctaccactcttcccttatcgcgacatcctgcaaagcatccactccccaacacgctgttgtccgtctatactcgaccaaggactggaagtcaattccagttactctcggtggtcattcgttgacggttacacggattgcgtttagcagagacgataggttcgtcatcactgttggcagagaccgaagttggcgacttttcgaggtagaccaggatggtcaaagtgagtctcctttttcttttcgtctccttgtccttatcaaagtcatcgagaagctgacgtcctcaatcccggatgcggattcattctttctttaaaaggttaccacccgctcacgttcagtcccaagcctcacgctcgaatcatctgggatgtcgctttctcccctcttctctttggaacgaacgacatgctcttcgccaccggttccagggacaagacggtcaagatctggaaaagaccaagtgctgaggattcgaaagtttgggagtcggtgaaggttttgaagttcgaagacggggtgacgagtattgacttttatggtggcttacataacggatggtgagaaaatccttccctgacttttctgtggtccgcttgccaactatgatgggtttctgattcaagaacgactctttttcttcttctcaacgctatctttggttttgatccttcagcttggtcctggcagtaggacttgagacaggccccattcacatcttcacatccgcccctcttgtcgagaatgtattgcctactgagtggacatctcgactcgtcatggaacagtcgtacgtttctttctctttcccttacacaacactgcgcggttcagtctctaatgctttcttctttgtctggccgtctctttcttccctgtttctctgatcttccctcggggttatcagggtggctcatcttgacagtgtcactcgacttgcattccgaccacctacttctgactcttcggcggatgagtcgtccgtcttgaagttggcaagttcaagtgaagataggagtgtgagagtgtttgatatcagaatttaaggacatattgaacttccgatataacaatatagaataaaaatatgctcaaaactttgcctgttgacttatgttttcgaaagaatggaaagagagaaaaagaggggatatgatagtacatatgctcgatcgatagcctgcaatctgaatctccttgtatcgcctttcttcaagagttcgaatcagttaaagcgaaatatatatatagatagatagaaaacaactctgaaaagcgaaaggaacatggccgagactttccaatgagggagtctaacaagcaggagatgatagagggattttgacggtagtcttttccccaaacatcaatccattgagtcaagacaaaagaccacttcatgttcagcaaacaagcaaacagaagaaggcacaggtagaagaaatgatgggatgggcttacagccagacctgaaagactcgtttccttgtagtttgaatgcatgtcgatactcgtcaggcgcatcgcgtggatcgcatcatctagagagaccgagtgtgtaccgtcacctgagagggaatttatttcagaagattaggggaaagaggaaaggtcagtctgtttggagcagataaaacgggaaggtaacggcttctgcgagattacctgccaacgccagttgagcggctacatgaaaggaaaacaatgtcgatttccaacttggttagagatgcgctgagtgcgttaggaggaatggtccatatacactcaccacagaccgcttttacagctcctagacttataaattgaggcaagaaaatcatatcattgtaagaagaaataagcgaaagagatggcgtaagagcttcagcgaacgagttgacgaacctgtttcgctcaatacacgggatctgaactaatctactcaaccccaaatccgtttattggaaagagaagactcattgatcagttccataagccctccctatgaaagcatagatcagatgatagaatgatcagcttacccagcgacgggatcacaagttaacctgatataaaacagaagttcagtttgtgagtatatgcactaccatcccaatttatcggataagtgattgcaggatgaattaacccaagcgaatgctcaattccgatctctgcagcctgcaagatcatcttaggactcccttcataagtagaaacagacaccaaatggaaaatcataaatgagacgttcggctaaaatcacgagatagtcagtgaagttcacgaacctcccatctataccaagagcgcggtgatcaaaaacagttcagtctctatgattagatagggtccgacaatcagaagatgagaaaaaaaaatagagacaaacgtacgcaagccacgaaaccaccggctgccattgcgcttgcgacgccgacctcggccatacatcctccctctgcagcagagattgtagccgaccgtttaaagagcatcccgatcgccgccgacgtcaacaagaactggaacaagaggttgacgagagttcaagtctgagtgcgtaagagaaggtgtgatatgatttgagggaggcataccgttttgacatctcgctctgcgtcatcagagacaaactcgataatatactacacagcgcggatttggaacaaacgaactattatatatttgaagtagcggcagctctcgatcgatagttcgacgacaaaagacgtaccttgagaacagcagggatgacaccggctgctccattagctagaaaatgcatcgacgagtaagatgatggatcagttccagcgccttcatcgaagagatcaaaagcatgtaaacaagaactgaggatgaacttggggcggttacgactaaagattaaatagaccagatcattggtcaggttttactttcccaaaagattgaacttgagcagacgacatacctcggccaccagccgcgttgacttcattgactgcgattgcctgttacaacatatatagaaagagttggtaattcgaaccaaagctttgtatcgaagacagatttcactcacataacacgacaagaagtctacacccggctatattcattatcatacaacccatcaccaaattgatgaggtcaatctctacgactctagcgatatcgagctgcaactcagatcaaggataagcggctcagtactgatgagggactcacgaaaacagtgtttttccaaggtgtcactggcaaatcatgagtaaagtctccatgaaccaaacctgtcccagacggaccgagtcctgacttgagcggcaatggcggaggcgaattgaatcctgatgccatagtgagactggtagctgtacttgacgtggaagatccagctggtgcagaaatcttaggtagtgtagaggcagtgttgatggatggatagaatcctttggaggtgttcaaaattgccatgaatgaggcttgttatataaccgagtaagaacaggacgtagaaagacgaacctttgaagaggcgtcgatagaggagaggtgaacggcgcttgacgtttagtccaccaggaagaatatcctctcctgagatagtagaggagattgggagtggatacaacaccatattattcgaacagaaaagtcagaaattgtgatagaagataagtgggaaacggaacacatacgagaggaaactccatctctgatgcacgaatccatgacaccccagatctacgggaaccacacaagagaacccgattagagaccttgtttaacacgacattgaatttaaaccctaactgtaccttgagaaggttatcagtgatctgctgggaagtcatatatgacaactcattgttccaaactcttcaaaagcgccgacaatggtcagctggttattttcggcgtgtaagcgccaagtttgatcgatgtgagatgaagactcacagctgagcgatcgtcaactataaatatgaccagaagtttgcaagctctctaagaaaaaaagacgacgattttgttgaaaacaagatagaaagaggagacaaacattatgcttccttgtgagagcttccaacgaagctgcgttgtggaagaggtatttcggttgttgtttcttcttatcttcattcggcccaccagattcctgtccagtcgttgtgtgttcatgtgcgcgctgcgattcttcgctcttcaactcatcgggagctgcgattccttcaatcttgtcagttgtcataccatgggtctggtctcttctggcaggggaagcggccgacttgttaatcgaccggtaatacatattctcgtctactttggtacgttcattaatgacgaaaccaccaccaacctgagattgaaagagaaatatcaacaatcgaaaagcaattagaagaacaaagaatgcaaatgattagaagataagattagaaataataataatgacttacagagaaatactcattggttgccagaagatcaccctcattatcaaacacactgaatctcatgccgtttggatgagttggtctacgcgttccgatcaagcatgcaaccagatgggagattgtaaaattacacagcatgaccaaagaatctaaatgaacgaagaagaatacgtacaaaggggtcatgttccagatcatgtccttgtccatatcatagtcgatgatcctctttccacccaagataagctttttgttgttcagaatagcgtcataacggcctgcaagggtagatgtcctaccatgagaggataacgcaagtcaggtctgatcttggcgatacaactgagaagaggaggtcgatagaatataggcacgtactcaattgtttctggatcagacccttccaaacccatcatcactgcctgaggggtcatatgtctagcatgttcacagaaaacacgtgaagagcaaaggcagaggaaaaggcggaggttagaaaatcatgaagaagtttcatcaacggtttccattcaagatcagcaagcatgcacgtcttgttattgtgttttcgaaatgaacgagacggaaggcagcatgacccggaagacagactaacccttttccggtggcagccaaagaaccatatagagagactttgatagtcttaacctagaagtccaagagcgcaccaaagtaaagagaggaattacatctcgtacatcatcagacctgatggtatccagaggaatctgcaccgagacaacaaggctgaaaggtgatgttaccttatcaatcaggcccaactcttccaagtcctatttcgtagaagagaccgagcaagccaacgatatacatccaaacgtcgagtcacaacatcaataaaactctcgggctgttttgaacaccgacaaacctgagaagaaaaaaaacaataggctggactgacaaagacaaagattttgcctgctctcatcggtccaaccgtatgggacgaactagggccgacaccgatggaaaacaggtcgaacgtagagatgacggcatgaccgactccaggagctatgtctctgatcgcatcatccactgtcataccctctgaatagctatcctggggtggctttgggggctgaagaggaggaggagtcgagcgcgagaaggaaggttcgacagacgtggccagatcagtctgaagactcgctgatttgttgataagcgagccgagtgaccggagaggagctcgagtgagctgtctggacacagccgagggaaacgacgatctgaccgtcctggaaagtagtctgcatgccatggtctaaagccgtttgctctgtgttgtctggtcgagccaagaaggaaaagaggatgagacgacgagctgaaggatgtggaggatcttgaaatttcggcgtggaccgagaaagatgagatcactgagtcaacatgaaatacccgcccgttctcatttgtccggctcttcttctttcgttgtgttcatcacgagtgttgatcaatgtcttgctggcgcgtacatacatacgcacaaacgtacatacgtacatacgtacacatggatgatggcatgggaattggcatgttataatcaagagatgtctgatctgagcaacactccaaaacaattctcgcacaggccaagaccttcatgttcgaatattcgtagattatcaaacggtcgctcgcaagactagatcggtttgttaaatcatatcgagcatcagaaacatcagtcgtattcaacaactcatcaagcggccaagagactgggagcatagagtggtgacaaagaaagattaacactcacttcgcaagctaagcattctgcatgccactttcctcccaaggcctctagtacctcacccgctattggctttctacatttcctacacttcggagcgtgcagccggacgtgacatttgtcacaatacggatgtcctttgaacaagttgatgtttcccgtcagaccttctccctcctcctctccctcgccggccgctccggctgctgaagaacgagacggatcgaggaacgggtcaccacactctgagcagaagaagtgtagctcgtgatagtacctgggagtccctaacgaagggtcggtgattgtgaagaaccgctcgtccacaatcggagtcttgcacgtgtaacatctcgtggtgaacagctgaggaacatagctggcagctgatcagctggagcattccgacatatcagaagaggaaagagaatttaaaaaaaactaaacaaacctcatgataatctagatgacagtagatcttgccttcatgttcatatgaagacacatgttccaatagcaacgaacacgtcgtgcatctaatgccatatagggttcaaacggatcggtcgagcggtcgatttgtcagttgcttcgaactgatccgatataccgataggagcgacttaccggaaacatttaggatgccaatacgttccttcgctcccactgaccaatctaccgaggatagcctctccacaagtctcacatacgattcctccctttcccctccctctttccgcctgagctgtactcgacttgaccaccaccgagtctgccgccatccccggattcgagcccgagcccggaccgctcccaccctgacctggcagcatgttcttacttgcggactctcgagaaggtgaaggcggtgcgtctgaagagaacgtcaccgttggtctcgacggagacacgacgcttgccgtctctccttctactgctatcttttctggctcggcgtcggcgttgatgtcggaaaagacgaaatcagggagaatcaacggaggtggaagtcgtggaggaggaggtatcggcgtgaacgaggaactcggtgcttgtctctcctctctcttgttctcttccttccccttgtccttctccatctcgactcgtccaccatcctgttgatctacactctcttccgtcggttcaacaatcacaggaacagatggaatgggtgaagccgttgtcaaatccattcccgccagcttatcgaccagaccgtcctcctcttgctcttttctaatcgccatcggtgtagactgttgcgagagtattttctttccttccttcacagtcggcatggtgtttgccctgggtaaaactgaggtggcatttaatgtggttcccgatccaccagtcgtctttccaacctcggctgatcctctatccagacttttggaaggcaagatcccaccctttggaacgctgggtaacggtctcttcttatcactcgtcgccatcgtagtggccgtcaccgtctcggtccttgttaaaccagactcggagggcggcgcagagttgagaaccggaggaagaggtctaccagtgagagaattcatagtggctgtccttccgaggaggttaccggactttggtggaccgggtaacctgtggaatgatgaagttggcatgttctgaccggtagtcttaggtactgccgttgcactcgttgtcagagccctgtcgagagctggcgaggaagactgaggaagaggtcgcgatcgttttgttggtgaagaattcggcgagccggtcagctgggaagagaaacggttggtcgaagaagtcgaaccagaggattcagtagcggtggagtttagcgatgaaggcagaggtgatagttccggtggaacttggataggaaatacaggtcctccctgagctgattcagcaggtgcggaaacggaagcagaaccagacgcttgaggaactggtgctggttgagaacccgaagaaggccaaagtgggggagtggactgaggagcatatggtatatacgaatgcccgggcgtatgacctgggtgaggaggagcatatgtaggtcctgccgaaggttggggttgagtgctagggtatcgatggtgttgttgttgctggtgttgctgctgctgctgttgttgttgttgttgttgttgttgttgttgttgttgttgttgatgggaagagtggttcgtttgatacatgagcactccttgttgttgctgctgtgaaggaggaggaggaggaccggcgagagaatatgtcggtatataagcagaatgagtaagaggagctgcgaccggcgagtgagaagacacatgaggataactcagaggagcggtattatatccctgtgggaccagatgaggttgctgcagctgcagatgctgttgctcttgctgtagaggagcatgttgagctgacggatagggagagtaggcgacctggccagaaacctggtaagattgtgttgaaggggtatatccggtcccagtgccgttcgacgggtgagcttgcggatgcccgtagctgtaagcttgatgggtatgaggatgtgaagaaaccggctgttgtgactgttgatgttgttgatagagagacagagacggtggctgttggtagacctgctgggcctgagagatttgttggtgttgttgccaagcgttcagaggagttgccgtcggaggttgcccatagatctgttgcggttgctgtggatgtgactgggcagccaacccaactgcacccaaatgaggagcgtacgcataaccgtacggttgactgattggagacgtagctggaccagccgccgtctgagcctgtatcggtggttgtgtttgcgggccagatgaaggatgatctgtgaaggccgggaggatgagaacggtcagctagagaagaaaacacaacagcgacgaggcaaagaccatacagtactggggataaatctgttgttgagacattcaaccttcagggccgatttggcagagtgaataagcgagtgaatgagactagatgagctagcttgagctcttgtgagtctctatgatctctctcggacgaaagagattgcaagatgttgacgagcgatgctgatggtttgatggcgaagacgaaagtctgggaattctcagcgttctttcattttctttcgatctattgcttcggggttcgtcctcactttaggtcggttctttatctgaatcatcacgttctcgagagagatacatcatcaagaacacagagtaatgaacatttttgacgacttggtagagaaagaagagggagagagaaagataggatgcttgataaacacaagtagatcctgtagacatgcagacaggacgattagattacgaaagggagaacggacagaacatcaacgacgacatcatcggcaaaaatgaaactatggcgcgctggaaggatgctggaccaactgggagtcttggaacagaagaaagaggaaacaaaggcagaagaaaagaccaaaaagggtataccaacacacctcagccctctttcacttcaaccaaaattaggctcgtcctcctctagatcaatctcgtctgcccagctctgcgttcttaggtgaacgccccacgagtcgtccgagaacgaagggagtatcattggtctctccacttgattctgttcttccttcttctgcttgacctgttcctctgtcgttattttcggttcctcctccttctttcctctcgatccctttccgcctggtgtatcttccttcgttttgggcgcattctttttcttcttctttttctttttgtccttggctcctccttctttagaggacgctggtccagcacctgcaacgacgtctcctccaacacccggcttccctttgggtagattgaccacgattcgatcgaccggtccctttccgccagcaccaaacagcgaatcctcctcatccgtccgtcgccttctccatgagtccccctcaacaccatggccgtcccgatcctgatcctttgtctctgctagcctggccgagataggcaggtttaccaccgggtttggcctttcttccgcagtagggctggacggaccggccgagtggattggggtcgatggccgagaaggaaagatgaacggcgctttggaaggatcgagcttggacaaaaatggtgggagcactctggataagctcggtgacggagtaaacgtcttttggaggtcttcatcaagttctgaaccatcgacaaaagtcgcgttcgagcctaggtgatcggattggatgatcggaatacccatggcttctacgccctttcctgcggctgtctttgaagagccttttcctttcttcgcgttctttcccttcctgcctccttttcgactccgtttgtcttcgtagtcgtcttcatcgaggaaacagtgcttggcagcgttccaatctgaatcaatgttgtgtctggtcgatcggtcgacttggttcgacttggagtccagaatcctagaagatcggtaggctgttgcaggtgggacctctgcttggcttgacgcaaaagtcgagagaggctgatccatggctaatttcgacgaggacgaagacgagacggtgacctctggcgtcttattggaaacctcagcggacgacgactctggcttggtttcaggcttgctttcggctgagtcattcgatccagcagtctgtccagatggccatggttttcggggtgacgaacgaggaggctcacccgttcggtcttgatgtccagaatgggatggagggccttgtgaggaagtgctggacggattggtggtagacgccggggtagaaaccgaagtaggtgccgaaggtgtagacgaaacaggagaagaggagtcttgctgaacagaagccagagtgacgaccggaggctgagaggagggtgcgtgcattgaagcggatgaacccgttttcttgcccactggagcatgcatcgaagctgccgcgcctgacttgaagccggtggtagaagcaggagcagagagaagagagctagcagatggtggagcatgaacggaagctgacgaccctctcttaacagaaggtgagtctattgacgtagaggaagagacattgattgcatccagggaagaaaccaggctggcggtcgagaacgcgtcgctggtgatcgttgtcgctggtgaggaaggggatgaaacggcagacgaagcggatcccttcagtttctcaagcacacgaggcgatcgaaaccgaggaatatcttcttggggggtaaagcctggtctgactttgatttctttacgaacgctgatagcatcccaacgaacaccacgtcaacgtttctttagcttgattttggcacgatgtacgaatacgaagaagaaagagagacgtacgtcccgtccggccgcctagaggctggaatggcaccctgaacgataccggatgcggaagcagcggtggtcatggtattggtgtacttatggtactgtatccgactagaacaaggtatgccaacaaagggaagggtgagaaagaagaagcaagctatgggaaacgtagaagtagctggatgatcgtttggggtcgaaagatgacgaagatgaaattccaaagattctttcctttttttccttttccgttcttccatacactctcatcatcatctcatcatcgtcatctgagtatattcagcatggcatcctcagtatcaacattggcagcagatcctgattgtacaacaggtctctgtcctccgctgaaagcctctagcttggagcgcgatcaagctccttccagcagcaccgtcccagctacgtcgcctgtcactaccaccaacaccagcaacgataatgtcgccatgactgcagaaccagtgaaacaagcagaaagtatcccagagagcaaagagtcagatccactgctggatgcaagcacgttcactcctcctagattggaggaatcagaaggatggagggtcgtcatcgagttttgtgatcgggtttgtagtcgatctttttactctctacccatgtcttgcgcttccttgaactgatgaataagatgttcttcgttcaacacagtgccggtggcttcatcgggcgacctgggttcagacagaactcttcctgacgttcccttcaccagccatcagatcgatatctcttattccattaaatgctccagagacaggtggtcggttcagagtctgggtgtacaacaagaacgaccaggtcaaactcgcttgggatagaaaggtacattgtgtttatctgatctgacattggtagaaatgctggatacaaaaaacacactagttgctcatctgtggacgtttcgctgaacacctgatgtcttagatcgaaggagggtttcccgagctcaagatactcgtgagttcaaccaattctggtctgtctgtttgtgcaatcgacgtccccggtgggtttagtgctgatcatacgctgtgtttgcataaacattgaaacttgcgatggtcttgatgtctgaagaaacaaagggtccgggatatcatctcgcctgccgtgtcgctgggccattcggatgtccattcaacaaagggcacaaagcattagatacacgttgccattctcatggaagcttatatatgtagatacttcatcaactgtcaaatacaaaaatgtcgtttagttgaacgagacatggaagaaagaagatggaataagaaagattcagtcgagacgatgtaggctgagtgatcatttcgtcatcaccactactaccaccaccatcatcatcgtctgctcataacatagaacatcgtcttgatccattgacattccaatacgcgcctacacactcactatagacttccggtgaaccatgacgaactgtcaagacgatctcagtaagttctctgtatcgtgtcactttctgggatctgcctgatggcttgtttgctttggatgctgactgatctactcttcttgacctacagcattaaccgatctattaacatcatctcatatctcgtctcgtctaacttcagggtcgacctcatctaccaacctgtacccatacatcgatactgacaacgtgtggggtcttaacctcgaggaaccatctcgatcgaccctgacggccatagccggcgagtcaggttcgacaagtttggtcgaccgacaggcgggtgaagggagaggagaagccaaggttgtgataaaaagctgggaggacagagaggatgatagcagctgggtggagagtggagtagatgaccaggtctgtccatctgctttcgttcgcactcgagtcgtagcttggctgaacgatatcaccatggatgtcttcattctatatagcttattctgaatattccatttgtccaagtaagttcaacaaagttcttctgcaggttgtgttggattcaatcttgcctcattttgattcgactatgcttatccaattcagaacgtgagagtacggtcaatattgatcaaaacaggtacgtccgcaaggtctgttttctgctgtctgctgtcttgagcgcaacattcggatctcattgttggattgaaaggtagaggagaaaccgcaccatccgtagtcaagatatttgcgaacaggccggaagggtacgtttccgatatgtgtcattgtgttcttcagctttgttcacgctggcgatggccgtctttgtcttctcaacacaggttgacgttttctgaaatcgagtcagacctcaaaccaacgcaagagctagcgttacacggagaggacgtggtcgaatacccgctccgggtacagtctttcaaggatgtagtctcgataggtctgttctttggcgaaccagaggggagtgacaagtcgagagtatagttagttctgctgttggttttgtttctagaaatcggtcttccttatcactgactcgtgaaccatcgcttcgtccgacccaaactggctttacctatcagttacattggcttccttggcgatccgaggaatcctcaaaaagataatgatacagagcttaccattcctgccgccttggtaagctaccatgattattagggtcttccatctgagacgaacgtcgagaagatgtcttactggacgattgccttgattgtttgtttgattgtttattttggatgtttgtatcaaaagggcgcggatgcacctattggaggcatgaaggaaaccgctactcctcgaaatgccacgatccgatagtttttcgatttagctagaggattcggtcgagtcttggcttatatgtccatcgtgtttctgaagcaaggcgcggtgttctccataatatgcctcccatgaacttggcatgatgaaactcaaagcgtacagtagatgaaaatgagaagagaacacaagagcaagagaaagaacttggtttgtctgtgttacctcggtcagatccggtcgggcaacccaatccagccaaatattcaacaaaattgagattccaacgtcaacgacatccaacagacatcacactcggcttctgctacttgcttttcttttgaaaggatcgaccctacaccctcaggccactcagtctactgccatcattcgagtcaaattaccaacgatgaaatttgaggtcctcggtcgatgttctacgacgtatgttttcaagtcgtcatgtatctgaagctgaactttctgtcctaagggtccgagaaattggccaatgggttagggatggctgctggagaggttcatactgatcgttatcctgctcgtgttgttattgaatcgtagtaaggcaagggtctgtagaatgacacttcctcatgtgagtccaatctcttcacgctccgtcgtctctctgaacatagtgatttcgatgagggtcagtatcataacgaacgtctgaatcgttcttagggtccaacaatactgcctacattcatgcccgtagccactcaaggtccgtcgttctatctcaaggaaaatctttggtctctatttcatccgatggtttttgacacacctcgcgtatacaggtactatcaaggggttgaccccccaacagacggcctcgctaggcgtgaccctccaattgaacaacacgtatcatctgtctcttcagccaggagtcgaggtactggataaggctggaggagctcacaagtttcaggggtggaacgggaatctgttgactgtaggcccctttgattcagtctgcttaataatgccgttttccagagagctggattactttggctgatcgaagtttctatcatgactatatccaggatagcggagggtactttcatcattattattatgatgtctttcacagagtgacatatagcttaccctggttgcatctttgggaatgtctgggtattgatattgatcaattgcagattccagatggtttctcttctcaagtttacccagatcactgaggaaggcgttttgtttgcctcccctttcgacggaaaacctaccatgttgacagtacgttctgtcgtttcttggtacacctgatacccaatcccctctagtttgcgcctgatcgctgcgttgtcatcgtttccattcgtctcggtaattcggtgaaattcagcccgaacaaagtatagcggtccaacactcgatagggagtgatatcatgatgcaactggacgatgttgtctcttctctaagtgagtcatgcctcatatgtagatgttcatctatctgtatgtttctgacagatgatatcttgtgtcgattcaaccaagccactggacctcgagttgaagaggctatggcgagttccatctgttctctcttttccttccaagactaccatgtaatgatcaaatccatcatatcctaaatcagtggagatccgttagatggctagacagatgtctcaagtatcatgccacagctccccctaaggcccatagaatcgatcaaaagatctttgctatcgttcaaggtggtcttgatcccgagttgagaaaaacttgttgcgcagagatggtcaaaaggaaagatgatgctggattgggtggatttgccatcggaggactttctggaggagaagagaaaggtttgtaccctgtttggttcgccttggcttgacttgaacgagatgtagagccagtacttatcaaaagacatctttcgtttgcgatcatctccagatgtgttctggaaagtgtaagccatgctgttcactcccctcttcagattgattttctcattgacttgttcggaattgagtatcgtgttagtatctcgcaatgtaccgacctggtaagcttattgtgattcagtcgatgagcaaacacttgttgaagtctactcacaatatcgttcgttcactgctgatagctcccagccgacagtgagttcgttgctttttgcatcaattatgagctcagggctgatttgctgtaccgaacgaaatgaatcttaggaccgcgatattcaatgggtgtcgggtacgcagaagaccttttggtcgtcgtcgctttaggagtcgacatggtcagtttgtgatcaaactctcagttatcttaggcagcgcttgaacacgtagattattaaccttttgttgtcggtataggcggattgtgtgttcccgacaagaacggctcggttcggtatggctcttacatttgacggtcccctcaacacccgtacgtctctgtgaacccccggtaacatgacttcttcgtcttgtgttcatttctcctgacttcgatttcatctttaaatgcgctccgttatacccgatcgtatcgataacaggatcgatggcatgtattgaagatcatagagtcatcgaagaagactgcccgtgcccgacttgtcgaagcgggatgtctagggctgctttgaatcatatgtcgagtacgacgaactcccatcatggtttgttttcttctgttctcttgtttctatctactctttctcgctcgttgaagcttctggagggtagaactgacaatagcatactttgattcatcctgtatacaacagctatcaccttgttcgtgctttccttccttcttgtgacgtaatcttcacactgacagctcattttctcctctcccttgtctttcactcagacataacatcgcctttcaaggttcgtcccccttgtctttcccttctttctcatgattctcgatcaaccaaaccttacataggccccttccatacttccatcgtcatctagcccggttgatgggtcaagctaggacagctattttggaggacacataccccgcatacctcaaacgtttcttccctaggtatttcgcgaattctcaaggtggaattccaagttggtgtgtcgatgctttgaggagcgtaggtgt

SEQ ID NO: 2371 - DNA, 5099 bp, Xanthophyllomyces dendrorhous
accagagagtcctctagagccacgatccaaacaaaacgatgaagaataaatcgaatgtaaaagtcttatccacctctctaaattcacatctatgtatgagagggacatcgcgagtgataggatgggcggtcgccggtagttcaagcagttttgttctgccatgcttcgatttgcgattggggaacaccgtcgagccttgtgagaagatattcgacctgtgcggaacagaaacatacaacgggatggattgagcgatgtttggtatgatacaccaaactttgatcaaggctcaaaggtgtaggccaaagcagagctccttacctcgacaactttggtgagcggcatgacaaactcctcgtacaacctcacgacaatcgcaggatccagtttgcctggcgcctgatcctgtccctcgataggtttacccatcccatcaaggtcttgaccgtaaagttttgccttgtttcgaactcggataagcagagcagcctcgacagctggtttggtgattaggttgagtagctcagtcgggttggggtcgaggatatgaggaataaagtcatgtggcgccaggaggaactttgattcagatacgaacatgcctgtgaatatgatggcaagtgtataaagaagtatacaaacgagagcagaaagttaatgggatgaccgaggttgatgctcaagagggtgcgaggaggaaggacgaaccgaagtgaactcgtcggctgatggcctggagaacctcaacatctctcgtggctgaagatccataattcccatcatcttccattccaagagtccttgtgatggcgggcacgatgtgctcaatgtaaatggatttgatcttttggttgacattcacgttgtgcttgtagagaagctttggcagatcttgaggagataacataggcatcgggaggtcggctatcgaagtgaatgggtgttcatctggagaggtatatcgtctggctttggctagagcagtgaaagagatgaaagagagctcttagcaacagaagcagctatacatccgacaggatagcacagacatcagagatggtaccaaccgtgaaaggtttcaatctctttcaagaaccactcaagccaacttccttggaagtctctgcctttcagttctttgaacgcgtccggggtgtatgtgattgggttgtacgcaaactgagctctctcgatcaaatctagcggaagaagataacgccgaaccggataaaagaaagacgatatgcttcagcttgaatgaacccgacaggcatatccctcactcgggatcactcacgaaagataatggtatcctccagccggttcaatgtatgtctgatcttgtcgagtgagagcaaggattcgactgattcgcccaaagtgactgtatgtaatttgaaaaacaacaactgggatcgtcagatgtacatacctgtgttccagtacacctggtctcgagagatctagacaaacagttcatgatgacggttgctgatgctgatgatggttgttgattgtaaacgcttgaaggacggaaacctctcaatgacgaactcgcctgttcgctcccgttcaccatcatcagctaccggctttgttgagctgactacatcgtccatcggtcgatagtacatagcttactcgattatactcatactagattgttcacactccagcatacacttactgtcaagaagaacggcgctgctttttctcaacctccaactcaaccggtgcccgtttacatcaggccggatcttccagaatccttttgcgtccgatcctcactcagcatcagcaagtgctcaaccgtccgttttggcctccatgtcgtccaatatcagtccaacagcatcatccttgggtacaacaggtccacctctgattgatcccgagtctggtgcaacaattaccaaggcaaagtcgatacattacgcgccttctagcaactcacatcaaggtttgttcgacgggtcgacaacccatcctttgtattgctttgattcatcgattgaaaagctttgtatactcaccgctgtagagtttttggcatggaaatcaaggtcaatcatccgataataaggtcaagcgtacctttactccaaagatgaaccgattggaggctatcagagctatagcttccaactcgtcttccgagttcaacgagtctgaatttgactggggatcgtcctcgatgggagcagagtcagtcttttatatacatatgtatctctataggtcctttgacctcatcttgctcatcccacccgttcatatatctgtgtgcatgtgtgttgtctgatcggtttcacggaattagacctgggatcgatgcatccaaagcagagttcaacaacatggtcgggccaagcgccattcaagtgatcgactggtcaatcgatcgtgtcctcgaaagacgattcgaaggaccggatttcatcaagtggtttcaatctggagaattcaacaatcgaccaaaatgggctaaaggtcggtggatcaacgtgagtctgactgtcagctcatttgaagtccgaaaccccaattccttcctcgttgacctcgttgacactgatcaaaactaatcaggtcgacggactgaactggaaggtcattcaggtatgtcaactctgaaaaccttgcgcctttcttccagtaccggataccgaaaactaatactcgtgtgagcgcgctttaacgatgacctcttaggctatagcgttgcagtttgaacttcagtacgtctacgagtttcattagaagcctttcgttgtctgtcaatcgtcaagctaatagtttggtccactctatgcaatcgacagtccacttgctctcgaagatgcaatcaaatacgctgctcatgctcactctaaaggttttcactcatttaatgagcaccatggtattgtcaaatctttgggttaactgacgattgtccgttttgctacaataacacagtggattggtacgccgatcaattgtacgccttttttcctcaagtcataggtcgtggttcaggctttgatactcatccctgagttacctacctcccaatgtcctttcacatctcataaatgtcatgaaaatagatttacccgccttcagatccacacgctgtgcaaacacgattcactccatcaatcgtcacatccgccaaatccaagtttcttcgaccctttgcttcgtctgttcaacatgaacacctcgaaacgccaagctcgggattttatcctcggtgaatctgaagggtttcctcgaaattggaaacagagaacccgatcaggattcttatcaggcggggccagaaatggtgtcgacatgattgacgcagaagccgacggtcagctggaacaagaggaagaagcagaggaagatagcaaggcggaagagttagaggcagaaaacgagtgggatgatagattggaggaggtacgttcatctggaaattgagcgcaaaaacagatgtacactagtttctcatcttacattcttttctctttcttgtcttatcatacttctaaagcaaatggcagcaagagcagttgtccatcatctgaccgagcattatcgagttcagatacataaacaacaactcagcacttttcttctcccacatggtaaggatcaggacttctttttttctttcatcgttccagacgtctgggtttcgttttatctgaggcttctgataaacaggcacgctcatctcggtctacacccattcgggcgcaaccatcaacgcatctatcgcgaagaggatccacacgcctggaactctacttcggacaacagaagactgttcgatgctgttgcatgcaattctagataataccgttgaccaatgtcttgaagttcgtgaatcgttccaattccatttcatctctataaccaatggccatagatcacctagtgctgagatgagatttattgtcggtcaactttggttctaatagatagccgaagaattcagacgtgaattagatattctcgagggtagagctctcgtgaacccggatatcactgccgttaggcatcgtgcgtagctcttatacctctcctctattctctctggcagatatgatacaatgtgctgatggttaaagggtccttcacacagtacacgttctctccggtcaactcctgatgtacgacttcatgcatctcattctctaatttctcttgtgtcacaccgactgactcacactgatctatgaattctcttacccatccttaggctgaagcgaactctcgctccgctacaaaatctcatcgtctctctcagacaagacgatcgagaacgaacaagggtagctcgtttggtaggaggttatgggaatgaaagctctagagtcgcggggtacatttcccgagaggcaaatatctatctggctgatgtaaatggtcaatcaaagatctcatttgtctgttctcatgagatggaacgaacaagactgactgacatcatgatttggctcgactcactaatacagatcacataggtcggtttatcacatcccccatattgcaacacaattcggagactgatctacttcttatcggttgcgctctaagattcggtcctatcctcactggaaatgttctccaatatggcaaccagcatagttgacttcatcttcagttcgtccttcaatatgcccatgatgcttatctgtccatgcgtgacttcacctgacatgatttcgccattatctagacactatgtcgttttcaaggtatgttgagcatgcggttggtcatcgtttgctgttacttagagttgttatttgacttcgaaccggacaccaatgtagtaacgagtccatgaaagtcagttccctgcttacttctgttttgttcatcacgaatgatcgtttattcactggacaatttgcttcccttatgatgttcggttactagtggctcacattcatctcaattatcttcctacctctggtaagcacacctcacttgtgaaccgctcctgtgtcataaaaattaaatttaaagctaaccatgttctggctcttggttttgtagggtttcttggtaagaatgctccgtcatgtcacgatgtctcttaaattgaccactttcttctt

SEQ ID NO: 2372 - DNA, 5283 bp, Xanthophyllomyces dendrorhous
gcgtttcatagactggatactttggaatgttcgtcatttacattcaatatccttcgttgcatcaaagtcaactaattgtttcttatgcacccgtattaactggacctgattcaggaatttcactgtcttccccgagtaagcgccatctctcctcttccttcaaggtaatcttcttcctagtattctcaaacaacaggactaatctttctactggtcattcatagtatcggtgtgtttggagattcccaagacacttggggctcaaatccgggtggtaacatcggctagtgagcagctcctcttcttcgttgtctgtctttcaacatgagcgcaaattgaattttttactttctcgatttataagcttctggaaaatcacggggccgtatgtatcaagttcatcgtgtctttatacaacaccctattcttacaacgctttgaatgtattttaatccactagacttctcgccgttctttgcgcttgtatcctcatggccaacttcggtcagtatctgaagatattcgatgttttcatgaccgttcttcttcggccatcaaaggatttgattgatatttattctaactatatgttactcatctattctttgcgtgatacaggatcggtaagattcacttgattgccattttaatttcgttgtcatcagcatcaactcatttcatctctcttcatattgttcgtccagacggtccttggatggagtcgaagaggtctgcacagattggagcgatacgttagttcctacttcctctccttgtcttatgaactcttcccaatgtcaacaagtgtgtctaaccattcacataatttatcacacctttcgaaatgtctaacagaaacaccacaagattatcaaaggtctcaaacgaagcaaaacctcgagtagtaggagcagcggaacgcgacgataagaggaaatccgtttggaaaacgttaagtatccgttatatgtatgtgaatcaaagtatgtttgtaaggagaatatgcggagggtgagaaggtagtaaagagttcttgataagaacatatggatttgttttcgatgtgaataaatgaggttttgaactctaagatcggaaaagatgaagaaactgaaccaagcacccaagaccgagaaggaaaggaagaaaagaagagaaaacatggacagccaaccccttaaacagtcttcatacttctagcttgtctcctccatttaactccaaagatgtaaaagagaatcaagaccccttgtaagaggcccagaagacccagttgaagccaagtggttgatgggttggattttggaatgtcagttgtttgacctgactgacttatcgacgatcgaccaacttgttcttgggtttgatcacgattggaaggaggcgaaagagaaagaggtttagaggctcggacgatagtaaagatctcgttaagcatgtcgttttctcgattctatacccgaatgcaccgaggaaagagcgcggaattgccacatacagatatcaacacttgggaaagagaagggaagggtaagaaacaaaaccacggagaaacatacctcgagatgatccatattgattcccagagcgtccagctcgtcccgaaagtcgtcaattaccgtcctcagatgcttcctctctgattccaagttggcgactcttgtcgaaagcccagataatgacgtgaggagcatgccggtgttcagatcccagtttgctttccctgccaatatgctatcccagccctccttcatcgtacgtaatgtctgaatctgttcgtggacttcttcaatcgcttcgacaacgcgttgtttggaatgatctaatatcgtatctagaacagatggttctcgaggttcgatctcttcaaactacgacagatgcaaatcaaggtagacgcacgcaagagccgatcagaaggtcgtgtacagacctacatgagaaatagatggaaacacaaacctcgggttctggctcaggaaatgtctcgactggacgcatcaaatcatccagatcagactcggattcaatacatacgactgaagaccccaattaggaagaaaagtcatcagcaacaggaccactcaataggaaggtgaggaaaaggaattcggaacaaaccatattgaattgctccattgacaaagtcttcctggaattcgccgctcgcactggtcgtgttataaacaaacggcaccggtggactgttctctactggttccgtcggacacttacttcccctaagcccagagtgcctagcagtactcagattgtccatcactgtaaagttgctgactccggcgacgacaataccataacccatccagtatcctttgatgacattatcgatcaccgttccgtctctgaaagtagtatcgaaatcgtcagaccaaacaggagtacccacaccaatggccactctgattagagatccaagggcgttgatggtgttgtgcgagacaacggttgaagtataggcgccttcccatggtccgtagtcgaccataaggattcctcccatttgggtagaggattttgcgagaacagtattgtgggagatggtcgatccgggggaaccgaagattacaacggcagcatccgaagtgtcagtaaagacctatgggttggaaccaggggatgaattagagcgtcaataaaacccaaatgtagacccatgggagcctgatgtgctacacgattactcacattattcgaaactatactgtccttacaactcagactgactccatcacctagaggtctacccaaaggactcatctctggatctggtccgtccaactcctctatccattcttctcccaccggtccctatgtatcagcataccgtgagcaaagtcaacttggaacgtcagggaatgaaatcatttctacttccgactagactcacaatctcgttccattcgattatagcgcctacgcatcccaaattgtctccttctctgatatgaacagcagcccaacctctcggatccatgagtgaacatctctccaccctttggccttcgttgtttcctaacacaatcaggggaccccctttgtgatccggagtggctcgacctaaatctcgtcgacggccgtcaattcggatgttcaagatcgctactcgagcacagcgccgacagtcacctctgtagttttttgacacagagatatagcacataaatttcgggcagtggccgagttagcgaagtcgcgtcaggagtgtctgaatcaagacgatctaaaggcaagaatgatatcttacgcactgaacagcagtgaccgcgtctcctgtgatgatgagttgagctctcgatccatcgtttgggtaaccctgtgtactaagttcttgatctctagccgtgaaatggataggtcctgcgatgttgaatgtcgagtctcgacagagttgaactttggtcgaaggtccacctatggtttttgggtcggcgataggaaggtgataaatcataacagaagagagaccgaaacaagagcgacgaatcagctccttgtagctctcacgctctcggatagaattctttgaaaagaaagaatcaagtccagctgtctctccacatcaagagcaatgaagagaggaaagaaggatagaataaaaagggatagacagaccatcactgaagagcctgttgattgtgttttcgtctcctttggagagacaaggtgacgagtctgatgagtcggccgcctgaacgaaggacgaccacaaaacgaacgatgtcgcgacaaatgcgaaacttggacgtttcgggtatctcatcggaggttaaggagcctaaaggaactaaagaacacgaaagaaagtcaggaagaactctgaaagcggatgggtgaatggtatgggttgatcgaaagagaaaccggtgaacgcgtttcggagaaatccaactatcgggccattcttcttgcttgttctcctttctccatcgctctcttgctttcctcttgctattcacagtaacgagtggatcatatgtacaactggaatgatgaagaaagaagagcgcgaactggaaggtcgttaacaacattacgaggagagaaatataaactatatgtgtatgtagagttcaacagccagacaaaaaaaggaatcagaaatagcgcagaggaagcaacattatgaacggcatcctttggccagttcgccaggtctattggccaaaggatctgagggaagaatacataatcggcgaagagagcaagcaaggagcacgaatcttccgaaactgagagacacaacagattaattcacccaggggatgatcacggtagacatccaccatcgagaactttctggcagcgggtgcatatgctttttcggtccaaagcacagctgttatggtagacaaaacaacaaggagagcagaaacccgacagaatgaaacagagttagcatgagatctgagtgttcagtcagggtattctcagataacgtagccggtcgaggaaacagagaagtgatcagtcagactcacaaagcgagtccccaagctgtatgagacaggcagacggataccgatagagtgtatatccatgtcagctgatgccgtctgataagaaccgaacgagaagggagaatacacatacgaaagaacgctacagcggccaagactccaaagattccaaaccgtttcgccacctatcgttcaaagaatacaacacaaagataagatgttggatcagacaccaacacgcaggtgtgcaacagtaggtacacatgatagcaagaactcgagagtaagattgatcaaagagaggaacgaatggacaaacctcgtgtccttccactaagcaaaccatttcggacgtctgcggtcccaagctagtggcgatcatcctgttggccactgggttgtagtaataatgcatctgctgtcctgccggtgactcgtacggaacgacttggccagatggcccttgattgatgtagggtcccgcagggtggtacgttgtgtgtggtgaagcggaagggccagtgacgacagaggtatacgatggcggtggagccattgagggatcagccgatgatacctcgctggatttgccgtctttcgggagtgcgatcatggtgtctatgttgtcttggtggatgaaggcgttacttcaaggtaggcagatgctggtatgcttataatgataaggatgatgatggaaggtatggatggaaacatgtagcgacgtggaagaaggcgatgcaagtcgacttcttcattctccctcgggtttgagcggaacatgcagtcacctcaggatttgaat

SEQ ID NO: 2373 - DNA, 7943 bp, Xanthophyllomyces dendrorhous
  misc_feature (3503)..(3512): n is a, c, g, or t
ggtacatctatagcaatatctttgcatcaaacacttcttcaaagctctccggcactcctctcaacatttgcgcgctctctagcagtcgttgtaggctcgacttctaccgtctcgctcttctcctccggcttcttttccctcgacgatgtcgtccgagaagagccggtgacagtcgctgagcgcgaatccggttgaaggcccagatattcggcaacaaacactcggaggacaagatcccagcgtttcattgttggtatatggagcgctgtcgcgtcatcctggaaagaagtggatgagtttgaacacaacaggatgaaggggtttatcagctttgaaggatatcacgaatgggtctttcgatcagagacaaactcacagccaacgtatgccacactctagggaacggcgatgtgattactatcatatgccaagatcaaagccaacaacatcttagcatggccttcttttttgtgcgcctacgtagcaaccctcagccgtatacttaccatgcaaaatttctacgcctcgtctcaaaaatggcagatgatcatcactgataccccatccgacccccttgaaccagctaccctgttcccagtccatggtggcaacccagccctcgtccttccctaaatctataaacttcccgctttcacctagccggcgctcggcagacttcagtcgttcgaacagccaatgtgtagatgggtaaaacgaagggaccgtggggttcggagcgccgaggaggtcaaggagtagtaaaaagtccatactcgtcagttcggtagggaggggtgagtaagggattttagacggtcggtaggttttggaccacttctcggcaagatggctgaatgttgaacagaatttgtagatagagataagaatgggtgaaagaagtcgactcctgatgcacacgatgatataaactcttaccgactcccataagtgctgtccgtatcggtccacctgtcgttcagatttcacccctgacaatcagcccccaaattcgatcactgtgaagagtatgcgatgttgacgtccgcacttacatctgataagcttcctctccgtcaaagaatacgatttggattgtcgtcttgccttcactaagctctgccaacaagtcttcactcagcccttcaagcgcatctttaccttcacccaatccgctcaacctctcttttcgagcgttcagaagcggtgtcagagaagtcgccaacgacagaagaagggtgcatggaaacgccgagtccgtagcaccgacgaactaagaccactccgccacccacccgacaacaaaattcgaatctcggtagatcgtcagcgctcgcgtaacagaatgataaggtatgtcgttccatacgcgcacaacagacataccttgttccgaggtgacgtcaagaaaaacttggaatcatgatgagcagagagaacgatccgtctgggcgcatctgggtcgaatgtaaatataagattggtaaactctttctctccgaacggtgtcttgtcggtgaatctgtcctttataaatttccgaaaaacgttgacgcgtgtatgaaggaatgagtatggttagcaagatgcaacccggttatctacgaggaatgcgcaagacacctactgtctcaaccgtccatttaagatcctcaaatacggatgtgatgtatttctgtacgaatcgactgaggtcaaccgaacacaattgcagaagcaaaccaacttcagtggtcttgccttgggaaacagccttgagaaatgagcaatgccaagcactcactttccgtccgatccggctaagaacaacctttccccgcaagcacagacggtctttcagtcagtataaccgacatgtcttgttctttctcaggtttggagtgacacagaaagagacccacgcgttctaggaatcaatatcttgcttagccctccatctttgactgtgtgatcgagaaagccatcaatctgtgaattcggctgcgtcaaaacatcgagcaacgttgaatttaatggacgatatgttctcttcgaagctccatcctgctcatatgtcgatcgcgcactcccaaaatctacaagaagtgcaaacgctagcgcgaacgccccggcaaccgatagaaaaggtgagatcagcatggcttgttgaacagaaaggataagaagacgaagggtacgaaaggtataggctgggcatgtggcgtttctggtcacatgatcgaagctgtgtcttttcgtaaccccggcgtaaccatccgagcactcccccgccagggaattttattaacgctggctttctttcccagcttgcttagaaaccctggacggtcatcttccttctttgctcttccttcgttgctcttttcttcaactccctcgtgtgcttaacccccctgtacaccccagcaaggcaaccaaaaagaatgtccggatatcagaacggaacgcaaaacactggagccaacaacggggttggaggaagcgtgaaccacgagcggtttctcgctcaggtctacctctgtgccggttcgtttctaagcttttccttttacggtcgatagttccagctatcggaaatggtcgcaggtgaactgatgcgaaatgtatgtgacgtgtgacgctgttcttgtgttcgtttcgacttgttggaatggaaaacagactgtgcggctgagaacaacatcaagatgggagagcctatccgttgtagggagtgcggtcatcgagtgatgtacaagccgagaacgaagcgaagtcagtttcatgttttatcttcttctgggactggattggattggcattgaacggaagagaacacagcaggaactgatagctttgtcttgtattccctgtctccgtttgtcctttgccacgaacaacccgacatgtcgattatcaaacggtctattcgctctccgatacttgtttgaaacgacttcagtggtaagtttgttctgtctacaagccagatcatccgctcagactcgccaaagtcaaactaaacgcgtctttcctgttcacatctcaaatcattctgtcaacaggttcaattcgaagctcgataatgtcctcccggtcgtctatctttcccttctcatctcttgtttcgacttcttactctcacttggatcggtttttttgtccggagagaaacgaggagagttgtaacactattcacatacacatacaccaaaaaggaagtctgtacaagactatatatacaagaaacttggaagcatgatgcatatacttctatgagcgatcatatctttcgaactttctctgtttctttttgcaaagagaattaattgtggatacgagggtgcagaacctcataccgttgcgcgtacacccatcgtttctatcaagttagagacaaagaagatgctgaaacaaccattttagtgacctcttccacctctacctcccccccttcctcttcctccgcctcttcctccacctcctcttccgccacctcgtccgccccttcctcttcctcttcctcnnnnnnnnnnttcctctacccctaaagttcctccgttcagcctcccgcttgacaccctccgcatcgtccttgctcaacttcaaaacaccctgatggaatcttcccacacccatgctcaatcctcggtcggtttctttacggggcttggaggaggacgcagtgggaccataaagagaggctgaaagatgagcgttctgagaagtatgcagaagagtagtatctcctcgttctttggcctgccgttgagagcatcaaaagatagccgttatcagtactctgttgcattgctcccaccaaccagacaagcaagagggaaacaaaggactgaaaaacagaagaagagacgaacctcggcaacgcctttctcccatctctgtctgcctacactacgcattccgttgccaactctactagcacccaacttcatcacttccgctttcctgactgctctctcaccttctcccagcttaactgcaccagctagttcattgagtctgccttgaagagcagtccgagaggacgacgtgcccgtgggtagaagggaggtaaggataagagattgaagagttttgtctaggttttggtggtttcttttgtttttgggaatcacagatcgtgtttgaggaaaagagtttagtcagacaggcgctcaccagacataacacagagaaaaactcagaaacttacttctcgacgtcttgctcggtcttggtggcgccttggatgggtgcaggggctgctaggatctttgaagtctttgagctctgtgtaatgttcagcccaaccaacgatgaacgaggtcagatacagctactaaatagcctagaaaggatacagagaatatgaaccgacgaaccatgaatgccttgtaatctgcccgggaagagggtgtagacttttgatatttcgttggatcgaaaataacctctgtcggttgcttcttcaaggttgagctcgacttaggattcgacttgacctttgacggtagctcatcatcttcgcctgcgctccatctttcgtcatcgtcttctataccattctcatcatcctcttcgccaccctcgtcttcatcgtcgtcttcatcgtcgtcttcatcgttttcttcatcgtcgtcttcatcgttttcttcatcgtcgtcttcatcatcgtcttccccactccaaccttcttcatcctcgtcttcgtcctcatcatcttgctccacatcgagagcccggcccttcccctttgtgtccttcgtgatagtcccgaaatctccgagcatagctctggagtgagcctcgagcgcagccagcatcgccgccttacttgactcttcgtcgcccgaaccaccgtcttcatcggatccctcgtcgtccgagccagtgtacgaactagcatcggaagccgagtggaaggaggacgcgtaggatggcctatttgaagttggtttgagcttttttgatttcgagaaagaaccggaaggagccgagctgctcggatgagctctcttggtggtcttggtggtctgtgtcatgcctacaaagcgaagggagagagataaggattgccaaactgctgctactgatgttcaggagcaaggactggcagaattatttgaacggaaagatatttgcaccgcctctttgacagcacgtgacttccgcgctaacattaccctcacttcctcttccttccgatcatctctctacaaactaccattgactagcgacattaatccaccatgacgaccacgttgacgacagatatccccgccttgggcgtgtacgcacatctgcttcctccttcttggaagtctagcattcgggagtggctggatgaggacacaccttcttttgattacggtggtttcgtcgtaggtgaagaagaacagaccgctcagcttttgggaaaaggaaagaccgaggtacgttgtccttctgtttgagttgtgctccattcgtctttggagaaagttagggaagtccgaacagtagcatctttggctgacagccaaccagtcaccttcatcccatccgatcgatcacccataggccgtcctcgccggagttcctttctttgaggaagtcttcaagcaggtcggatgcacgtacgctcagtcacttctccctcgaagttgacgcacatttgttgatgacctgtcttgtttcgatctctgtagagtcgaatggcatcttcaggaaggtcaaaccttcactcccatcaccctgatcgccacggttcgtggcccggctcgacagcttctccttggtgagagggttggactgaacactctggcccgatgctctggaatcgcgaccaagagcagacggttgcttacgttggccagggagcagggatacaagggtatcattgccggaacaaggaagacgactccaggttcgatttagcagcattcttcttatcaaggtaggagactcgtactcatagtctgatgttgttttaccaaatcggcctcacgaatcggacagggtttagactagtggagaagtacgggatgttggtgggtgggatcgatgctcatcgatatgatctatcatccatggtcatgctcaaagacaaccatatctggtccaagggttcgtccttatcttctcttatattctcaaatccccccttctactcctttttcttgatatcacattgactaatagaagagtctacactccgtatcttggtcatgtattccaggctcgattacccaagctgtccaagccgctcgttctgtctctggtttctcccttcgcatagaggttgaatgccaatcgctcgccgaaggtcgggaggctgttcaagcaggcgcagacgtcatcatgctcgacaatcttgaaggtgaagaacttttctcagccgccaggacgttaaagtccgagtggagagaccgaatgaaggcaggcgatttcgatcagatggccggtaatggtgctggacagggtgccgccaagggattcttgatcgagagttcgggcaatgttgaggaaggtaatttgaagggtcgattgagtaacggttcgttgttaaactctcctgattccggtctttaaaatgatttccaagagtccgataaccaacgattcatctcgggcggctttttacgttccttcttctcttagacatcgacatcatctcgacttcttcggtgcatcaggtatgtcgctccgcttatgtccccttgcaagcccaatttcagaatcgtcctaacgttctctcttgttggtttacttggaatttgatgaaacgacagtcgacccagcacatcgatttctcccttaagatccgtccaaagaatgctccccagccgtccgtttaatcaccctttgttctctctttcttggtccttttgttttcttcttccttcagtttccaaagtatggtagttatgtgtacgaacacaaggatttcactttttcgatcaagtgagcgatatgacatgaacgaatcaaagactgtcatattctttggttgcaaaacttatataaatcaagtttgcccgttagcaggcatggaggaacatcaatatatcgatcggtccaaccgagcaagtaggtgaacaaatcctgaagatatatctgtaaagacaataatgacgacaataacaacggcataatggaggggattaaattaagaggtggaaaaacacagatgatctatagattgtcgagacacaagatgaaaggcaggttctagatatgggctgtcactccgatatggatcgctctggatcaacagaccaattggaaacagatgggttcaataaattagttgcactagactgacaagagataatgacagcacggtggaacctatacatactctccatcgcccttgtcggtctggatttcttgatcggggaacatcactcttcagtgccgaattcacataaagacaatcaatcaataatcgcccaatgtaaagcgccgaataccagatgaagagaggtcaaaaatagaacctaccgaagtctagcatagagctcctcgacaagcatctttctaatgtaaccccaagaagcccatcgggtcttttgtgaaagtagaacataactaggcatgatctgggttgtgttggccgccgcttgttcgatctctttgatcttttcgagagaaatcttcgggtcgaactggcgttcggcttgaatcagatagggaacaacgtcggccatgttggtacgtgactgatctcggtatccggttcgaacggtcaggccgtagatcccttcgaacgaacgactgacatttcgagtaaagtatgacaaattgagtaagcgatcgagagcaatggactgcatggtgcgataagatgaatacgtacactttggtgatgatgtatcgatcttcaagagcgacatgtggagcattcgttacctcggttgaagcaaagatctgaatgatatatcaatgagaagagagactccattcagtatcttgatcctcccttccaa

SEQ ID NO: 2374 - DNA, 3992 bp, Xanthophyllomyces dendrorhous
catcaagatatagttaacagaggctgttgtagagatcggcaaggaaagggttatctgaaatcgtcagtcctgcttgaaggggattgatgattgttacctaaagagagaagcagagaagcccaccaaagtagatctggcctttgaaggcctccgaagtgtacttcatccttaatcgagggagtgcctccatggagatcaattgttgagtcaaactgaatgaggcggtgatcaacgtctgggaggcaatcagctgtgatgacaagccaaccatgaaaaaaaaagtctaagtaagtcatccgagggttcgatactctaccaggatcgcaacgacaattgaagacatacggtggcgaagagcccaaaaatccatagtagccaaaacactcccgatccggtaccaccggggatagaattatagaagatgttagggatgacgtttggtccatcggttatgattctgtgagaacagattagaacacgggcattagtgttgattgttcttgcattactgaagtctcaagggagaaatcagacatacttggcgccttgtccgaggtaagctagcacaagacatatgtaagcatagacaaacccgatccggatggaaggcttccagcgcaccggtaggaggagaacaaacaacgtcaatcattctgaactggacgaatcaaaggctagcgggttcgatgactaacagcgttaaattggccaaggttggcaaacattccttcacacccagtgatacacagcaggacacctgccaatgcatcgtagtcaccagttcgaacaaagactacaatcaacagagtacaggtcgtttgtcaggtcggttggagtgaagagtaggttgaactgtggatagggtattgagagaacgaaggacaaacacatgatagctcgactgggatcaaacgctctgaatatcccaggatgggcaacaatatttattattccagtgattccaagcaaggcaagccaaatgacaaccaagggggagtacacgatcgagatcttgtgtgttccgaagctctgaatgatgaatacgaaaataaggaacccaatggcgatcggagtgaccgagttgatagtgctaggtttggctacagcaattcctccgacggcactacggaaagaactcgtgtgagtatagatatccattattagaaatgtttgagaatatagatcatacctgacgacggagacagcaggagtaagaattccatcagccaacacaagagcggttccgaagaaagcctgtacattccccattcatagagaaaagagatcgttggttgaaattcgactggcaagagtgagaggataacaaacgtggaatttacccagatcatcaatggccatttcgactttttcaagatttcggatcctgtctttccttcaaagtctcttctgtcaaacccacgagtgctcgtcttggtaagctctcgctgctcatctgaagaagttacttttcggggaaacagtccgatgaatagtgcgaagactcctccttcgcctgatcagacattgaacgttgaaagaaggatttgtgtgagtgcaagttctgtttcgttcgacccgttctgaatatatatgtaccttgatcagttccaaagtacaaagcgatcaagcactgttttgcgataatcgcccgtttattcgtccctcaaagaattcatgagtatcccacgtcgactcccgaccgcaagcttgaaaagagagaaagggagaagggcaaatggaactcacatatttgacgagtggaaggagcgtcagtgtccaaacgatggcgctgactgagatgtggaaagggcacggttcgttagaaccttagagcatcgagacaagacaaggacgagaagtgaaggctcaccaccaccgatgacatcctctgctgaggggacctatactcatcatcgacgtacaatcgagatgagaattgtccatacatctgaagcttctttctgatcaggttcacagcatgtgatatcaaactccgcttacgtctccggatgcatgccaaatcccgttcaacacgtaaagcgggctcgtcccctttaggaagacagcgcataggcacatacgcacacgcacgcaagaggcgagagagagaaagagaggaagaggcatcagttagaatttaaaaaaaaatccggtcatgcccatagatataaaccagggtagaagggacagatagataaaaataagatgattacaataaaagacaaaccatatcagaatagatgattccaagggcagagaacgacatcactagcagctgcctcaagctctgtgattgtggagtcacaagttcactcatgtttgacaacgatgaaggaaagataggtgggaaaagatgtatgtgagacgatgagagacgatcaagagggatgtaaggtacagaaagagtgaaagagtgaaagagtgaaagaggagagaaagacattcatcaggtcaatggtttttatacccttggttagcatgtgcgtcttgcccagcgtcagtcagaagtcagctagagtcagacccgacaagaagagggacaaggagaaggggaacgagtgaaaaaggagaagaaaaaaaaaaggataaaaaaagataagtgggtcaaacgtcaggttcagcaggttgtcatgagtgagtgtgaatctcgaccaatggatcgggatggtcgatggaagccagactatacgaaagaaaggcgtcgtcgtctgttctttgtctctttgcccttgaatatgccgagcgcacggatggtaaacgctcatcgcctctcgatagagtaagcagctcgaaaaggagagaaggaaggaagaagaaaaagagagtaaaggtccactacaagggcgctgctccattcttcctcgacatctgcctttagaacatgttattcttgaaagaatgtcgaacttagaaacaaaactggctaaaatcgcgctcggtcaaccgattgggacggaaactgaatcggatcaagaccaaatcgagaccagaccagaccagaccagaccataacgatcagaggaacacagaaggataaccggttacattgaacaatcattccaaacgatccgtacatctcaccgatatacaccatgaggcgtatgatagcaccatgagcacacaggcaaggcgatgtctgttgactgatcgctcggagatgcatagagcgttactcttgttttctccttctttccccgtcttggtcaaaatacaaaaaggaaaaataagataaaaacaaaaataaaactaagaattaaataaaagttcttcctgattaggcagttacaccggggtttattcctagtagttaccatatcgtcagcagcagcaacgacgacgatgacggggagctgttcgcctcgagaaatatgacaacaactcaagcaagaagagagagagaacaaatggaaagcagtgctggcttctacaccagaaacccaaaattagaaggaaaatcaaaagaggctctgcagacaccgcttttcgccttctgtaaacttacacaggtcacagatctccgtcatgcttacccgtcccggtctgaccgatctcccttccctgttgtttacaccccctaaatccatcagatgaaacttcattgagatccaattcgtaacgacaaggtttcgttcctctagagaaaagaaaaaaaagaagatagacaacaagaaaaaaagacaaagcaggcggaaacctcgaatatactcgaggtctccatcctcaacatttacttcttcccttttctattccccttagcctctcttttattgttcatttgtatctttcgttcttttttcttcccttctcgctcaatttcgagcagttctctgccgctttttcacaccaggtgaagccgctgtagtctttttgagtctctttccagttgagaacgcgttggctgctttatgctttcgaccaagcgggtccaaaggtttgaccgcgtagatccggacctgcaagtaagagaaacgaatgaatcaatgatcctgttc

SEQ ID NO: 2375 - DNA, 19178 bp, Xanthophyllomyces dendrorhous
gttcaagcaatacctcctctccccagtaatcgagaagaaaagaaagaagaagaagaaactcacaagccaattctcactagtaaaggcctcctcgaggacatcaagcgagggactttctgggatctcttgatttctcactcgatcaaccgttcggccacctccaaagagctcggggaatcggtagtaagacatcttgtacatcaacgagttcttcatcgtggccgacctgagtttgtgtgtatgagagcaacacgaacaagaactcgcaagcgttagcctctatgtcaagttcgacgaaagagagagagagaggggtatcgtctcatcctacttacgcgtccttatcgaccttgtactctcccctgggcgtgaagtagttcttctcctgaacctcttccggccaaacaccctgtgcgattcgaaccatccaaaggaacttgttgatgtcatctccagaataaccgagcagtcctccaaagatgacgagaacatagtccacgtcgtgttgtttcaatatagggtacgacacctcttccgaagaagacatcgccttcccgacagtggcaatgtgagtattgttccatgtgttgttatcgaccaacgtcggcctatcagccataccagcgatctgatatccatagtcccaccaactcatcaccaccgcgtccttcttggtgttttgtcggagccaatagtatgcctctctaaagtcgtcgatcgtgttggagcttccgtcctggtttctcgtcgagagcacgaccgagggggacgaataggcggtcgatgtcacccaggtacagtggagaacaaacagcaaaaggaatgtgctcgagattccggtaacaagcaatcggggacctagtccaaagattcccttctcgatcttctttccagaagacttgttggcaacattcttcttgggggtatctgaagaggcagaagaggtctcggttgatgaagtcggtcgagatgcctgcagagggtcgacgggaggtcggaaatcaaggatgggctccggggttctgggatcgatgtaaaccttgaggaggttcgtcaacgccagagcggcagagacacagacgaccggagtgagagtgagcataagtcgaaccataactccggcaaagtacgatgccaacgcagcatagatgatgatgaacacatgggcgtcctctagcttctggaagcagaagaagattccggcagggaatataaagataagcatttggaggtcaaagaagaacgagggccaagctgtcggctggtgctctgagacggatgcgatgatggggactataaagtgatggaaagaaccagcgttaaaagaggtgtccgattaaggatcagaacaaaggcaactgggacatactatggatcttggcgtagccggtgtcccatagggagtagaaccttcctgtccagggagcaatcttgccggacatcgtcaatccgacaagcgctccgaacgcgagcaggaacacggtgataacaaagaccgtaaggagagtttggaactgcttgctgggcaagtgagatcggacgatggtcacaaaagagactagctgaagcagtccgaacacacctatggaaaagtggaggaaattgtatgagaagctgaccaagagaaacaagagaggaccagacgaaaaacttaccaagtgcggccatatgctcgctcgtcttaagaggaaggaagccgacgaaaggaacctgcatactcgccaatgttccgatcaagtaccaggacgagtaggcaatgtaaagcctattagtaaacctgcccatcaagaccaacacgaaggcgtggagcggaagcactattgattttggtcaaggagtaacaggtaagattagtcgacataacgattcaaataagaaaaagaaggagagaaggacgcactgttggtgatgaagacataacctccccaggcggcaaccatgtatccatagaacagagcagccattgttccccagaatgcagatccctccttcagcgcccgaatccagaggtaaaaggtaaacatgagcaggaagatagcaattgcctcattatcgtaagaaccagcgaccgaacgggagatataacctggttcaaacgatataagattgagaggggtataagagtgcttggctgtatttgaatagagggcaagacagattgagaagcacgaaccaggagcaatgccgatgaaggcagcagcgagtaatccggccgaatagtggccaggagcactcatctcgtttgtgaatctgatgaagtaccatatttacaaagtaagcatctgtttgacacgcagaagtggacgtttgaaggcgaaacgtacagataagttgcccaggcggtcaatccactaaacgcaggcgcgagcataacacagacatttcgaatgtcgaccgggacgttgatgaccctgaggaagttccagatgacaccagacgtagccatgagaccaggataaacagtcccaccgaccactctacccagggggtaccaggctgtagggtcgaaccagttccaaaattcctaaacgagattaacaagtatatatataagagaatatgaggtgaacagggtgagctagacaccaagaggaagaattagtgatatggaaacgcacgtagaacccatcgttgacgagaactttgcttgctcggctagatatgtagaacaaggccaggtgcaggtttcagcaaaagtgaaaggatcaaatgtgagaaggcaaagggaagaaaaaagggagaagaaaagaggaagaccgacaagttgaaccagggatcgctagagaagatgaggaatgggagaattcgaaattagccatcatgtaaaagcactctaggagcaagataaatccgactgacaattcgtgaataatactctcatgtctaatgacggcgaacaatctgctggcgacggctgctccagagatggtcacaaggattaggaaccggaggagggcggatgtgttcgtgtacgtggactttttgaattttggcaagctataagctactgacgcggccgacatgacggacagcgttctatctctctcttattgggaggtctaaggaaagaaacagagaaggaacgaaggaacgatcgagagcaaaggtaaggaaagaattgatggtgaggacgaagaaagagagatgtagaagtgaatatggagatggacaaggctgcggttacagctgatcacgttccggttactagctacgtaaccaccctgtcgaggcgagaactagactgatggtcaggctcagagtcagctttctttgacgacgagaaaacagaaaatcctagagaaaggagaaaggaggaatcgcgtgagcaggcagaaggtatgtatgtgtgatatacggatgagcgagaatcactcctgagtgcgttgcactcatggttggcctgcagagaaaagacctaagccattccttctttaatagatacacagctggacggcctctctatcaaactggtaacacaaactcttctgcgctcactcttcctgttccagttgtcctgtctgctagacgttctcttctactctgtgttcttattgcgtgtgatagtctctctgccttgagctgatgctatgaaatgtactgattgttgccacgtgatgtacgttagggttacaacgccacatgatgtattcgtgctactcgtagacactgccatgcctaattcgagtgttgcatcatcttggcagatcactttttctaatcactccctcatcatcaactgaccaagaactaattatctctaactcgatagcaacagacaacgaagtgtaaaagaactagtcatgacccaggctgcttcaaaaaatccgttcctctctccgtccaatacgggtacaagtcagacacccactttggtaccgcagcatacatcaagttcatatgggtcgagaaacccgtttatcgacccactagcttcgttcgctcctgcttcacccatccagtcctcctcatatacatcctcctcagccaatccgtacgatggcctctctccttcagaaatcagagagtttgaacaagccaaggaggacgaggaagcggcgaaggctggtaagacacctcctcatcgataccaacctactgtgcaacaagcgccacccgttgaaccgagtacccgaccaaccattacatcaagcagtcaaaatggatccagtactggtctgacagggaatggaatctatataggtaaattccattcatcgtgaagatctatatctcgtgtgtgaatttgtagctgaccatccattcttatcaatcttgactctctttagatgacgacgcggctatggaagcagctattgcggcatctctgggaacatcccctgcgcggacttcatcggtcgcgcaggcgaacatacaaccaccagcacttccctctcgaccacaatcatttgcttctccttcaggtccacctccaatcacccaaccacactcccctccaccagcctccgatcctccaccggcgtactctcctagtaataccaacgaacgtattcttgattctggtcctagattaccttcgtttgtagagagacctacgattcaaacaagcgtctcgtccgtgtaccctcaatctacaggaatacagcctcaatcgaccggatggtcggacggaggggttggaaaccccggaggatacctaagccccggcgaacccggttggagaccactaggccaaccactctctccctctgacggcacctatcaccatggacagcctccatctcttccgccatcatcagcgtcatactctggaccaagtagcaggccatcacctcatcttgtcacatccggaccgcctaaagatctgacgccgagtagaacaccgattatcggtcgaccgtacatgttagatggtagagttttgatctatcctctgaatcatcgctgttggaagtgtaacaacactgggtgcgttttcgttagcttctttcttttccgttcatcctgcttagtatgactcaaatccaatgtttaattattaatgtttcttcccaaatagtttcaagaacgacgaccctacccatccgtgccgtacatcctgctggaaaaagtatgctcgtccatactcttccgctctgcaacactcctgggcaaaccctggcccaaactatcaacaacctctaggcttcaatcgcacgagttggtctccttataacacttccacgagcaatcagcaatactatcctcaaatgaatttcggagcaggcgcttggagaccagtgacgaatgtaccaccttcaggagcggtgatctaccagccaggagatccaaggattggaggaagactttgctcaagatgtgtcggaaggggacttacaatgaactttcttctaatcgacgaaacttgtggtgcttgtggcggcgttggcaggttgttttagcgtattcgttcttctagaactcgtgtttccattccaaacactcttataatgtcattctttaatctaatgcttggccatttgtgtatgtccttccatcattctttacttgttgatacatgccatgcgtactcatgctcgagtcttcatgtagccgatgaaatcggcatatcaccagtcccaatcctgatcctagtaactacctcgatcgagtgttatgagtttcatatcgctcttcagcactctttcaactgcgttaattcaaaacattgatataccgaagagaaattgtacaggggtgtgaaagacggagtagagttttcttaattgatatatatttggggttgaccttgatctaacgaggagcactcttctcctatattcgaaaacaaccaaagacccacagagaaaaaacaacaacaacaacgagaaattgagcaagtattcggatataggaagcgaaaggaagaaaaatagaagcaagtcaaagagagacataccaagaggtcctttgcttcattgatcttactagccaggtaaggggcctaatccatcaaacacatcatcaaacagatagagaaagaaaaacagtgagaatatcgtcccacgttccagcagttaatacctgggagtaggcgaagcgagaatcgacgaaaaacagaggaatgggatggaaaactgactcctcctcgatcgggatggttagcaatcatgatcctacgatgagcgtccttgatcttcttgactgatatcgggtccctatgaacagtcgagattttcagacgaaaaaaggttagttcgagtaatagtctgtttgaatcttgatcctcatcagtatattgtattgtatgaagaggatcaggtgaaggaggcggtgacgaataactgcatttgattttgcagcagacaaatggagagaaacgagagcactcgaccatttcctccttctcacagtgtgctctcctaggaaaggtttccctcgaatagacgaaaagacagtgcaaccctattccgtctacccttcatgggtcttcacctcagagacaagttctccaccaagaacatccatatcattttcctctctttctcggagaccatgccttcttcatgaagaggagatagcaacactcaagagtatacagtaaagaacaaaaactacccacctgatgcccaagataagcttagcctctttgggatccatcttctgctggaacccgcccttgacccacatatccgctccaacctttgcacgacctgcaagtcggacgtaagcgagtcgtccaccggccagtgcggctgctccacctagcaacatagtcaacgacgccatttctattgccttgcttctaagccgatttgttttgttgtttcgtatacgtctggtgtagattcttgagctaagcgctgaagaaaggatgttatgtgtacgtgtgtcgagtcggtcgatggtccggaggaaaagacaagccgggttaactagaagcagcttagtggactataaacctctgtagatgcattttccttttgaagcacgtgctcaatcaatgtggctacccaaaaggacagtcaatcttcaacatcttgccaggttgcattttgcttacgcgtttgcaccgctttggccatctcttttccttcagcctgcactcactcgctcatgggaacaatcgtcttcatcttgcgctcactctgtccgttccacaccatctctttgtacaatggaaggtgattgatatgggtacaacggaaagtgaaacaggtccacggttcagagaactctcccttctacatcacaaaatacaacaagaaatcaacagaaccctgagcattttgtcgttccctatttccattcgctttctattcttcaaccctcacatatcctggcggacatcgttggacgtagacctgttgcgaatatttctttccttcccaatcggtggctctttttctcaagacagcaagcgtggaaggacaggaaatcgacaatcaggaatgatagaagaggatcgctaatcccccgatgtgcttggcccagaagataaactcctgaagaattcattgtaggcttgctcaatgtcaaacaacatctgtaaaagaagaagacaaatcaatatgacgttgtctatgacagaagccggatagttatgactgcacagagacagggcttacctgtctggactgctcgtcggtgatctcatcgcttgcgctcagcgcattcaaagtgatcagcctatgatccaaccaaggaacaggaaccgttgaataaaactatgtcagttttcgagcttgagcggagagaaatcgataaagctcagacgctcttgaccggaagagaaaaaaaagaaaatatcactgaccaatggaggatccttcctcttccttcccattcagcactagctttgaatctcgagtagcccgccatgaggtccgacaagtatggatggagttgatctttggcacgcatgtttaacttaagagcatcgagcagagtgatgaacgactgatacatatatatgagttggtataaaccaagacaagagagcgtcagaagcttgccgcgctaatcgatgaaaccgaatcctggacacctgataaagacggtaacatacctgtgtgacctcagccactgattttccagtttcgcctccgttattgtccccactagagtgttctacagtggctggcacacctagctttagtctatgaacggccgccggattatccatctacatatatgcatcacgcgagtcagaggagaggggtcgataaaagacacgaagatatattcttaaaagtgagatagaaacataggctcactctaaacctctccatgaaggcttctaaactaggaaattctctttcgggaacaagtttcagtattcccttgtattgagaaagcagtcttgtgcaggcaggtgtatatctgttcatatgccagtggtggtggtgtttgatgttgaacaataaaacctgttaaccaagcctgctcatgagctaaaatcatgatacaacttactctttggcactgatactatcccgtacataggctcgctcgaggtattccaacgagacgacgatggagaacaaggtggctagggagtcgtacaactctcgttctgccggtgtagtatatagtcggagttcctcatcctgtgtatttcaaaatgagtcactagccgcactaagctgaaaggaagactgcaaaggatgacctcactggattgattggcatggctgatagatggtggtcggtgacgaaagagtactctgagggaacagtagatgatgaacgattgccaagtaggcaaagccacgtgatgaaaagctgtgcaatcttttttccttctgccttcctcttctctttcacttctatttcagtataaccatccaacatcaccgttgccatcatcatcaccatcactagcagtacactccatcgtcaccaatatccattctatgtctgttacacccaccgacaagcgatccagatcccccttggctgcaaagtaccgaggcgccgtgatcgaggttcgttgaaagtttccattcatcttccaaatactcaaatatctaacggtttttacttctattcttccctacctttacatcttaatgtcttcaaacttatttgacacgtgattcaggatctccaactgcccccggctatttgtctaggtcttgctaccctagtgattgatgtcctctcgttggcctacgatcgggagttcgatcaaattccgtttgtcgctggttttctatcgatctcggtcttcctaaacaagtcgtgtgctgacgatctgggcctcatcaaactcaaattgtatcttctatgaaatttgatgaaccaaatagtgtgttaacagatcctcgacctagtcagcctcgtcggttgcttggttacgttgacgtgaaagccttgaaggagttattcgcccagggaaaagttcaagaggttcgctttcttatctctttactccctttcgtgcactgcctatactgaatacacatatcgctctcactcatcatctaccgaaacgatctgcttcaatccgtagagcacggcgatagccgatcactatactaaattccctacaggttccaagtcgactggaccaaacgcgtacccgtatactacaatcactcctttaacccctttggccgagcttgaaaatttcttcagtgggacaggggtcgcttttgctttgggtgagtgtggtgatatttatcgttacaatatcaaacatcgtcttctggatctctttttgagttcatcgaaagtttgagcgctgatatggagggtaccaattcatatcttgttcatctagtgaccgatgagaaacgacgacttgtttacggtatcgtcacaaaacaggatctcgaggtatgctcattcttttctatctttcggttggattcaatgtcgtgttctcaatccttgtgtgtttcgtcacaacagacttttgtgtcccgacgaaacggagttcctaccaactagatgcccttctcaacccatcctttctggctacttctctcttgctcatttccgttacatcttctctctcctccctatttctccttgttaatcaaccctttggtattgttttgtatctcttccatctttgaagcctatgtctgtacgtacacagataaaacctgaacgacatcaccctttcaaccgggcaagccctttccttcccccttctttctgcacttatcttgttttcaacaccctatgttattttgaaccatccgaatggcaagaattcatcacagctagatgagaagagctgaagaaaaagaaggaatcgagcacagaattctgctgcgaagtaaaattccagtttggattgaccatggattcgtatcaatacgaattatccgatcaggtagacaacattgcatagcaagatcttcatgctcaccagtataataacacagatattgtgagataaagatgagaggtggaagacagtagatgggaaacggaaagaggaagtcggggatacaaacctttgttcatgcatacggtgaaatgacgaaaggttgagactagaggtaaaacataggacgtgagaggaggacatcaacacaaacaaggaagacgaatcggagaagaaaacaaaacaaaagaaggtatcgtagcgcagaaggatgattgatttgaaaacagacagaacaaaatcaaacagatgaaaggaaggcggaagagcaagaacgagagaataaagaaacatgataggaggaatatcaaatcattccaatttttgagattaggaaacttcgacgcaacaaagaagcaacaggagactaagaacgagagatagagacaccggaggaagcttatctatgaagagagactaggaggaaagagaagatctaaaacatcttgaaacatgcttcgaagatgctaaaagtgacgatatttgttggctagcatgcagatggattaaaggaagcgattcagattcactctcggaattagtaaaatatcaagaaaaatggagaagaaaaggtcatttaaacttacaacagcacgaatcaatgtaggcccaagccctctataaaacactttccaaccttcccgcgcataagaatgctttatggttgacagtgtcgttctatacgggttcaactctccattcggaagtctttttgacgatgacgcggcttgaagtcttgtcttgacgacatctagagggaatgttgtctgtgtaataaagtcaaacgaccggtcaggcgtccgcagagagtcaggaagagaagtgacgaagagtcatagctcatagctcaaagggagaagatgatactcacagtccagctaaccactcctgctagaccaccagctaatggaacagcccaccagcctcttgtgtcctcctctagctcttcttctgtctgagtcatcaggtcatgatccgtatgaagtttggtaggtgaaactgcacggaggatgacttcatatctgttaatttcgatcgatattgttccgataaatccgggaagataagaggtcgaagatgaacacgcaacgtgggagatatggtaagcaagtggcgcgcgcctttcatcaatcactcaaatgaaccacactgacgtccagaagtaaggtccataacccaagtctcttagccagcaagactggaaccctcgatagagacccttgatacctgatcgtttgaaaatatctcgagcaatcgatacagttgatggtgggtgggatgtcgtaaaagattgttgcttgattttgacaagctctgttggcgcgttaattgttctgtgttgcgtttgatcataatcgcaatcgagagaaaaggaggcgcgtcagtgggcgtgcaaaatcctcgatattagaagttagatggacgaacgaagcgacaattccactgacgcatcctgcgacgagataactcgtcagattaggcgttcgtgtttggccttcagtcaaagggggcgcaatcaaagacattgtgtatttgaaggaagcgaatataagaccgttcactggagccactccgatcttttatagtcaaatagaaagagatgagatcaactcataaatttgcttattgagctcaagaaggagatgaaacgcactatgggggaaacaacacctcggtagagacccctgaactgcaaagagaacaaggaggtcaaagtcaaagatcattgtcaggacttggctatagatacatcgtcccagcgacaaacttcaccttttctttcttggcaatcagacctgaaggagcaaacctgggatgttagccaaggtgttctctaaacgctctttattagaggaaagatactaacgaagagctgcaaatgtcgatgtgtattgtccagaaaacgcagggttttgaaatcggaccttgactggtatcatttgaccatgatcgcaccttgtcaggatcatcaaataacatatgaaggtctgataacgcccaaagagagagctaaaagacgaaccggtatcgaaaggatgtccaacaaccacacctgctacacctgttcgagtgcgtgtcaacggccatagcgcatcattgatgcagaatgagagaagaagttagagaatctttcattatgactcaaaaggccagagcttttaatttctctatgaaaagacgacaaacgacatgactaaccacctgctgtcccggcaaaaaagtcaaggacaggccgtggatctaaatgccaaagtagagaccaaatccaggtgtgcataagctttgtctaccggaggcctataaacatggtgatcacatacggtttacacttttctctaccatatatacttttcttctattattcaagcgtctatcctttcagcgttcaatcacgggatatttgcctgagcctctgtagtacttgttcgtatagtctagctgtgtatacgcagaaagcacaagaagagttcttgagaagaagtggcgagaagaaaggacaagggtatgatgaaatgatcaagctgagagcaaacctttgggaatgctctaccagggtcgagaaagcagccctaaaaccccaagtcacgtgacgagattatataataagtgtcagggtccgggttcagagggtaacgggaaggttacaagaatgtgaccaggcagggaatagggctggcaagaaggaagttcaggctctctagcttggtgactgtgacgagagcgcaaggcagggaaatcgtatgaataaggttgatacaacaatggaacaagagtactagggaaccaaggaatgacaaaggattcagacttggtagactatgctatgggtggcaaagggggacccatcttatatatcatccttagactccaaagattatgcataatagaacaagtcatagaaggtgctagaagcacctgcgctggaaggtcatatacctgcatgttgatgtaatgagagagcataaggaataccgaggcaggagaaacaacagaaccaaaagaaggttaccgaggtgtaacactcaggtcacatccctgacaataagcatttcgctgctgctcatgacgacacgtggcaatggcggacgcgtcattatatcgttcacgcgacgcgtttgattacataatacaatcagttctatgcttatacctgtcatactcgccttcaagaccatagcgacgaccacgatcattatcagtacagttacgaccgccatcgccttcatcatactcatgggccagcagacaaagctagattcttttgtgtttaccacttcagacagtccaaacgactcgaaatatatatctttcgtgaacaaggatcaaattctaccgacggccgccagagtaaagcagcacgatcctgaagatcaatccctatcgagtgaacatagtggggaggaaggctttgtcttggatgataaacccggttagtcttagtggaatactcatccgggtgagaatactaaaactgtcttcttgtgattcttgttcgttccggatttaacgcgtccggtaccctaccctcgtatagtgattctgtcaccaccttctaggtcgtctgtatcactgtcaagctcttcctccagccaagcaagacattcacgtaaacttgtctctcgatcaaacaaaagggtgatacagtcttctagcagctctgaatctgatcaggatcgcgtcagcaaacctctcaaacgcaacgccaagatgctcaagcgaccgagacgtgcagaagcagagaaggaaacattagtcgcgtccaatgaacctgaccccaaggttcgagcagtgagtgctaaaaggaaagatgagctcattctagaagttgtcagaaatttgaaagggaaaggcaagtcacaaagtcatgatcagcacgagaaggctggtacaggaacctcgtcgcctcctcgacctacagagccctctcattccccatcaaccccgtctggctggcagtcagcatccaactctctttttggcagttcacctccgaatcaggcatctcaatctcagcttataatacgtccacctatcgaggaagattacgactctgatctcattatcatagacgactcctcacctaccagtcctattaaacccatccctttagccttaccagctgcttcagcatataccaggcaacctcctgtgccatcacctccaccgattaaactaccctcaaacaccaagtcaagaacgagaaagaaaccgagtacatctttggtaaagcctggtcacagtcgaatcatcaaaaaagcaaaaacaaccccacgacagcggatcggttatgtgacggcgtcctcctcgagcgattcttctgaagaggtcgaaaagcccactggcgctggccgaacgtataagaggaaaaatcggacgagggggctgccgtcttcgtccgatgatgattcggcagggtcggaggatgcattttcagggcaaaaagctgtggttactcaaaggatggggaagagccgcatggttgtttctgaggatgaaacgaaggctatcgaacctaaagaaacaaagaacaaccggtcgactctcaaatcgatatcgtacaccagccgtcagagtggagatcttgggtccacgccaagctcatcaacagtccccaaggttgagaaggagaacggctcgaaacgggataagccgccgaataaatttaagaatgccgaatcgttgagcaacaccttacgaaagcctgtcactccgccaacagaatctcatccggatcagtcggaagacgttcctgacctgttttattcaagtccagaacaagagcgttatgttaaattttcgaacaatcacagaacccccgcctcaaaacctgaaccaaaacctgaacatgaagatagttctaaatcttccccgaaacatgattcttcatctcgaatagatgacgcgtctctggatctagaagttcgactatcgaaagctttcactcctatcaccgtggaaacggcacccttagaactctcctcatctcggctccccaagcctttgacaacccgtcaaaggctgtccatgtcaatcgtttcatcgaaagaagtcgctttgaaacccaaatataaatccgtttcagaatcgaagggggtttcatcaactgcactacccgaggtggatgataaatcttctatgacgagctcagatccgctagcagaagatggctccgcatgggttggtcccaacgatgtcacccatgaaagctccaagaagaatgaggaggagcaggtggtagagagaaggatgcaaagattaaagggtggaaaaggaggtggaccctcaaagcaacggataatcgtcaccagcgaggaagaagatgacaacaatatcaatcatggcggcaggtccgaggcaaccatcaaaagcaccagacaaaagaagagccgagtacacttggatccctcggattcagacgaagagaacgaaaatggagacagtagtgagggtcttcatgagtctgaagtcgaagatctagaggacgaccaaggaaaacttcgtaagttttgtctttcttacttaatcatcacatcttttctttttctgaaaactgtgtttttggcgattaggtatcgtcgaagctcgaatgcgttcggccgaagatcgaaagagcaaacaggcgctagctcggcagagcgctcttgagcgactaaagcacaagaaaggtttgtggcgcgtcttctgatgtagttctttacgattcttaatttgtcttggttggtttggattcgaaacatgatccagggaagaaaggaggatcttctgtacaaaccccatccaccggttcctctacaatagaagaaaaccttgaccagaacaatgtatgggcaaaggatgaggacggagaatggatagttagtggagatgagggaaacagtggttatatcaccgacgatatagaagatgcagactacacgtcgttgatgccgatggaattcaggtcagacgcttctcaggtgagtcttgatcttgctgataggacatgagagcttgagtgatgcgtacgatatgttctgactatgtgcagcgatgtttatatactatctcgatcggtagccaatggaccagtgctttcatgtcatctgccaatggcatgtgagtgttctttcactactaaaattaagtgtacataccatcaactgataaaattcccttctcgtcaaaatctttatgctaggttcattacatcatccaaggccggccgtttttaaaattgagtgcccacaatgactacttccgaattcctatgctacggctgagagagaagatgaccgatgttaagaatcagttcgtctcttcaccacatataaactatttgttcaacagacatttgacattaactaaaattgatcaaaaatcttcagagtagcatctcagatttggccttcgcccttcaatctttccctccagacgtatcctgcatttactggaggtgccattaaggatgctccaccatgtgcggcttgccgtatgaccaacagacctgcaacgagagcgattgttttgcgaggagatccgtacaacaagaaaacgttcaaggttcgttcggcgataaattttatatctacagggtttgaattcatgtcattaataagatttcacatcttcccttggcttgtatgcaggacctcgatgccaactggggtagaaaaggtccacccgagactagctatgtacgtgaagaaataagctgcattttggctaaagatccgattgcttctcaatacattctgatggggtttcgcgctgatttgatcctcgaggatttgttggttgttgtaaatgatatgtttcgtacagaatgttggaaaatactgctacgctcgagcgcatgtacgtgagatatcatctatagtctcgattctcttgcgatagtcgatcaaactcgtgattcttgtactgacaccgtagtgtgtatcctctcctttgttcatagaaatttcatgaggttggcagatatccatgccttttctagaacctgaggtagaattactgtactgattctcaaattacattccactcgccttgttaccactgaagttggctcattggggttcgtatttcgtcggtttctctctcacagatcttcctagtaacttgaatgctgctgatactcatgacaatattcccgggttcaatattcgctatcgacagagtacaacctgcaccacgccctgatagccattcttcaagttctacgcaagtcggttcacaaagatgacgatggcgatgaggacgacgaagacgtcgagataattgccattcgggagactgtcaagattgcaggaaagactgaacgtgtagattcattgccagattataatcgtccagataaggtgactgagtggttgcagaagcgacaatggatcaaacaggtttgtttcttttcttgatacatctaggttccttcaccctttgtcgatactgaaatatgcttgatttggataaatgaacaaacaggagtggctgcatatatctgatctgctgctttgtaacgaaaacctgaacgctccttggaagaagacggattgagcgtagttcatatatatgtcgactaaaagaatgttatgtggcacagagtgattgcgagtctggatcatattgtccgttgttgatggaaccttacacgacctggggaaatctacagtcaaggcggagtaataacggtccggaaatgttccgggccggaataccggaccgcttagcgaatgtataaatgtccatctccatccgacggttgcttctttttcgcttcttcctcacccatcctgttgatcggtttgataattcccatccagattgccatccaagttctcttcaactagatcttttactcaataaaccaagagaatgtctggtaagttctgcgaactccgtcctacttagtcacagttgactttgctcttggcggcataatttgatgaattcgaacttcgttctttctcttttttctttctttttctttttcttttcctactcctttctcatctgaattttaagaccttacgatcaccgactttactgttcatggtaagtgatcatgcaattcgatttgttccaacaaggtgagctggtaaactgtcttcatgacttcactgataacttcgacttgttacacctttcgatagacgtccgttttcccacaaacgctgatgcctcagggacagatgcgatgaacaccaggtgaaatagttcttgccttgtctccgatataagtgatgcatccatgagcttacaacctttgtgctcacttcctagctgtgactattctgctgcctatgttgagctcaaaactgaatcttcagaccttaccggacaaggcatgaccttcactatcggcagaggaaacgagattgtttgcgctgccatcacacttatctctgaaagaatcaagggcaagaagatcgaggatttatccaaggacatgggtgctacatgggatttcctcgttagcgatccgcaacttcgatggatcggaccggagaaggtacatatctttatgtcctctcctagcgccaaaagatactaatatagcaccgtacgctgactaacggagatacgttttctatgaaattccatcaactcagggagtaatctctattgccacgggtgccgtatccaacgccatttgggacctctatgcccgatcccgaaacaagcctctctggaagctcattactgatttcacaccggtgcgttcttcattccttgcgccatcgtactgcgcgatgcaaccaatgagctcaatatgattctacttctctaccttctcgatatatactttatactcaggaggagtttgtgagatcgacttgtttccggtacatcactgatgctatca

SEQ ID NO: 2376 - DNA, 3093 bp, Xanthophyllomyces dendrorhous
tcactgatgctatcactcctgaagaggctctggctttcttgaaagagaaggaggcgggcaagaaggagcgagaggctaatgtgataaaaactggataccctgcttataccacctcagtgggatggctcggttggtgtcatgtctcctggcttactctcgtatgccataaaatcatctgcttaactacgtgttttatcacccatttaggttacgacgacgataaagtagctcgacttaccaaagaatctctcgcccaaggcttcaaccacttcaaagtaaataactcgttcatgtatatatcgctatacccgcttgtactcttagctgacttacatacgtccatgtattaaaaacgtagctcaaagtcggagctaatctggaggatgatcttcgacgaggcggaataatccgatcgatcattgacgaccccaagaacctcccgtatgcaccctcaatcacaacttgctacaattcctgcaatgactaatcattggttttcttatgacgattcagtgaatggagagaaaaaatcgaggacaagacgattgtgggaaaaaacgctgggcctgccggttgtgtcttgatggttgatgccaaccgtacgtcattgcattattaatatttgacataatatggcgctcaccctgtacttgtttcaacagaggtctgggatgtctcacaagctgtggactacgttaaacaacttaaacctttgaacccgtggtttatcgaagagccgactgctcctgatgacatttctggtgaggctcttgtccttgtttaagaaacttattctcttgaatgagaagcgctgaaagcgtgctgtgtctttctgttgagtaggacatgcccagattcgaaaggcgctcaagcctcatggtattggagtggccacgggagagcatgcgtgagtgtactttagcagtccttaatcgctcctttactctcagacgacattctgatttttttccatttgaataaaatgacgataccagtcacaaccgaatgatcttcaagcaacttctccaagccgaagctatcgacgtttgccagatcgatagttgtcgactagccggtgtgaacgaagtccttagtgtgctgctcatgtccgccaagtttggaatccctgtctgcccacatgcagggggagtcggcttgtgcgagtatgtgatccatttatcgttgatcgattacatcgcggtgtctggatcatatgaccgaaatgttttagaatatggtaagcatgtctttctcgattctcttcttgtctgaatttatgtgtacgatgggtctcaatatgttcctttatgggaaacagtcgatcatctccatgagcatttcaagtacccagtctctatcaacaaggctggtcgatataatgttccccaagaccccaagggtggatactcgtgagtatatgattctttcttctccttcagcgcgcctcacaacgccaacgatgagagcacatagactcaccactcatcatctccattccgcacatatacccgtagcattgagatgttcccagaatctatcagaaactacacgttccctggagagtctgatgggtattggcaagctgctgccaaagggaaagagaacgaatggaacgcagctcataatgtttcatctcacgagtagacgcatgtttcatttcgcttctcctgaagtcttttcttgttttcaatctccatgctgttgttgttgcttttatcttcttcttttcactatcgagttggtcatcatctctagtcatgtagaacatatactcttgttgtcaaatttgaatgctctttctcttctctacatgtgctgtttgtacagtgcactagtcaagcagaaccaagacgatcattttagacacagttcttgtcctcattgttgtcattcttttgatcaatcccgtaagtcttctaaagatacaggcgccgtgcgctcaattgattccttttacaagacagataaacccgttcagtcatatagtccccagccattcctacgagagagttctttcaaagcccatttgaacggtcttccagcgcccagacttccttgactcatactctctggctgaccccgtcggacgtactatacatcagtataaacaagggaaaggcggtctcattggtaagtattgtgccaactggagaaaaagagagacagaaagacagagagacaaagtgtgtgtagaggatttgcagatagaaaggactgacgacttccatcgcccctctaccccaaaatagcatccaaccccaagtccagatccttcctccgatacctcggacttttcgcttcgtcaacttttcgaacaagccctccataatgattcctacgccttgcatgatgaagaacaaaggaaggggccaggtcggaccgtgtgttgaggcagggcggccttgagcttcgacagccaagtagtggagaagcgctgagaggaagaacgtgaacattctttgcgagataccgatacgtacaacaaacgagatgcgtacaaagagtattctgtcagctcaagagatccgatgagaggccattcataaaagaaagcaagaagagataaagtcaaagtccactcacaaagcgaaagctctcggtgcacccaacttctttgcgaactcaaacccacagaaccctaaagaagctctgaagagctgatgccatcttctcccccaaagagaagacagagaggtagctgcttctgggacctgaaacaggcttggccagtacagagactcgacgggtgatttagcgagaaggataccgtgtacggccagaatatggtacatgaacgtttggactgagtagtcgatttttgttcgtatacacagataaggatgaaccaagtttaacaggcgaaacatgacaacgaggctctcacgaacaagacgagcgggaagaaagattggacgaaccgacatgcagcgataaacctgagatcaacgccaagccgtaacttgtggcccagactggccaatttccaaaaggagcatacaaactgccctcatgggaaagctccagagagccgaattttggatggaacgtatacggcaacaagataaagtccaaaaagaggtagcactgtaggat

SEQ ID NO: 2377 - DNA, 6512 bp, Xanthophyllomyces dendrorhous
gtaggataatcttgagttcacggacgattgcttggaatcttgggatcggggccgggtggggtgcatagaatgatgggctcagacctgtggagaatccgatgttacggaaacctgtgtttccatcgccatcccagccaagccatagaagatgcgatcatttagtccctctcatgccaattatccgagatccagttgttgtacgcaaggttaaacaaacaacttactgacgacatacctccaagccaacacccaccttgcaacgttttgatcccgttggactttctcttctttctttatagtctgtcccttcacctcgtctcctacccaaccgatccactttggagtttcagacctgaatcctagctctatgctctttccactcaagaccaaggcatacaatgcccagagattgttcaaatcgctaaactgttgaatcccggaaaagtgatgactgaagccaagaggcagaatacctaaaatggctagaggaacgagtgctctacgaagataggctaaagatggagacgaagctgaaggcgagaagagaagggagctttgaatgaaaagaataaacgggggaagcaggacacagagaggtagactcaaagccgtccaggccggccggtccgaggccgaaaggatgaccaaaggagcgaacatatcgggattgaatttcattgtaagatctattacttataacagaattacctgagcacgccgatatccatcgggcgagacgaggaaagaacgagatgctttgattgctggctggacgagttgatggaatccaatggaagatgggggctgaaaagcattccccactgatagaaaatcacacgggtcatcttccgcccaaagtgtttgagagctttcgttgactcagccaataagacccttggcgcacacaagtggttcatgtacatatggtatgcgcagattgagaacagaacacagaagatttacagcaaacacatatagcaaccggatacggtcaagagaatgtggcgaccggatgtgtccagatttactggcctcatcgagtcatcaactaggaagaggagagaaggataagggaaaaggggcaaacaacaagatagctagagctaaagtggagacgctaaacaagtccatcgtacagcgacaaagcctgtactcatgagtagtgtgggtatgatatatacaaatcttgagtcagagtctttctttgggaaacgctgcgccgtacggattgttttaccaggaaaatacatatacaaaagaatcagaagacatacctggacgatcgtcgggtcaagcttgcttccctcaacaaactcttcgtagctgagtgctgcgtttttgtccttgtccatgtttcggaagatctgtataaagacgaggccgatatatgacaattcaaaactgcctttaatatcaccggcaggaagtgaacatgacggtatttaccttgtccacacgctatgatgagtcatgataaaggagaaaagaaaagagatcagaacaaaggtcaatctctttttctttctgtcaacgtctctaccattcgcaagaagcgttgagagcgtaccttctccggagtgttctcatcttccggtagcttgaccatgtggcccgtcatcttgtagatagcagagacaatctgaagcatttccgagtacgtgatcacaccatctccgtcgatgtcgtacagcgtgaaggcccctgaaggtatgatgggacgaacgacatgtggtcagccatagaccattgtatttctatgaggaatcattgtctatctctctttcaatcagagagcatcatgagagacaaagaccaagaaggacaaacatttgagcttctcgtctaatctgcctcgacttgtaacactgagcgcgcagatgaattccttgaactcgatcgtcccgctcttgtcctcgtcgaacactctaaagacatattctgcaaactgccctgggtcaccgaatgggaagaactgaatgtagatctttttaaactcctccttattgagttggccagagggacagtccttgagatagcctttatacctgttgcatacatatgtaggtgcattgcgtaccggttagaaaatgcaggaagaatatctcgagaccaaactgttctagtggacgttgttgggaaacaaggccgtaggttgtgtagagtatccggatgaaagatcttggacgaaccattgttggagctccttcttgtcgactgcatgtcccagttacccagtcaaccatttgatccgccaatcgataaaacagacagtacaaattagtatccgcaatgctttgaccgaataaatatattgtgtgtatgtgctcgctccaatgcactcctccagatatcagactggtagaatgggtgaaggagccaacgatttcctccactctaacaacaaactctccactgaaggagttagggataaaatgctgatcaagacaatggacctacagtacgtcatcttttgaagatcagacagctgctcaggcgatagtttactctgattttttcccatttttttttataaaaaaaaagaatcaacgacggagaagctctgttatgaaaagacgggtcgtgtgaacgtattgggttgagttgtccaagaggggcctctatctgatgtggtcggaggtcgtagagaaaagatggcaagattccgttctttccttcttcttctgatggaggcgccaggttggtgaaaggtcttggccgaggcggtgatcaactacggatgcccaggtttgcccaggctggctcaagcaattgccagatttccccatctaaagctgtgtgatgtggggttaccctgcccaaatagcacagctcacgtgatttcaatgtacttatgcgaatacttaacccagcgacgcaattcaaatacatgggcttacgtaagtatctcatgctgacccatcaccccccctctctccccatcacccagaaatccaacatctcatctccaacagaaagaccgagcaaaggcaaacacacacccatggtcacagagcatacccatcaaatgtcccaactggtagagttcgggatagatccagtaaaggcagcgttttctctccgcaagttcaacggaaataccgaacaagcagccgactgggcttttaccgccgggtttgactgggttcctacgagtgaaccttcaccgccagtcggccctcaacctttcgttcctcctgtcactgccgatgccaacaccggtggaacagaaggcagcacaggtaatagccaggctatccaggcaactcgcataggtatgtccgttgtttcgattccctctttcgtccaagagggctaaaacacactaacatcattctccgtctcttgatgtcatgttcaaccgggtgtacgcgcttgctactctgaatcacaagcgccttataatccctccaaccagtcttctgtgatcgaccacaccgctcaaaccgacttaccgcccattccagggcttcttgacgacgaaaacgatgaagactctgatatgtccaaggccatccgtctttctatcgaagaggctaacaagactaaccggccggcagataccgcgaatatctatccagattacagcaagacagttggtagaatctcgcaaaatgaatcaaagtggcaggagaactcggataccacacagacatccacaaataaaccgatactgggagtagaaaataggcaaattgaaggattaattgaagcaagtagagaaaaatatgggatgggtgttggaggagttgacggaagagcgctagctgatagcttagcattggttagaacccaggtgcgattcaagtttctttgttctcaattgtgagctttgtccatcgcgttcaggagtaaacttaacacaagctcgtgttctctgtcatcccgctccatccctcaagattgagtccagaggaacagaaagcgtagtctccaaagaagacgagcatctatctcaagtgctagaagctagtctacatacatccaaccaacaatcatctgtaacccccacgcctggaccaaacataccacgacctgccgggcagtgagtgattccttcggatcaaattttcgatctatcataagattggtttctctgactctttcatttccttatgacatcagtcctgtggctctttggagttcgataccatatctaggtccagatgtatctgttctccaggcattatctgtaatcccacaattatctaatctcctagagagcgtcgaaagttcggaagaacttcccacatgtatgtttctcgatccatctgttctacaaacattcaagcctgtctgttttcggtcactaacttttactgtcgtctgatcggtttaacgagcaggtctaatccttctgaaagcacttaaagaggctatggatgatccgacgatcagctatcttgactcagacgtactagtcaatcttgtaggcgtcttcagtggatcgtacggatcagaaagtccggttcggagggcggaaggttggtatttgttatctattcgatagagcaatcctttatgctgttgctgaacttttatctcctcatgcctctgcgtattcttagaattcttcactacgtttgtgacaaaatggaattctgaggtcccctctctgacttgcactcagcccgaccgattggcaagcagttttactgatccatctttccagtccgccgatctagtcaggtccgttcgcgcgcatttcatatcataattatctccacacatgtgtatattcgaacttgacattcttcttttactttgctgttttctctcgagcagagtcttcaactacactggttcccctcttcttccttcgtcatctcctccagaaacttttgattctcctcatgtgtttcctatagacggaaaggcctacacatccctttcccaagcaatggcaagcattctctgggaggctgatattcctgttgggctggagacgtgtagtgaggtcctgtgtgtgacagtgtcgtacctttcaaatcaagtggcttctggagcagctgatgcaggagaaaacaagttgttcaaaatcgatggagacttctggatcgataggtttttaagtagaaacaagctgttaagcgctcagcttagggccgaagagggcttgctgaagggaagggaggaagaattgaaaaaacgattagaaaacctcaagagcgtcaaggtttgtaacgatttcgtccgtctgcctagttttgtttgtgatattttggctgttgagcttgctaacttccaatttaactcacgacctccaaacaaatagggaaaagattcaagaaaatcattggtggcagttatcaagtattacgatgagctcgcgctcaagtccacgtcggatgagcagaagtttgagagcggccgaaagagtgtggagaaactacgaacgatgttgaaagagtttgaccgtgaaacttcaggtttgttgatatcctcactgaaatatgaaagctccagaaatactgatcaacctcggaaatctatcgaggggggttcagaagtggcgagtcaattagagaagatcactttagctagaacgaatcttttcgaccggtccgagttgaaacgatgcaaggtgcgtcttttctgcactgtcatttcttgaactcgttcttgatatattgaaacgatcttttttatacgtcgaactcgtgctttgtagtattctcttcgggccatcaactttcacaacgggattcgtggtcccggttcgctgtatacgttagtctcaacagatttctttgttgaccaaaaatattctcggataatgctcaagtgaaaagaaaacaaaatacatcatgtataatgaaaggaggaaggattgtcacgctgataaattgtcttgcatatacggtggcttcacgaaactagatacgtgcagggcccggacaaacgatggtttaaagttgtcgatggtgtctcctccgaagttagtccttttgattcagcgtagaaatctttcagataccaatcatcgacgcatatttctacgactaacgaccacatcttgtgtcacatcaacagatttcggcagaaacagcattcgcagacccgacaggcttccacctaggcgcaggtccatacatgctttggtattcgaaagatgggccttggccggttgagccaaaaccagaaccagatccagtcgttcaagaagagataaatgaaaaagaagaggttcgtctcagcttctgaagagattgtctttcgtggttgtattgagcgatgtgccggttggatttcattctatagatccaggataaacctttaatagatttggacgtggatatggacgttaacaccaacccaggttcatccaattccactcctgatacgcccaccgcaccaattccgtgaacaaagaaaaacgataaagaaaagatgtgtcgtttgaaagattccaaatacttcataactacctaccactgttagaatgcttgcgcttttgtttccttccttatcttcgacaaacatttcaggttggcgaggtatattgtatcaatata

SEQ ID NO: 2378 - DNA, 30206 bp, Xanthophyllomyces dendrorhous
ggtatattgtatcaatatatgattatttaatagaacttgacaattgtacatagttgagtagtgatgctgatgataccagcttggtaggacgacgagcaacacaacgtgtcttctacgattggcatgatggatatgtgttgttagttaaacaatggagggggggcacagaataggtgtgttgatatgaaagcgagagaatttgtatttcgtcagaaggatgagaagatacaagagggaagggaatgtatagaaggccattgatgatatgcaaaacttgagagagatcagaacaattcggaactctcactggttttatcaagatcatatgaaatcacgtcaaccaaagcgcgttgttaacactgctcctgaagaacaaaacaaagacaagacaaagactcactcatactcgatcgtctcatcatcacctgcacagaacgaatcctctagataataatcatcctcctcggaaccactttgtcttccatccctctcatcttcagagctaggtcgagagtatctcttgaaaggcttgacggcgtctgctctagtggtcgtgaatcgaggtcccttgccattatcatcttgagaaggggagcgaagacctgtaagataggcggcttgctggttgtagccttttggaacctgggttgcttgaaaatcacctgcaaacgctctattaatttgaaagcaaaagccatttcagtcatggttccgtcagtcacatcatctccgttgaaagaagcgtcaggccgtcttacctatcttcctccgtttcttcatccatgatcgcgctcccatcatccgataaaattgcatcatcgtctctttcgtctcccgcggttcggtcatagaaccgtttcatctcatccggaacgactcctctgtaccaggatggacctttgaccgacatcttctttggcttcttctttctttgttgacgacgttcaataaacgacgacatatcatcgtcttcttcttcctcatcctcctcttcttccttctctgcaggtcttgtagctcgtactcttttcaggggactaggtgcgacaggcgacgatgaagccgccaccgctcttaccctaggtcttgctccaggtcttcgaacagcctgagtggactcgaatggactacctacaaagggcgaagatagtggtcgagtactcatcggtggtaacatcttcctcgcttgactttcaggcgtagggttgaccgttctgagttctgaactaggtttaaatccagtcccaatctcgaattggttctgaagctcaaaatgatcttcgtcgtcgtctgctagaatccaggattgatcgatttgttgaggaatagaagaaacaagagccgtggagcgaatgatcggtgtttgtggcgccgttgaacgaacaggtgttctcgtattgagtgttgtgtatcttgaggtagacgcaagaccccgccgtgaatcagaatgaaacgtgtccaatttcgaagcggccgctgtaaccaagccaggcgaaaagacagaagaatcttcaaactggtcaaagctatcatccaacacccatgccgggtcgatcttatcgaacccagcctgagcagccacatcctttggtaatgagacttcatcaagctcagtaggtgtggccgccctagatgtgggtgatggcgagtgaccatgacgggcagggggctgtcggtctcttccttttcctttaggttggacaggagacggggttgaactagggatcacaataacctctttttcttcgtcctcgtcctcttccccctccggtacgattgacactgccatcagggccgctgtagttcctactgccgctgccgctgcagctgcagctgcttcttcagaatcagtccggggtgcaggtcgagttccaatagatcttttgccgacaaatggatcgtccaaagtccttgaccgcttgaaagttcttgtctcatccactccccgcaccctatctctctccttacctttccccttcatattaatggcccctctaagtttgacctcgttttccgaaacggatcttgagaacgtcgagaacgcaggtcccatctcgattgctagatcatccgagtctgaatcaatgcccataggatcgacctcgacattcttctttttgttgctaccagacgtgagcgctctggcattgacgaatccaagagaagctcctgttgggatagctgcccctcgacgggcggcgccggcggtctcttttgacgtctttgtttgttttattttagatgctctacgaggcttcgtgtcctggacgacaggtgggccatcatcgattggtacgaccttttggacgagttgaggtttacattctggcggtaagattcgagggacatcgtcgtataattctagaattgctcctttcgtgatagtcatttggactgaagagagaacaaaccccgagcaaacaaatcacttagggggattctcttccggaatgaagaagattcaaggaagacgcaccactctcataggattctttagctttatcccaagaggattcttctcttccctcacccatgagcacatatatagaaccttccctttttcggcctgttcgaccgattctttgcagctgtatatacccagttgatcgtcaatgacaaagccgacatttgacagacaggaaacatcacgatatatgcgaagttggggcgagaatttcaaagactgaccattcgaacagaacttttctgagcatcatagcaaatgatcttatcaaccgagccgatatccagaccttcttctccgatagacgttgctaccaagacattgattttcccgcacttaaaatctttgatgacctgacgacatcgatacgattattgtcgtgccgaaacgatgacattcagctctctgtgtaagcattgagttatataattgaaagaaaatcgacatgtacctggatctgttcggcttgtttcagtcctttgcgaccagacttatcagttgcttgaccgacaaagggaacagctcgtagcaggggagactctttattcagcattgtctatgtttgtgcaatcatgatgaaggaaaagagtatccgtttgatcagcgcgagtaattggaaagatggacgggaagtagtcaagaaaaagaagcaaagaaatgaacaacaagatcttcaagacgtaccacaatctcctcaacacaatctctgtacatgcaaaagaccatgactcttgtcgtgtccggatttaaatctccttttccatcccctggctctcttggtgcaaaatgatccaacagcaaactcttgagtctatccatttttgcgtgaggaacataacctccttcgaccttcatttcttcgatggcagcgcctatcgcccgaagctcctttgaattacttgccggagtatcttttttaggaatcttgtcggcaatagttcgttgaaacatgctgatactatgctcaagctatatcaaacagatagagaaatcatcaagtcagtcaggatcacgccgttgtgcttaaagtgactgaacattcaaaaagatgaacgaacgagataacccatcgctcgagcataagactctaatttcgtcaggacctgctggtatttgaagttcttttgccgcatacattgtgtcctggcagcatgcgctctaaatgcatgaagccttgtgggatcagattcatattctttgaagataccacctttgatgagttggttgatcattggctgtgagcgacaagatgtcagtaaacaacgacagatgcgctgcaaaagagaagagagaaagttaatgtttacctgcatgatttcagaaagcatgtccttgagcttgatcacattaggtgtcatcggaaccaagaccaactcggtgttctatacaccagaaagaagcaaaatccaacagcaagacctcttgaggtcaatttctgcaaatagaagacggtgtcagaaacgttgcgaaccttcttgtgaacataagccttgaggtcgagactttcttcatctcggatctcaatatggctcaaatgtaagttgtcgatcaaactttgaacgccctcaacttttcctgatggtgtagctgtgagagcaaggattctgaaattgtgatttcttgattgaaggaagcggacaacctgacaatacgaatgattggaagtggctttatgagcttcgtctgttgaaagccaaaatgcagcggggagatacgattagtaagaccggggatactcagtgaagccagagggaagagcagaaatagtgaaaacttgtacaagagagagaagactaaccaactactagaaggattacttctcttgggtccagtcggccgttctgcaaatcgttcatcattgtctgggctgtcataaagaacacgctcttttctggatactttacaattccaatgataggaaacgtgatggttccaatataagtgcgatcagacaacgtaaaacagagggagagataaaagaaattagatgatgaatggttcttactgtttgctgtcggacatccttgttagtgtcacccatcaacacggcgactttgctgttcagaaaaccacatgtctcggggaacgcctgggcctgttgattaaccagtggtttggttggagcaatgaaaaatattttgccggttgggaaccatcgattgtcttcaggtcatttgaacgaatatgaataggatgatcaaccgtggcatgatcttctagataacacgtaaagggaatagacaaacaattcaacatgaccactccggctacgaatgtctttcctaatcctgtcggtaacgcaacgagtgtgttggtgaatagtgactttcggacgatatttaactgataggaccgaagcggaagattgatcgggtagatccaagtctttcctgcttcagcatcaaaggcatgtttcaaaggaggaagctagagaggtgcaaaagcacaagaggagacaatgagtttgcttgggggaaaggatcatatgagaacgaaggggatgatagcgcttacgtcgccgactgcaatatggacaagagatgcgtgtcgagttgaaagatatagacaactgtatcagtaatgtctaaagggctcgtcgcaagtgtaatattgcgcacgcacgcgggacgactggggccggaaattgatcgaaacccgtttcggcttcttcctcctcctcaccttcctcttcttcttggtcccaaggttttcctgtctttttcctcatggccacctttttttcccactctgcccgatcccagacttttccaacctttctgacgagtccctgactacttcccacatcaaattcatcgacctgcgcgcgttcaccaaagaggttcatttgtcggagtcgggaagcggtgccgacacctgtggcgatggcatggtctatttcttgcagggactcaggagtgatgtccatggcaaattcgtccgagtattggtgagaagatgatggtataggcgctggaggtcgaagaggaggaggtctcggttggttgtactttgctgatggtgagatatgagtgatagttttggcagtgtacgaaaaccgagtttggaccatagggggcggaggtggtctggatggtcttgataacgaatgatgggattgtgctgatatttggctatcactcggtaccttggagagtgcatctattcttcgaagatccgcctcatccaaggcgaatgagtcaaactcgtccgtgtctgaggaggccatctgcggccggtttggttggcaaccgagaggcgtcagaacaagcgaggttctgatcaggcggtgtcggtatctgaccgatcgattgacaagtagattcggagcgatagcaaaagcccttgagacaagagaaaggatgttgtttatgtgtctgtgtatttatgtgtttatgtagaagagtatgagggatcgaaggatgttgtatgttggtgtaagagttgggacaagtcagtttggatgaaagccttggagagcatacgcgagacgtcactcgcgtcgaggtcacgtgcagttgtcgcgtcgcgtcgcgcggtgttaagtgattgacgcgaaagctgtatttggcgcacgtgaactcaaaaccacccgctactgaacatcacagcacagctatcgttactacccctctgcccgtgacgctgactaagcaagcctcttcttatcaccctctcccatccatttgaaaccctggaagaacggccgaggagcaaccggaacgagcgcaccacatccctctaaccacatccatactcataagataatgcctgaagcactcaaacgaaaggttgccgtcatgggctcccgctctgtaggttagttcgttcttccgttgatcctggttccggtgcgttcagacaaaagtagggcgtcggtggacaacagagagatgaagaaaaaagtaccaacgggacgaacgttgcgggagggacagaatccctcgtacacatctcttcttactctctacctgccttgtccctattggctgtgttgttcaaatgtatagcagatccaagccctgacaacctcacaaggtttgactcttcctcaaacatctttcttgcgttttgaaccggccaggtaaatcctccctggtcgcccgatacgtcgacggacctgctcaggagatcgatagctaccatcccacgatcgaacaggtcaagcacaagaaagtttctttcgcaggcagagactttgacatcgaggtcgtcgacaccgctggtcaggttggtcccttgtcctattcgtcatcctcccgtcagctatgtcgcccctccgcttctttcttcttgccctcagtgcagacatccggttttacttccgttggcgtcaattttacatgccatcgttcatatcgaccggactccgttccgaagataacgacaacatgttttcctgtgtatctcagaaggtcaatcgcaaggactggctcatcatgacattcaccaccagcagatgagctatgcacacaaacacacactcaaccatacacatatccatacatacacatacatatctgaaattacttcctcgctcttattttgagtctttcgttcgctaacttactttggttcctctttcccgccacgcttttcaggactcttcatctttcttccctctaaagtacgcggtcggtgtgcacggctacgtgatggtatactcgatcaccaatcgggcctcattcgatcttgttcagaccatttatgacaagatgcttgaacaaactggagccgagtgggcaccctgtgtgattgttgggaacaagagcgatctgaatggaaatcggtatgtcttgatttcttctagccctatggtgccctatacggtagaatattgccgaggagtatgttgctgatgaccggatttgtcgtcggctcgccacagtgctgtgccaactgccgaggcaaaagcctttgctcaacggatcaaagctccctttgtggagaccagtgcggtcaagaatgacaagatcggtaggtgtagcttgtgtatggtctcttgcacgttcgcaccaagcttatcatcacggcttcttcgcttatctccccgcagacgaacccgtgcaatccctgctagccgagatttggaaatcggaaggaaacgttctgccatcggcagccgcgcccgcaaaggcgactggtggaagttggttcggaagttggtttggaggaaagaagtagagtatgcgtgtgcgcaagcgtgcgtgtgtgtttgtgttctctgttcccgataattttcagctccggacaatcatatctctcctatcatcgctcaagcaacgccgctcgaaccttggctacttgaagctctatccattatctttgttcaacaactttcacccctagttctttgcaatctttgaatgttttctcaacttccgcctcatcatcctgttggtttggtgtaccgatatcttgtcttggaccacgtaaagccccagggtccagttttctcaatttttctcactttctctatttaaacttctagtcttatatagtatcggtttctttcagtagatctgttcatgccatgattcttcagcgtgtgcccagcttgagcgcggtgtgaagcggcacgatggtttgagaagagaccgaggttgatcaaagagagccgttgtgaacacgtaatttcggcaagacgcctgatctaaccgccaatcattatttgttcaaatcaatactcgacatccatataacctttcgttcattaccttctgcacacactctctcctttctcttctcggtcgatattcttactcccatctctctcttgggacgctaagatgcgacacacggcatacctccggacgatattcaatcgagcaacacctattacgtctttgacgagtccgccattcacgacagagcttctccgatcaacggcttcgccttcaaaaacccatttactgcttcatttacctgttgttccttctaaatggcctgccaagttctctccgcataatttcccagcgggcgatattgtagagagaagtgtcattccggggttggaaaacattttggaagctacctcagttacagacgaaaaagtgaagggtgctttggcaagagcaaaggcaaaggcggggactgtgggaatgctcatagcttgggacggaaccaaatcggatttaccaaaccaggatgattcaaacccgatcggactagatactcttaaggagaaagatgttgaaggtgtctggtatatacccggaaagaagaagatcgttctcgagagaggacgaatagacaagcctattgacataaacgccgtagccgatcggatcgtcgaaggtaaaggtgaagagaaggaagagattgatatatatatttgtacacatgggtcgagagactgtcgatgtggagatgtaggaggtgccttggtagatgcgcttcaggtggagatcgatagattggacgtaagccagagagtcaacgtctgggaggtctctcatgttggtggtcacaagtaagttgtaccattcctttccctctcgctttcttcaaagcaagatcttttcttaaacattactgctccctggcattctctaccttctccgcttcaccttctccgactcatcatcagatacgcagcgaatgcattgatcttcccagcccatcaacttctcggaaatctccgaccatcccatgcacccctccttctttcttccctactttcttcccctgcggatccgaccgcttcgtcgcctctaatgctgcctttctggcgtggtacgagcggaatgtcaaaggctgaaatggatgatcggtacgagaaggctttgagctcaggtggaggcattggtgcgccttggatagagtcggcatcgaagggagcagaggctgactttgtcaaggatatcaaacaagagaaggaggaagtgccgataatcttcaaaacttgggaaggggaggatgttgaagtcataggtacagttggagaaaccctgatggaccttgggaaacgatatgatttgggtagtatagaaggtgtctgtggaggtgttctcgaggttggtctctttttgtcctttataccttccttcctcttccattttgagagcatcaagtcaggtttgtcctaaactgatgcaatctctgtcttttgtccttttttttcaatgaaccagtgcgctacatgtcattgttatgtgcctttcgaaccctacccagcgcctgtttcagaaatcactgacgccgaagaagagttcgtctcttgtttctgtttcctctcattctcttttatagtctgcctccgggtcgattcgacccgagcatatgatttttccggtgaagatgagtagtggcttatacgatataacacaatctttgatcaacgaactatcagtatgctaggaatggccatcgatgaacgtgaagaaagtcgactaggctgccagatcaaggtttgtcgcttcttcatcagtatttttcctgccctttccttgatatagattgatatattcgaactgatcgttgttaatatttcgggatgggttgaacgtgaacggtaattaaaaacaggtcgatcaggcgttgagcgcttggtgtgcagctggaggaaaaatcggtctaccccgatactaaaaaccttgtacacttgctaaaaagacaggcttgttcaagtgtctcatagagtcaagataaacaaaagagctgatcgtacagttgtcttcaacatcgcttgagacaaacgaatatatgtggctttgcaggatttgattatcatgggatcgctctcttgtggttgctcgatgtgtgaaaggacattatattttttgccatcagaaaagaggaagattaaagagaaagaagaagaccaccaacaaccaagaaagtaaagtatataaggacgaaactgagagaaccagaagcgcctctagacgttgtcctccggtccaccctcgtcgataagtttttgataatcctcgtaacttccaaagagcggaagttttctctttttctttcgttcctttcggtcctctgtactcgtccgtttcctctttccgtcaacctcggtcgaaggcgcggcttcgtcatctgacatttcgttatcatcctcgtcagggaaagcggatggaacgtcgtcctcagatagaagatcttcgggatcttcgtccagatcaaagacttcttcatcttcagagtcaaattctgagtggttgcaatcacaaattagagtataaaatcatcatgtcagtaatcaagtagactaacgccgtactcccgtgagaagaaaatggaaaggaggaaaggataaaggagaaaatatgagacataccagcatcgtcgatctgaccttcatcgtcctcatccccgtcctcgtcctcatcagagttgaactctgccaatgcgccagcctcatcactgtcaagatcttccgaaccggcttcgctgtactcgtccgaatcactatcgtcctccataaggtgttgatcttcctcgacggcaggcatggacttttgcatagcctttggagatcaatcaaatcgaacgtgtaatgggatgagtcattttgttttgtcaaatggaaaaaggtgaaggtggatagaaatgcaaggggagacaggatattaccttccaaatttcagcctcaacatcgtcatcagactcatcatccgaaccgtcctccttctcctcaacaacggcctgtctcggaagatcttcgtcttcctcagcgtcagaaccttcgacaccaaagccggcagacatctcatcatcatcgtcatttcctcctttctttcgcttggccagtttactagccttcgacttctctcgactgatcttttggttgaagaacttgtggaaaaagagctaatatgcgcaaaagaagagaaagaaacatcggtcagtcggcttgttacgaagttcgtggctggacggcctagacaattctgaaggaatacacacctgatcggcgggaacatcctcctccttttgcctccagaactctgcagtgttgacttcggtctcagcagacgggcccttcatcatgagaacgacaccagatttatctgaagcagctgcgggctgcatgatactagctcccttcggcttcgctttctttgcatttcggtagacgaatcgatcaaggaagtggacgagtgtgttgagattgaggtcagaggatccggtgatgggttcaccgttgaggagctgagacgcatgaagtgcgacagaaggatggaaatggtgaaggaaggggacctgtttaggaaggagaaaaggcagaacatgagtttcggactcatcaaatcatagtcaagcaaaagggtggactaacaatctcccatagacaactaccctgcgcgttcgcgtattctggctgtctcttcaatccatcgtaagcagttccccatttcttggaagcggccgctttttgagtctcctctaccccaacttccttcttctccttctcctcttcatcatccgggttgggtgcgtcaacaaagtgctcttcttcatcatcgtcctcgggatgagtcaacatccgtcgaagtccgggttgggcagagaaaagctatgggcaagaccaacggccgaaatcgttcttcaagtcagccatagaactatacaagaacaaatatcaagaagaaaagatagaaacggacctctccgaacaagaagaatgctccacagatgaaaggaggttggtgagaactcaatatttggatcgtcctcttgacaaacgccgcagctctaggagcgttggggtctttcttgacggccttgaagagcaagttgaggtacatggcttgcttggaagaggtgatgagtcgaggatcaagtagagactcatagagcgttcgatagaatcgatcggatacggactgttaagccggttcaatagtttatcctagtcaacatcaaatgaatagcaagggacccaagaaaaggatagaaccaacctctttcttagaggatacggaaaagatcaagttcagggcttgtatcgagatgttgaaagcgccagagtgagtaattcggaaaagggtgtccatgtgcctctcgaacctgggaaaggatagaaaatgagaaccaatgagtatcgtcatttcaatcacatgaatccatcgcgtagacgaagactgaacgatacagaactcacaggttgtcgtcgatcttggcgaacggcatagctctgttgacacccgtcaacacggccgcgatcatctttgcatccgagtcgactactgcgtcctccgccgcctctggcttctttcccttacccttacccttccagtttccttttcctttgtgctttccgtccgttgactctttctcttttgcttcttctgcggccggaccgagggcgagctcatctaactttgggtcgtcctttccgtttccgtctccgaggattcctctaaaaacttcgaagtaaacctcgacaagcttcccggcaacctcaccgtctcgggagagtaaggtggtctggttgagagtggtgataccgtagtacctagcgtgcagattgccttgctcatccgccgtcttatcgaacagtgtcgtcttcttagccattggctgagccttgcctttggactttcccttcttagtctgctggggtcgctttggcgccagtggcttgggaggagctggggcgaggacaagggaggcgatctctcgaactacaacagacttcatggctggatgagactggaggagctgaaggatgtgataagatgctcgggaggcgacatttcggtcagagtctccctgaaaaagatttcgaatcaagtgcggacgaagatcagcataatctgaaagcgcaagtgacgcgaagcgaaaggacgaaaagcgcgaaaaaccgactcacaagtttgttgacgagcaatcgaagcaggttttgctcctgctcaggggaatccttgagcagttgaaagacgattcggatggtttgtgttcggacgaatgggagggtgtcgtgcgtcatcgtctggaaggagttcaaagaaggggccgttgagtatatgttagattcgaaaaatgctgatggaatctgaagagacgacgtagaaagaataaacaaacctccaagacttgtagaagagtgaaaaagaatcgcttgagccaatcttcgaaggcccagacgatcagatgagcatcggtaacctgaggatgcgtcaacattggttggtcccgaagatatctgcagaagaggaatgtttcaatgtgtttgtcagaaagacgcgctttctatatgcgttttctcagaagcaaactgacctcagttttctaggaggcgatcctcctcccgtccaccaatccgccaccgccctcaacacgctcactctttcctctcgtcctcccatcctgccaatggttccatcctccttcttgtaacccaacatggctcggagtccttccagagcggtgacatttcttaacgggtccccctgtacgagcagaatcaatgccgagagcttatctgcttgggtacctgacttgaggatttgcgacaagaatgaagagtccgccttagaggacatagctggagaaggttgactagtgggaagagactctaggagagaaagcgatcgggtagtaagagtggagagaagtggagcagacagggggggaaggctatctgtttctggtagggcagggagatcatgaagataccattgaggaatcggagggaagacctgagagttataaaatgaaatttgcatttagttctggggtcagactcaggaaaaaggaacagcgaaacccaactcacaaactggcctttagaacccttgggaatgaccgacggagttgaaactgagacagaagggagaacgagcttggactctttcttgaccggaacctccttaggtttttcctcaacagcggcagcggcggccgccgccgcctcggcggcagctcctttcttttccttcttcgtcatgtttggggtatccattggcatttcaccttcagattccgaatcatcgagcgcgtcttcttctgaagaccctgcctggtcagcttcctcttcagaatcgtgagtgttgttctggaaagaagagaagtcgagtccattcatgaaggaagagagttctttcgatagcttgacctgggaagtcgaaggagtaatcatatcgtgagcaagaagacaagatgtcgggctgttgaggagaatatctgtgacactaacctcatctacttgggtctctccggtgaagacctcggttccttctacctcgtgaacgtcgtcaccgtcgatgccctgcaacattttccagtcgtcttcgtctccaccgagatccttgatttcctgaagaaacttgtcagttgttggtacgctctttggttttgctaccgccgcagcctttgccggcgccgggtttgacttctttgtgggctttgactttgccatcggtcctgataagggtggtgatggggtacaagggtgagagaatggaggaaggagctgccgatgaaagctaaagtgagcgaggacgagaagggaggaatcaacttttttgagaaatcgtggttaccatgcacagcatgtactcacgtgacatccacgcaaaataacctgactatgcttataaagctcgcgtaacaaactcgatgtgccacggtgtagcatcgtaaccttcggcgaataagtccgcgcatgaccgaacccagtccattcggtccggggttctctaacatgatcggcctggagattcgatcccggcatgcatcaagactttcggctcgcgtcgtggcggaagcagctggccttcgccgaaatgcttccgggttcagtcggccgcccgggatggcctccgggcccgctcgagttccccggtcggtgcttccttccgcttttttctcagtcaggtttctttgtaaccaaacttctaatgctttctgatcatacccacgcctgaacattagcctagcatacacattcacaaatacttatacactcagcatactcatattcggtttgaccaaaaggatactgaattgttagtggagcgaggtccagcatgggttattctcacaaatccagtttgtgtggtgctcactaagcttgctggagacgtgtcggtcatcatatttatgagactcgttgtttaatcgttcctcttttttttttccttgtcgctccgtactcgcagttttcttcttcagctctccgactatttacctttgcttctcgtccaagtcacatccgattcgtccatgaaaccaaaacaagcaccgactgcacaggatgatcctttgaatgaggaatccgaagaagaagattacgtatgtaaaacttatcttggccatacttgacgttgttgcttaattacgtgtcgcagtatggtttgtatgatcacatatgcggtttaggttgacgaaattaacttttttctttttcttcatcccttacgttatttcccctaggacgaagcctctggatcaacagagaaaacgtcggcagataaaaagaaagaatcggaaaactcatcgaccagaaaagctcagaacaggatagctcaggtaagcccctgatctttgccacttgccctcgcgtcagtcccaactggattctcttgattaatcatcctcttttcgtcttgccctctccttccataatcgactgaatcttagagagagtttcgacaacgcaaacaacaatatatcagagaattagaaacgcgtgtcgaagtgcttagtgccaactctgatcaccgattcagtcatttgaaggatgtcatccaaggtcgaacgatttccttgtgtctcaatctttttctttatccaagccaagtctgtgttctgattgttttctcttttttttccactcgcctcagccctcatggacgaaaaccaacagcttcgacagatgtgttccaacatgggcacattcttcgctgaaggtaagcccttcatcattctccctgtcctttttcggatttccgagccgtgattttcctccctcctgacgcgtctggctttcattcttctctttcataggtctcggtagtgcgctgcctaggataggtatgacacctgagatgtacgatgcagtgatcaccaggtgagtcaaatttctaaaccttctttttaacctcgtgtcatgcaaagtttccactcgtggacgcgttctgaattttctcttattgatattttcgtacagaggaaactctgacaccgctctcgacgcgtatgttatctccaaagaacgactacaaaaacaagaacccgcctctccagccgtccatgattcaccctccgaggctagtactcactcaccttctcaaacgaattcccagaacccgaaacgaaagcgtgggtcgatggtcgaggaggatatcagtagaaagagaaaattgttgtacgagaacgcgttgaaagtaggatctaggccggtcgcccgctcgaaagagtcagactcttggtcacccgttgtggaaggttcgtctgacgggagacaacccacgactgacctcccagccttggactcgccagccgatggaccatcctcgtcctccttcagaccgacaaacgtcttccacacgaaaacattcaccgaacgcgctatgacaaccccctttgattcgaaccttgctggagatccaaatgcgaacaaagatcattcggaaagctccgacgcaaacctttcgagacccaactttgccacgaatactgctcctactagccagatcggtctccgacctctgcttccctacccaccaccgtttccaaattcaggccacaatacgacttcacaacacacatcgtatattccctctactctcaatgtcgaaggagccatgttcggctcccatgaatcctctggctcatcctctgtgtcacaggaattaatatcattcatatcgtccccttccccctcgacaacagctcagtatccaggtgctcaaacgaatcatcagcatcagcgtcaccagcagcagaatctgccacccatcactggaatgaacccgcctggaatgataccagccggatccggaagtttacctgacggaagatcctctctagagttcaacactcttttcaactcaatcggttttccaacctctaaccttggtatacccatcgggagtggtgatggtggcgacggtgggagagactcaagaaactctctcggtggaggggatgtaaggtcgagacctacagatctcggtggaccccttgccagaaacaacatcggaggacggatcggtgctagcgcaggtaaaagttcgggctcgaggttgggtggagaaggaaacagaccagagaattttgcaggcgtgaagactgcaaaacagggtgatgctctggctgtgggttcttttctttgtctttttttttccttatcccttggatgattgagctgatctcttgcttttcgttgggtgtcgatctacagctcatcggatatcatcttacaaactaccggtgtgtactttttccctgcattttccgatcttctcttctcttctcaagcgctaaagatcaaacttttacattggccatacagaaaaaatccatcctatcacctcccaccttcattagtgcctacatatcttcaacaaacagtgcctcacagtaagtttttcttactttgcttttcttgttgtggctatcgcatttcttgtgcaaagaggatatcgaatgttgggtctgatctattggggtctggtcttaggtcacatgattgatggaatcccgatcgccgagctaagagatacgatgatccaatttaaaggtgtgtctttctactctgctttcgatctttttcgcttgttgggctgtttgtcatccttcgtcgactcaacatattcctcttttgttttggttatttcacagaccaatacgatttaggagaagcattatcggaactatgcgaagatgtagagtatgtttctcgttgagattttctatctttaatcagtgtggaaaactgatggatttgaacattgaccgttgatctactgtagaatccatggacaagatgccctttcgggtgattcgtgggagataccagaactatggatgagaaaatacccgttcgtctcttttttttccttaatgtttgatttccctttccttctcttcgttatctgaaactcatactctatgtcttctctcacactttgtttatttttccagaatgttgatcaacgagcaaatcctcagtggagcaaacagatggagatcgagaaggggtgatccaataatcgccatggccgatctcaaagtgtctgttctcgagtgaaggaaagcaaaagcttatctttcattccaatcttttcattctttcatttttttccattctcttttctttttccttggtaatcaaatcgatagtcgtggtcgattttgttttgtccgtagaattgtttatgaatcttccttatgtataccgtgtcaatgcccagatacgttcttctctgcatcatctgttttttcttgttctcattcgtccatctcttttatttatgtatcttcctcttctgctcttttttctttctttttcttggtcattcattcaatctcgtttctcgtttgttctacaacaaatcctgtacgggtccttagaattaaccatcaggtattgccttctggtgtcttacacaagacggatatcatctctctctcctttagaaccgagtaattaatgcaagaggaatgaaaaagaagaagaaaaaggagagaacccttcatacaggagataaaagaaccaactcgactgagcaaactcttctcacttgaggccgttctcaccgtcgatcagccccttcagggtcttgaccctactctggaagctttccttcccgttcccccacacgtctctcacgacacctgccgtccttctcaacctcggtgagcccattcgattgaatgatggatgacgatctgtcgaatcggtgaagagctgaagaagtcgaatgtcgcgcgcgaaggcgtaggtcgggagtggatcggaggggatcaggagcgagtgcagggataggatgatcaagtcggctgttgcgttcgcgatactgaaaattcaatcaaaagagcacacccatcagttcgtgcgctctttctttttctcatcacaggagaagaagagaaaggagagagggctcaactaatcttcaacagcagacaacccgtctacacctctcagatccttggtcgcgaactttctgaccatctcacctgcgagctccaccggtctttccggtggacccgcccttaatgctagtgagatgtcagacattgattttgagaggaacttctctccctcactcatgatgagtacttggaggtaactgctgatcactagaggaatacaaggggtcacgtgcgaccgtcgaggagaacgacagacagatcagctttatagacaggagaagattcaagggaagactaggaggaagaaatcgaacgattggtttgatgactctggagtccaaaatcgatagcagccttcaagttgatgcctacccatggcgagcacaacacacccgagaggaaacataaaatcccatcagtccgtcctcagatttgatctacaaaaagatgagaatggaaaggcacaaagaagaaagtacggacgaagagttttgataatgttcttctgatcgacactgggttcttctgtatcgtccagatgattcacccaacgacttaatgcgccaacaagtaggatcgtcacgtcctcccattttggtccacaacgcatggcatacacgattgctttgtttattagggtttaatacgtatgatcgcccgttcggagccaaaggaaacatcttgggtcgtcagaacagttgaatcaaccggatcggtgatgtgcataggagagagcgagacgtacgaaacactgatcccacaccgggtgatttggtgagaaggagtccaaagttgatgtccctaatggccatgagtgtcatgatgtctttgtcatctatggctcttcagacccaacgatgtcaacgagacctcaagttaggtagaaacaacgaatcattgtgagagataagggaacagacgaggtcagacttacttgtaaacgtcgtgtgtttcgtatgtcctcgctcttgcctttccttttcccgacccagaccctagagtcaaaacaggcaagaacgcccttaaaccaggccaaccaccggctcttccggcaactagcccgagtttctctttctccttttccttctgctgggccagtatcacatccttcctttccttctctgcttcttccaactttttcgcattcacatacgcctccaactcctctctcagattgcgcacgttttccgagcgaacacttaacgacattccccgattccaacagatcttgagcaatcggtcgagtatgagatcaggagggatgaccttgcagggtgtgagaacccactcgaccatgccgtataactggatcaaccggagttccacaggattcgaaggcaaggtctctgcaatctctttcagaacatccaacgactatttgccaggggaagtttttttgttatcatcaaacggttgcatgaccgatcctggtattagcaagagcgccaaatatcggaaaggaccaaaagaaaggaagaacaggaggaaaggaaaccaaaggaaaggtaatgtcaccttctcaaccctggtgatctcacgaacaagatccccgccttcttcgtcctcgtcgcgttgtgaggggccagaggttgaactagcaggccagggtatatattcgcctctcgaaagccatagcttgtagccctcctgtcgtcttacctgagggtcgaagaacgaagggtgatggttcgattcggttacttctgataaaagcactgtttccccgttgtccgtcacgatcgacggtcccggaacatgagaacaggttcggacagaaacgtaagatcagtgtatcggatagcccactgagctgggtgacacctcacctagattgtccattgtagattcacttattcaagctcagagatggggggagagaagatggtcagagaggacgttccatctttgcctgggaaatctaatctttctgaatcgttcggacggaaccgactgcgcggatgacatcttgcctctctctcctcctccttctgctgctttgttgacgaccgtcgatgcgcactcacatacccacacacaacaaaaagagacaggacatcgatagcagaaacgagaagcagagaaaaaatagcccctgagacgataaaggaagatagtggaaagaatgatctgaatgaaggccacacaacggatggcagaagatgacggaacagatgaaagattagatgaaaagaacggtttatctgaatgggcgggggaggggggaggttcgaagtgtgagaacatcaggagggattggaacagttcgaggaaagggaaaaataaatgtctagatgaactgatgctgaggccaaccagaaagcaatcgactgagagaacaggacgatgggagagaagcgcatttgattgaatccttaggtagcaaagataccgctgatgatgcagagttcagaataagaggaagcaaagcaagtcagcaaggattacaggattacaagatatgacaagcagggagaggacgtacaggatctggaattgaggagcctatatcgagtcaacccaagaagagaatatcagcgtgtggtctggatagagaaggagaggaagaaaagaaagacatacaagcttgccctcttcacccagaagctggcactctacgaaatgactacccttttcgacgttgaaatcgatcattgtcaacctgttcaggtgcacaatcatcaaaaacaaatagatgaaactcggtcaggaaggcatgaaagagaaataattattttgctttttcttttggaaatgacgagaccaatactgactttggcccgatttcggatccagcggcagcaccatggatagtctttcctccgccaatgttatcatcgacccagcagagcgcgcttccaagcttggaatccaacggtccggagagatggtacactccaacctggaacgttcggaaaaacaggtcagaagagttgattagcccgagtgatctgccgaaaggttgaagttaatttttttttttaaaaggaactcacatctccggctcctagcttgacaggtactctgagacgagagtaaggagtctcggcgaaccagtagtgtctgtcctcctgatcacccggctttgggtggtgggccatccatccggaaccgtagaagagactgggtggcaatgggttgatcatgtcgtttgccgaggcgcagaacggttcgatctccctgaagccttcgacatccgtaggcaggtggatcaacctggtgctcggcactctgagcgcgtttgtccaagtggtcgaaggatcggtcacagtggtatcgccctcggccttgagctggttgggctctcgcatgccctttcgaaggccaactccaccgagcagctgggctccaccagaattcgtttctgcgagatcaagcgggacaggaacatcgaacccgtggcccatggcggcagcccagccgaggcatacttgagactggatgtaatgaatgagaacgtcagcaatgactgtcaaagattgggtttggaaagagggaaagtgttagctacgaaaaaaggggaagagagcaggtcagcaagtggacgagtacatacgatcgtgaccgtgagggttggcaaggatggggtcggcgtaatagctatttctgacctcctcaggccggttcatgtagtcgtggtagagcaaccccttgacactatgtacacggacaggatgttataaaagaggaatataaaatggcggtgaggactgataaagagatgaaaaacagagcaaacagagaaggctgatacctgatgtgaggaatatcgtagaactgagcgaccgtattgtgaagctgctctggtccggcgtaagcgtgctgggcgacgatctggggagcgaagtgaccgagcgagatgatagcgggcgcgtccggtcgaacgaggatcgatcggacgagaagctcgtagtgagacatccattccttctcgctaagggtgtgaaaagggtagacattagcggagtggcagggtggcagaacggaatatcaaaggaactagagaagagcatagagatcatcagaggagcatttgtgaaaacatactttggatcggcagcgtcaaactcaagaatgacaagatcagtcttatcgggcaagtggtgggatgagcagaatgcaaagtaggaagaatctgttcgcctgtttgcaccgttggtgagctcggaagccgggtgagggaacacgtcgttccaccacgagaaaaacttggacgggtagcatttcggagacacaaggttatcgcccgatccgtggcaggccgagactatttcgagggaatatgcagaggagcggagaatggagtcaatcgatgatcatggtaagacaaaagaggaaagaagaaaggagcgcaagataggatgaaggaagagaagtggaaaagaaaggcaaggcagacgaaagactacatactggaagcaccgagcacactgatggtgaccgggtgaccgctaagagctttcctgatgactttctgtactctggcgccggagccgagatgcatcttgctcttcatgagcgcgagctgacctctcctgttggcaacctcgtctcctggaccatagagtggacagaatgggaagggagctggatcgataagggaggcgttcaggtagtcatgggacgtcaaggccgagtggaaggaggcgtgatgctgggcgacgaggtcgtttgatcggaatgttgggaccactccggtcatgaaaaggatgacgagaaggatggagaaaaagatgatgagtctcggagggaagcctgaagtgaaagagagaaagaaagagcgtcaatccaagcgagaagagaggaaagttgcaccaaggggtttgacgaaaacaaacgagggaacgagggaacgaggagcactcaccaagcacggtaccctctctaccaaagaagccggaagatttcgacttgttgtcttcgtcatcatgcttgtagtgtttctgctcgcgcaacatgccgctgaagatctttgaaaacacggaggactgcttgccggtgggggaacgacctgtggctggctgactggtactagggtcgatggccgagggagctgagctaggcctagggatagtcgaatggacgtctgcgtctgtgtggtgggagtgatagcctggtcggagcatccgctctatggaggatacattggacgaagaggcaaagaacagatcaaacgaaaacaaagtgattagcacaaagaaagtgagcgaacgaaagaaggaatgacgtccgagatgggaagactaaagggcagaaccagaaagaacgaactaaggctgcgatggccagggtttgtccgggagagaagaaaaaaatcaagaaaaataacaagaggaacatggtgagaattccttgaatctgaagaacctgtaacgtgctgctcgagctcaccagagacgacagagaagaagaaaaggaagaaagaagacgacgagtagcgagaagaagacggttgagagcaaaggagaaaaaccgactttgggcgattcgtcccgagagccaaacacgcacggcctagggcgggcgcggggggcaggggggaaggctaaataaccttagttaccgttggataagtggggtatagaatcacttactattcatctatctgtaacaataggccggattggttatcgtgttgctgtgcagctcttgttgtgctacgggtagtcaccggtgtgtcacggcaagataattcattgtggctgaaagtcacgtgcgtaagtcacgtgcctcctcggtcttcttccgactgccctgactctgtctgaaatatgtggtctacttcagaaggagaacagattctgcgcaacgttcttgtctttctttcccactcggcgggtacgagaaggagtgcactgggtcacacatgcaaagtatacgacgtgttctctctctctcacacgcatatcagccgcgtggtcgatggatgtgtgagtcaagacgggcaagcactcagtcgctatatgggacaaaacagctttagagaaacaccatcgaccatacaaagtagtttctgttgactgtaaagtaagcgatagcataaccaatgagaatcctgttgatttcgatacaataaatgtacaaattcaacaagcagtgtggtcaggtttctcggatgtttcaccaaccggtcgcctctgtgtgtgtgtgtatgtgtgtgatacactcttctatatcgatcttctacctcggaaacctccacatgctgatcatcgactgtgttaccttgaatcacctgctctctctatctctatcttcgcgctcttctcagactatctcctccttctctctccctatgcatgctgctgagtgagagttgcaagggttaggaagtacaagcactgtgaacacttaggtaactcgatatcttttcaaatacctacttagtcaactagccgacgcctaagccttctctatctttctcttcatttctttctctcttcactcacaccggcaagaagagaaaaaaaaaacaggaaaggccatcgaacgagcagcttgccttctttgtatccgtacatacagcatacatactcatacaagtgaccttcagctgccatgcgacgctcgctccctccccgattgccaagtttactcaggtcgaccacgccattcgtccatcggccgtccgtccggactactttccccgtggcttccgtcgcccggcacaccctccacgcacacctcggtcgagcagagttctcgacctccaggccacacagagatgacaacgcaccgagatcaccgttcaaggtgttcgtagagaccctcaaggcagagatcgagaagaacagggaacttcaggagaacgtcaaacagttgcagggtgacgtcggcaagatgcaagactcggagagtctcaaaaaagcaaaagatctctacgagcgagccagggtcagtgtttctgtggtgtctttgctctatcttttcggcgtttggtcttactgatctcctctttttcctttgtcgttctccttcttcaacttttctttcttgtccgttccttctcgtctttctctctcgaatctttttctttccatgcgttctccctttggcctttccacccttccttcgctttttcttttctcttcttttcttttttccaattcctagatcacgtcgatcttgaaaaacaacccaaaacttcaagaggcagccgatgagatgaagcgaacaggtgttaaagtcagcgacgccgtcggtgaggcccttcgtcaggtggaagagagcgagtttcttcgagcggtaagccttgccttctacttctctactcattgtcctcggtcttgctttcttcactttaccgtttccctttggactcatcatgtggttcacccacccttctcttctctccgtcagcttgctaaagcaaagaacgccgtctcctcggcagccgccacggccaccgctcccgtccgaaacaccgaagcctataaagcactcgcagagagcgtatcagaagtgtttgatgattcgtccaccctcaagtacggtggattcatggagaaagacatccgacggaagcgaaggcaggcccggttggagaagcttggaagagctggtatgggtgtcggctctagagtcaaagtcaacgaagagtgagtcctttgccaagctcccagtgctttctctctgtctccttacactcatcttcttgtccctctcctcttctggtttctctcacagagctggaaacgcgttggtactgtcgaaagacaacgtcgagccttctaaatgggacgaggtcaaggcaaactcgtctttcttctcctacctgggcgagctcaaggagcgataccacgagtcggaatcacccgtgatctctgccatccgaaccgtcaccgacaagatcggttcgctctcggaagaaaacgagtttgccaaagtcaccaggcagatgagaactctcgacccgagtttcgatgttgagggctttgtcagagacctcaaagagtacattgtgccagaagtgctcgatgcttatctgggtatggataaggaggccttgaaggcttggtgtggagaggctgtcagtagtgatgatttgttttccatcaagtgtcttcgagcgcgccttctttccttttagattctgaccttgttcccttccttccttaccctcccccagtcctactccatgttgtgggcaactatggagcagtatcacaagcagggtcttgtcagtgaatccaaggtagtcactattcagaatgttgacgtgagtaccccccttttttcttctcttgagtgtgtatgtgattttgctcgtttgttccaattttaaacgattggatttgctctctcatcaggtctccacggcaaagttcttggataatgacgtgccggcctacctcgttgcgttctctacccaggagattgttctgttcagacacacaaagaccggagaggttctggtgggtgacccgacgagggttgagagcgtcgcctatgctgctgtgtttgctagggtcgaagaagaattggaagacgagatcactggtggttggaaggtcttggaggttagtaccgttgctgtctcttctttcttgcttttgttctggttggacattcactcatcaacccttgtacttttcgtttctgcctacctcgcatcgtatattctcgctcttctacgtcacattctcgacttgtctactagatcgcccgaaggggagcgacgatataaaaaaaaactattcccctcctcccaagagaaatgatatcacaaataacgagaacacaaagatcaagagcatacaagcacagacacatatacacacactactctacaactctactactctccttgtccgacaaagctatcaatccatgtcgttttccatcttgtcttctgttgattcgttctgtgccgctcatagaaagaaaggaattaatcgggcaaaagatacattcggatggagaccccggggcgctgatgaggtcacttttctttattaccattcccggcggtacttttctgttgtttttttcccctggctttcttctttttgcttcctccttccatcacccatcttccatctctttctcttctcacatccacacccactcaactctaaggataaaaacaatggtctacactatcgtcgttcacatgcgagccaagaagggagaggaggtcaagctctagtatgtcctctttttcgcctctttgttatgctagtcaaacgagatgcagttctttccgatcttccgtactctctggtttcaccgagcttacccatctccggcttgtccttcctttccctcttcttctctctgggtgattgattgaaaacaacagcgaaaagctcaaggaggcttccagggtctacagacaggacaaggagactatcgattggttcgtcatgcaggatcctaaggtatgactttttccgttccctcctttttcggttacaactttcaatttccgagtgtttgttcgagatgttgtccgaactgagtggctgatcttgattgagtttctttccgtgttccgtttttggtactggtccaaactcgaactcgcggatttgtaggactctaccaagttctgcatcgtcgagcgatacgttcgtcatcatttcttctccttcaattcgctgctccttcgatctctcctcatttctatcacttgcccgatcattcatcttttcctcatttttccttcactttctctttgtctgctttctactctgcgtttgaccatattgtcggttgcgatcacaggagcacgagtccagccagaagtaccacctcggtatgaaaaccttctctcctcccccttgcacatgtcccgtctttcgaagaagactgtatcgggcatctttcaacaagttggagaagctgactcgatggtttctctttcttctttactgggtcttggtctttgtctctggcatctctggtatctttatcttctgggtcaatagagaacccgtactggaagactttcgatgtacgtctctttctttcccctgtcctcctcacctctgaactgtatactcaaaggaaggaccatcaggagaaagcaaaggaactaacctcgtccgcgttcctcttgacgtacaatacagccctacgtcatccctctcctcgatggagatatggacttgacccgatggaacgagttctagagaaccctcataggttgtttgattaccactgtatcatgaaatcgtttcttctccctctatcgcgtgcacatcttgagaagatcgtgttctccgcagaaaagagacgtcgtttgttctcaagagagttgacattgagagttgtgttacattaaaattatcagagtacataagtagcttcacctcttgttcttctcgttcttttcaatcttctcggtcctttcactcccaaggccgttcctgttctcttgtcgatcctcctcaacatcaacatcagcaccatcctgagagccagaaccagaatcaggaagagagctgctcgaaggagtctccatgtctgctaaacaaggagcggcgaatatcctcttcgagcctgtgaaacatccttgaatcgtagggaccgaaaccgcaaactgttgttgttgtttaatagttgaaacgttcgggcagagagaagagcaagcatcagcgcgagacgtgcgaacatgagaaatcaaaacgaggcaagagggagacaggaaggcactcacgaccaggaggatcatagtacatgtcatgatcgt

SEQ ID NO: 2379 - DNA, 16972 bp, Xanthophyllomyces dendrorhous
tgaaaccaaagacaaagataaagacaaaggcccagtaaggattcaattgagattgatgaacgaggtctcccacaaaatcagatagagagggaaatcgcgagaaacgaaccttgaatccatcattgtccagctgttcacctatcagttgagttgatagcgtcaatgaagctaacggctatcacgtccaattcaaacggtattcgaaatcaatctgattagttcaaaggacgctgagctgaaacagagggagtgtggatagcgaatgacgtacgaaagtactggttgaattcaatgcgcagtgtattatggtcagttggcggtctatcgagaagataccgatttggtgaaaagacttgaggactgttcccagggaaagaaaaactcacaagccccaccaacccatctgtatatagtgtattaagatgacaatagaccatattcataagcatcaatcttgagaggagaaatcaagaaatgatagagctcacgttgaacctcatgtctttttccctccatcggaggaagaaacttccaagcgcgatcaacatgaaccagatctgatatgtttttttaggtgtatccgatttaatcaacatccactcgatcaaaatagtcaagtgaaatcttgactataatccaggaagaagaaaaaagaaaaagaaaaaaaagcttacacccaatccccagagaagaattgcgaaccctaaaccaactccccaaagcgcccaacctgccatggctttgcctagttccgtctcagactgtacccctccaccggtgggtttcactaagggaaacaacatcgtagctacgacccctagtttcagtgctgagaaccctgctagacctgttggacctaaaggaaggaatgaggaaacaatgacttcgcgcctgatcattgaagagaacgatgtaagctggtttgaaatagataaaatatgcgtgctgaagggacgaacggagggatatgatggaatatcaaacgctgaagatatagcgtcaatagcatgagcgccactaaaattccaggtccaagcaagacgtaggctatacgcgcaaggaacgaaggtcagtgttccttttctgctaccttcaaatgaaatgatcgcaacttacaagctacccagactacaagtaaacaaaaatgaaacagatatcaattgatgaccccgtgaaacgctagaatgtctgagcacgcgggaacaagaaacgtactgtgcattgcatattgagtatctattggaacgaaattgtacgccagcactgctccaatcgaggccgctgtttgatgtcgagaagaaagtaaaaaatcacttaaaattctattggctccaatatgactcgattgtaagacggaacgcacctgtgatgttaggaacgacgggtagaaggtatgcggccgttgtgttctccggtatgtttgtgtgcgtcgtactttgattagaacccaagaacaatccaccaaagaggattcctctatccgtcagcacatttggcgctgagaaagcaaggtattcgaacaactcactagacattgaacggtactaataaagctactgcgatactgatcacacaactgatccaccacagataactcaacgcccacaaccacccgtctcccaagccccaagcattcttcattcctattcctccagagattagcgtgaaacatgacatgggatagcatcccaagaacagcgaatgcatgggatgcctcatcgttagaggccatatctcgggccaacgaagataacggacagcaaaaatgatggtgaatgttgtgaagaggatcgtatcaacgacgacaaatattgtcgccggtactcgaaggtgatgaacgacgggatatgggatgttcaggatcagtgtacagggaattcctttgtggacgataagaaaagacagatgaagtaacaaaccaggattaaccacagacatagcaatccgtcaatcccaatggaaagaaatgtgcacatacctacacccatggtacatgagaaccaagacggtgagaaatgcttgatcctctccgactgtcatcgaccaaagagcgggcatccatatgaaaatatccatggaatcaacacaacatctcagcttgaagggatcactgtcttccgcttgtactcacaatccccttgaccttgtcctcgaccgtttcctctactacgtctaccacctgagcggctgtggaccctgttgacgagctacttctcttttgagagtcgatcatgttggtagagaggaatcgatgcttgagtattcccatgcaatgggtatgacttgattgggtttgtattacgataggatggcttggagttgataacttttgctcggttgacgaaggataatcgtgatcagtcgacatctggttggtcgcacccggattaggccgaaatgtttaatttgataattacccatttcggtcttttctttctttgactccttctattcatattctcttgctattctgccctcatagagacacgcgtgaacatgttctcagattcaccaaacgtgaattcttgatagaaggaaagagaaggaggaattccatttatttcaatgtaaaaaaccaaccccaaaagcctccttaagcctcttcctgttcagccacccacttctgatactctgcgttccccttgacctggttgtcatactcctttactaactttttgctctttgccttactgatctcaactccctcgccatccaaagtaggtatacctttgtcatcccaagcagagtacgtcttttccggtacgttcggcggtcggaacatctcgcttgcaggtaccttggccttctccatcttcgcgagctgcttaacccgttgggcttccttgttggcagcctgttgggcggctttctgacgagcaagagctagcttggtctctcgagcttcgatcaatgtctcggcaggaacaagcttgaccaacgcccgaccggctttttgtaagatcgtgttctcagatactcaatcagtcttctagtaaactcaagacacactagcgaaagaaaagagtccaaatttaccttcggtatcgtccaaagcgacccctagctctgcaaggtcgtaatctcgaagtcgatcggacaaagctaggatgtccttcgggtcggccttgctgatcgatagctttcggacttcatctcggaaggccgagattactcggagataaggcatcaacagagtctctcgctggggacataattcgacgatcatcgtttcgtcagctcatcttcccatcatctttagcgcgtcgacagagagcgttacgtacgtcagctccgccaccttcttgatctttcaatccccaaccaatatcctttcggtctccttcacccaatccaaacatcctcaacattcgacccatccaatcagcaatggtcaatgccacactcaggtttcgtcgttttagttgaaggtagacgttcgccttggtcgtcaattcaaggagctgttggagggccaatggagtgttgaatgagtcgcagagtgccgcgcggaaatttgcttgagcggccttcaagctatttgtcgataaagaggttcggattagactacgggtggaaagaacgagaaaggagatttcgacacaagaacaggggctcactcaatcgttaactgtttctcttcctcgtcgaaataatgctttccatcgaaggattctcccaaggcttctgcctgagattttcgggcttttacttgggtgaaaaagttctgcaagaccccaaaaaattccatccgcaacaaaacaagttagaaccgccaaaccgaaccaatatatcgagaatataggatgcattaagagggagacagaagacagaagaggcttataaaacaaacattgaaagaagattcgacgctcttggcctcagccatcgtgctctccttgaaatccatcttgttgttccacagctgaagcataaagcctaatcggagttgacgggccgtgttctttgccaaagcttcctgttattcagtgtatcatccgatgaacaagccccaaagatagagacaaataaagatcgaatcagagttcagtaatttgtcacaaggttctacaatctagggatgaattcgtacgtcgatggtgatgaagttcttgagcgactttgacatcttcaatccttcgatatgaagatggccagtgtggaagaagtagttgacccattgcttgcaatcgtggaaggcctgatcccgatcgttgtgagggagagaaatatcagtgttcatgacagtttgtctctgttgcgaacaaaattaaggtaaccgcgatgtaataaaactcacctcgctctgagcgatttcgttatcgtgatgagggaacatcagatccactccgccagaatggatatccatgccgtcacctaggatctcggaagccatcaccgaacactcgatatgccaacccggtcgaccttgaccccagggagaaggccatgagggctctccaggctttgatgatttccagagcgcaaagtcggcgggatgtcgttgggtaccagaggtcagggaacctatgtcgggagtaatatgtcggagcagaacgaaggtggtgagtccttgtaactcgtcgaaacagaagagatagtcctcttaccttctccctcggcaagcaattggctgttccccttactccatggcgcgagcttggcataactatgtttccactcccctccgtcaagtccctttctgacagccccatcgtagccaacggaatcaaagtacaagcttcccttttcgtcatcgtaggcaaatcctcggtcaacgatcccctgaacaaaagagacaacctcaggcacatattcagacacacgcgtcagagtatctgcaggcagaacattcaattgctccatcgaggtcaggaaagatttctcccaatgagcagcaagggcgcgggagatctggggggatgttactgtggaaccgtgctgtttaaggattgggcgattagcaaggatttttttaaaataagccttggctttctcttcgaattaaaccaagatataaaaagaaaactcacgagatcatccagatgcaaagctaacgggtcagaaacaccctcgatcagtgcctgggcgacctccgcttgagttttgttctctgccaaagtcttttcggcgtctctaatcgcagcccttgaagatgtcttgaattgacaaatattttatgacagttagcgacgtgtcgtgtagggtgttccatcctcagaagacacttcaaacctccaactcactaaggtcttccaccatagggtcatcttttcaaacccagcaactagcttgttcctccactcctgatcggtctcccatttaccgacaagtacgtcgtcccagatcttttcctcctgacctttagcaggaatttcactttccggaagcgccttgccaatcgtctttcgaagatagaaagcccaggcctctcgcgcttggttgatgagctcgggagtaagagagatggtagagtctcgaagacggttcagaaggtgctcttgacgcgatcggatgatgatctggagttaagaagaagcaatgaaattcaacagccatcagtgcatgtacatcttctgacatatctttcatcgagcatgctgaactctcaccttatcgtcaatatctgtcacattcatcacgaagtgcacatcgtatccaaagtagtcccgcatgattcgcctcaaaacatcctgagtgacatagttcctgtttaagtaaacagtccaagttagagtttatcatagataggatggtccgatatcggatgagccgtacctggcatgtcccatatgggaagcatcgtagacggtaggaccacagttgtaccaggtgacttggttagcaaccttgggaacaaaaggaacctaagaagattgtaacgagtagaaggagaccagttcaatcgtacgcgttcctcgataaagagctctgttataggtgaaacacaagaaagtgactcactttggacctagtcaacgagttccaaactttgagcaccggctcctccttaggcgtcggctgcaaccattctggttgtcgaacctttgatccagccacagaggcagcagcagctgctgatccttcagtcgactcctgagaaggtatgaccggggtgtttgagctctcaggccgaacggctgacgacgttgacattcttctaagagttataaaatgaagagacgaagtgtgattgctgctactgctgctgttgttatcactatttctgattgaaacgaccagtgaagactgagacttgaaggaacgacggaatgtatgaacgatggatctagaaacaatggatgtttgcatacaacccagatgcgttggcccggttagatgttgtccgtaatgatggtcgttgtgtttcttctcaggagcgaaggtgctgagaaaagaaggacgactgtttgaaattctaagttagggttatcggagagtcacaaattgaaaagctgtacaagcgtgaccttggaacatgtggcgttccttacctgtcagagctttctctgccgttctctcaatcttgctacttacgactgtcaaggcaaaaaaaaggccacctcattctcttgtctttctctctaacagtaacatctccagatgcctcctaaaaagggaaagggtaaaggaaagaaaggagcggacgacgatgatgcctactggttggtctttcatttcaagagtttcttctgtcgttcccttctccgagaagagttgcctttctaggtccaccgtctcagtgcacatatttaatatcgatgtggttctcgtatcgtgtacaacagggactcggttgccaagacggctacgcctccggctgtagctactcccgcagctgccgactctgatgacgaaaagccagctgccacaggatccgccttctccgcgttgcccactgaggatgacgacgaaggagccggctttggtggtctgatgtccgccatcaaaaagtcttcgaataagaaggacaagaagaagaagaacaaagcgactttcgacgacgaggacgatctggcagagtctgtctctgctctcgatatatctaaggccgaacctgagattcaagtcgttggagacgacgagtggcccgaagatgagcccaaaggaaagaagaacaagggcaagaagaataaaaaggttcgtattaatctactgtatacacttttttgccacactggtttatctgatcaatgttcttggtacaacaccacaggggaagaagacctatgatgaggacgatgacgaggtcgagactcccgctgtcgacgaggccccggtcgctgccgagcctgagattcaggttgttggagacgatgagtggcctgaagatgtgaagcccaagaagggcaagggtggcaaaaagggcaagaaggtttgtcccggttttgtttcaagacacttatgattggctcgaagttgacggcctctctgacgaatgtgtaactccacttcttacaacacgatcagggaaagcaggttgacgtccagtcagaagacgatttcgctactcctgagcctgcctctaccgtcgagcctgagattcaggctgtaggcgatgatgagtggcccgaagacgaagtgaaacccaagaaaggtggtaagggaaagaagggaggagcagagcctgctgcgcctactgccgaggaggctgatgagggcaaggaggagggcaatggagaaactaaaattctcagcaagaaggagaaggaaaaactgaagaaggagaaggaaaaggtctgtcctttagcagcaatcaaccgaatgtcaaaggcaagaagctgaatgctaatcgcaacttcttttatcgtggacacgcatgcgcgcatcttgtcatcttctgccttttcgctatcacccttcgcaggcgaagaagaaggctcaacaggctgccaaaaaggcctctgagcccactcctgctgctactcccgagcctaccgccgctgaggatggagaggatgaggacggagaaaatgaggctggcggagctgacaagaagaagaacaagaaaaagaagaagaagacggctgctgatgaagctccggcaccggctccttctaaaccccttaccggtcgaatggccgctctgagggcggcgatggaggcgaagaaggcggcagaggaggaagaagcccgaaagttggcagagattcaagccaagatcgagcaagaggagagggaggctgaagagcgagagcgggcggctgaggaagccaaggcaaaaaagaaggagaaggaacgagtacgttgcgtctacttacaactctccaacatcgaaatggctcatcctaatgtctttattgtcctttttctctgtccataggcaaagaaagagttggccaaaaaagagggtcgactcttgactcccaagcagaaggctgaaaaagctgctgccgaggctcgtctacaggctcttcttgcttctggcgttcagatctctggtctccagaaagatgttgataccagccgacccaagaagccagtatacaacaacaagaagaaggggggcgccaacaaagcggctgttgaggctcaacctactcccaaggttgaagaggtcaagaccgtcaaggaggccgaggagaagaaggtcgaagacgacgatgaggatgattgggacaagagtgacccggagccggagcccgtcaaggtggaagagaagaaggtggaagaggaggacgattgggacgttagtagtgcggaagaagaggagcccaagcctgcccctcctgcttctaaaagttcgtatctctattctcatcttcttcgcatgttggttcccaaagcctgagtgcatttgttgatatgtaatcttggttattggtcgtgtcctacagccactcctgctgctaagcctgctcctgctgccaaatccattcctgtcaaggctgcccccaaaggagaggctgctcctgttgaggagtcctcttctgaggaggactcggactcggattcggattcagattccggctctgatgatgattctgacgatgactctgatgatgattctgatgacgactcggatgattctgaggaagagctcggtcccggaaagaggcgagcgttggctaaagctgcagaggagaagcgagctgcagagcagcgagctaaagagtcaagggagaagagggaaaagagacaccaggaggctttggctgccagaagtgctgatgatttgaggagtcctatctgctgtatcatgggtcatgtcgataccggaaagaccaagcttctggacaaggttcgcccaaagcccttaagtttgctcaacttttctatgacacaggagacttacctctccctatatcttcgaacttgacagattcgtcaaaccaacgttcaggagggtgaggctggaggtattacccaacagatcggagccacctacttccctactgaagctatcagacagaagacggctgttctcaataaggttagtccaaacacgctcacatttcgatcatccatcggtcgtctaacaatatgctaatctgaattgcttgtgtatcgtagaacaacgaccaagagtacaagatccctggtctcttggtcatcgacactcctggtcacgaatctttctctaacttgagaactcgaggaagttccctctgcaacatcgccatcctggtcgttgatatcatggtatattctagtttttcctttatattcatatcagaagcaaccctgatgtccgttttcttgaacggtttctcaaaagcacggtcttgagcctcagactctcgagtctctcaagatgttgagagacaagaagactcctttcatcgttgctttgaacaaggtacgtaagacagtgactgcttgaaatactttgccccaatcgctcatccgaatatatgttacttggcaaaaaaaatcagattgatcgaatctatggctggaaggctactcccgatggtgctttccaggaatctctcgccaagcagaccacacaagtcaagcgagagttcgatgatcgagttcagaagactatcgtcgcctttgccgagcagggtcttaactcttgcctctactatgagaacaagaaccttggtcgaaatgtttctctcgtgccaacctctgccatcactggtgagggtgtgccggacatgatcatgcttctcgtgaacttgacccagcagaggatgagcgagcgtttgatgtatatctctgagctggagtgtacagtattggaggttaaggtcatcgagggtttaggaacgacaattgatgtcgttttgtcgaacggatacctgagagaaggtgatagaatcgtggtctgtggactgaacggtccaatctttaccactgtccgagccctactcacccctcagcccttgcgagagatgcgaatcaaagtatgtggtgcctttctactacgtatcgttctcgtgttcaggcttgagggtggagtacgtcgtcatataggcacgctaatcatttcattttgtttttatctctccagtccgcctatgttcatcacaaggaggtcaaggctgctcttggagtcaagatcactgctcctgatctcgagaaggctatcgccggatctcgactgctcgttgtcggacccgaagatgacgaagaggatcttggagatgaggtcatgtctgatctccagaacttgcttacgtgggtcgacaaatctggtcgaggagtttccgtccaggcttctactttgggttctcttgaggcgttgttggatttcttgaaggtctccaagatcccagtctcaacgatcaacattggaccggttcataagagagatgtcatgcaggcttcgaccatggtggaaaaagcgaaagagtacgcggtaatgctctgcttcgatgtgactgtcgacaaggatgccgagaagatggctgaagaggctggagtcaagattttcaagggtgtgtaccgtactctttcctactcgctttcattgtatctacatcctcgccttttgaagtgtgactgagcgatgtctggcattctatatccttcctctcttctttctttcagccgaaatcatctaccatctcttcgatgcttttaccgcccacatgaaggcgtgggaagaatctcagcgagctgctgttgccaaccaggcttactggccttgccgacttaagatccttcaggtgttcgcccggcgagatcctatcgttcttggtgttgatatcctcgacggtactctccgcacgggaactcctgtctgtgttgtcaagactgagaccgacaacacgaccagcccgcctacgatcacgaagacgatcgttgacctaggaactatcacgtcgatcgagaagaaccacgagtccttcgataagcttttcaagaagaatattggagctggagcggcaatcaagatcgagtctggaatcaacgcccagaaggttcaggttggacgacacttcgaggagactgacgagatttactctaaaatcactcgaaagagtatagatgtgctcaaagagcacttccgagccgaagctcagccttcggactggaccttaataaagaagcttaagcctcttctcgacatcccctagttatcttactctcctactagtcttgcttttctctctttgtttttctattgcattatatccattacttttctgctccaaatcatctgttgagcatctgtgtcgaatgacagtttaagtcttcgttggcttacttttatatgtgaagagggtcacgtgattgaatttgttttgacgcgtccaaaaggaaagttcgacgcgtcgttgttcttcctgatcaagactgagatatctccaacctttcattctcaaagatcaatccatcagcagtaaactcttgtagattcaagacttgggctagttccagaggaaaaacatggctgctctttcccgtcagctagcaagcttggtggaaactattgtgccggacttagctcaaccccatcatctcgaggatggaccctcgcaaaaagaacgagaggataggcggtcagaactgatcgaatatgtaaaagaagtactaaactcgttcgtctccttcctcttctatcctctcttctgtaccgttatatggtattttgccaatcaagaaatatcattgcatgggatttccctctttgcatcaatgcattggggctaattggatgtgatttgaatgacgttctcatagaagaatagcgacgtctagcaacacaccgtccgatcaacggtctctcatcaatgatatcaagaagagaattctcactgctccctcgtcttcgtctacaactgcatcatcattatcggtgaacactggttcagggacagatagagctatccgattcggaaatctgtggtccaaagtcgagtcttcagttcgttcatcctgtcagaaccccgtcaaagataaccttatgtcatctctactcaacataatctcttgtttgaccatcgatgattaggggctcttaggacttccagctcaacagctccaattcttgctctcactttcaaacttatccgttcccacattctcgtcttcttcctctgttccgactccgatattccccttaccattcgaatcagaacaacccgctcttaaacttcgagttgcacctccctttaaggcaccagaatttggatgggacagagctggagatagactaagaagcgctccttctgtttcagataagaacggacatgctggtaggactgataaaggaaaagagaaagagatagaggagagtgactggagaaagggagcttcaaagtcagatattatgagaagatggatggactccagaggtatgtctatcctgaccgctatatggagatacaaggaatcagcctgatctctgatcaaccgttttctacgttttatccatttcgtaggctcacctgtgccatccacatccgccatactccgagacgcactttacttgattcagggcatcgatggaactttggttaagtttgacgtcccagcggtcgaatcgaacaaatggctgaaggatcaaccaaggcctccaaagggcggtttcaaagttgatgaggaaggagaatatgttggcgtcgagcttgaacagaatcttggactagttggcggattgaagtttgaagaaagtgatggacgggtacgcatcattctatttgttttcttgcctctcgattgtcttcaaggtgtacagagaagtttatttcttactgagagtctaaatttccaccaatcgctttcatccttctagcccagaatcccttttccgattaagaaagagctagcttgtctagcagagattggctggttgtatcgaacagtagattgttttgtcaaagagtgcaacgaaaagaagggtccccgattccaatcgcaattcgggatgatgaaattaccagaggatccggaaatgcaaacacctgagcagaggaaaggcggaatggttgaacaggtttgtgtctcccgatatcatatcgtgtcttttgtatatgtctacactgcagtattgaaccgtctttcacctgtttcggttttgttatgataatatgcttatacgagcagagcgtttgccattttcttgagacccaactaacggcttattctcacttgatatctgtccttcaaactcagttggattcggtggatcaaagtggcggagatggtaaaggatcgatgacgctatctcaattggatgtctggaccagagaggccagactcaagatggagtggatgaactccatggttgatgactgcagaggtttgttgtaaccaatttctacggcctaatctcgcactagttgtttactccgtttgaatgaattggttttaccagtgagtcatggaggtgctttagtttcaagaatacatgtttataccgagaatggagatccattcgcaaggaaattcgcggatgaggttttggaacaggtatgtccaagaatattatggtcctgactacctcattcttggtttgacgaaaatgtctctgtatggttttgtacgggcgttaggtttccaaacccttctttaactccctccaacgatggatttatcacggagagcttaaagacccttattcagagtttttcgttcgtcttaatccagatcttgcctcacatcaatttgtccgtcttcgacctttcactggcgctgaagacgttgggttcgaggactcgctagggatcgagggaaggaatgggattggcagtaatgggcagggtgtggcgagtcatgagctttggaggaagaagtatgagttcaagaaggagatgcttcctagtttcgtaagcgaggcatttggtcggaaggttcgtcatataaacaattgttgttctgtacagttcttgtgagaaggtatgactgaactaagaaggaatctgtcgaaatcaatagatctattccacgggaaaaagtttgaattttattcgctacagttgtcaagatagtgactggatcgcaactcgttccaagctagaagatgctgggaaaggtacgatatctgcttacttttcatgaacgccctttcatgtcttctccatctaacaatccattctgttgcatctgattcagaccttcaatacagcgacattgacggattagagcgttcaatagatgcggcatatgagattgccagtaaaaggctgcttgaggtcttcttcgacaaattcaaacttatggagcatgttaaggcgctcaaacagttccttctgctagggcacggggattttgtggatgacctaatgcgcgctctctcgttcgtttattttccctcttcgattattcgttttagctgttgagcggtttgtcgattcgcacgatctaccttacttacgcgtgtgttgtgcctgcgctttgtgttatcttcaccatggtttgatcagctccgacctgtctcggccggctaatcaactctatcgacatacactcactggtacactagaagctgccattcgaggctccaacgctgtctacgatgcccctgaagttcgacgtcgtttggacgctcgaatgcttccatacgcccatggggagattggctgggattgctttatcctggaatacaaagtggatgctccaattgataccgtgctcgatccaagggctatggaaggctatcagcgaatgttcatccatctttggaagttgaagagggtggagagtacattgaattcaagttggatgagactgacggctggaaataggaatattggaagatcttctggttggtgtccttttccctcgtaaacctttatcatcaatattgacacattatggactgaacgtaccgcgccccaaacacatatccagacactcgcgaagaatggcatcattgtcgaattatccacgccgagatggtacatttcattcgacaattgcaagcattctaccaactcgaggtaatagaatgttcgtggcaggccttcgaagaacttatccagaagaacgaggatgggctagatgggctcatgagtgctcataaggaatacatcggacgattgatcacaagaattctcttggtgacgcattctagatcagggaatgaggtgggattgcttctctctcgaacgtgttaggtagtaggaggaaacgctgatatatcttcaacttgataggaattgttgctcaaacaagttcagcaggcgttccaagttattctggatttcgtagttgccatcgttcgtccttgatgcctgctgttcacttcgtcatttttattttttttgtcattctcttatcagtttacttttgagcttcaggaaactctataccgtttcacccttgaggatgaagtcagactcgactcagcccgggatgcaggaagagtgagcccttttagacaatagttcgatttgacacacttatcctgacgacccatctttctttttaccccagggtgtttacactcgaactgttatagctgctcctagacggaatgaaggagagcttgaccgtttaaaaacccagattcgagatttgagtgggaggtttcaagatctgattggtgggattgttggaagtgcagcaggccgtaagtgctcctctttgtccattgtatcatgatagtgagctaggactgatatctcttatttgttttctcttcaaatgatcaaaacagatcctgacccgtaagttgaagttttcagacatgatccttttcttctcaaacaaggctcatctgttccttcttccttgatctctcgcatcttttagagaaatcaaactatttgccatccgctgttcatacaacgcattttacaaccttcggccgattaaagaaaagaggaaagatcgagctcgagcttagcatgcatagcccataattaatatttcatatcataccctgaaattgtgagctatagatgtaacctattcattggagtgtttgtctcaaggttggtctctccaacacttggaagcataacaataacaggaaggcatcaatcaaattcaagagaattgaaagctatgtatggtccgatctggatgaacttagtccgctctgatgagagttgtcgagttacagcgaacacatccctcaatcaagctgaactccctcttcgctcggccccgaaaaagcagaggtcattgaaaactctggtgtgggccaagaagacaacatctcgtccaatatgtctgtcaagattaatggagaatctgaaggaacaaacggccgaacaggaattggatgatggatttttcgaactttgttttgtccatcgagaggttgggtgggataaggaagtggggctagacgcgcggacgtcctgcatagtagtatgggtttcaatccggcgtatggacgggaattaaaattgtttggagcgttgtaaaatccgagtccaacaggatcgaattcagcttcagaagttgcagctgttgaagcgctgtcacaatcactggtgacagagtcggtggtactggtgtcgctggtgtgaacggaagattcagagatcgaaccgttctcggagagacttctagtccaaatagaccgtttcttcaggagccccttcgtatcgcctctctgatcatcgat

SEQ ID NO: 2380 - DNA, 2272 bp, Xanthophyllomyces dendrorhous
agtccatccttttcaaatgagacgatcctgagcctgcttcggcggtgtccaaccttggcgattccgagtggaagcggaactcggaaaatgtacaagttgagtcgagaaggggagacctagacagttgatgtccatgcagagggatcggaactggttgagccagaatggctgatgtcaacggtcggatccatgggtttgcttcgaggatattaaccgatccgctactgagaagtggagaggatgtacacgaggataaaggagagtctgcgaatgcggagaaacacctgagtccatatgaggacggataggatgacagagaagcaaccagagattgaagaggagacagactgtctaccgtgaagaggggtttattcgagctgcaaacaaggtcgtccaatgtacgcgctcgttctccgttcagaacacaaccggatgaagcttgaagaggacagggaagaagacagagtaacaaatgggacaaaccttttggaaccgtcgttttcctttctcgcatccaacaaaagtttgagcgcattcctcctacctaaacttccttctgttgttcccgttccactatattttatattcgcccgcggccctcctatgcgtctccctccagatactcttcgcctgcgagaggttttggagcgagtcacttctactcctgctccttctacttctacttctccttctccttcggactgatgatcagcatgagctccgccagcggaggtcatggccggcaaactagcgtagggtacatgagacactcgaacaggcaactgaagtgttgcctgtcgtctattatgactatggaaagggaccgagacaggatatttcctgatcgcctgccgatctgtttggagaggagcagggtgtagcataggagcaagggccgttgtaaaccggaccgttttttgggaggatgtagattcaggaggagcgcaggacgtcatggcagatatcaaggcggagaggggtgatattcgacaaaagagaagagaaagaagagagactcgaagccgtgtcatcttttaaatcatgttcgaggtcttcctcccgcaattgaaagcatggtatccttgtagaggagaggattcgtaaaacgggtagagatgagtcaacaactagacgtcaatcgtcgcttgtctgctcttcccgcttcggacttgaaacgaaaatgagaaggcaatcatcaagttaattagtatctaaaaaaccatgtatactgaacaaagtctgtccagtgctcatcatcaacataagcaagcgatctatctacaggcacgaaaaaacgcagaggaagaaaaagaaaatctatgctagcaggaacgagaaaagatgaggaacgattacgaggtactagttgagaagtcttctcctcgttcttccgctttctgaacctccaccttccagtttgttcccagtctacatattaagagttctgtgaaagcaaccagactgagagctgctacttgaccccaccagagtccgacgagtcctagattttgatggaaggcgagaaagtagccgaacggcagcccaatgacatagtacgctccgacgtcttttattttatttgtttttacccaggacaggcgaagatgaatattaaaaattgaacgggtcagctgagtccgcaaacagaacaccatgtaggtttacgcacgaagtacagcagctattgattgtctacccgtagccctcagaaccgatgcaccgacattctgaagctgtcagttcgattcgcaaagaagaaggcacatgcgtattgagcgagctttcgtgatgacaaaagagaaaaagaaagaagaagacaaaccccatcggagatttggtaggttgccattggaagaacaacttgtttgataaggctcacagtgtcctaagcaacaaagttggaggagatatttaattccagctctaccaatgacaatactgaacaaaaaaagggagtagaagagcaaaagagcacgtaccttatcatgcgtgaacgcatacccaagacggcccctaaccaagaacaggattaagcctgtaagagccatggtggctgtttccgcaaagacagtagctttgacgagtgatctgatttctgagattgaactctctcctacgcccatctgataaaatcagtagccggtttagagaaacatttagctaaaattgcttcttcttctacatgggggatcaacttgactaggattatcaaggcaagaacgaacaaggttacccaatcgggcggtacaagccaaaccgatcgcataaggaa

SEQ ID NO: 2381 - DNA, 9319 bp, Xanthophyllomyces dendrorhous
gcatataaagagtatcagaaagtatcagatttcggatagttggccaacatggttcacacaaaaagcttgacaaaccttgaacttgaagaaagttcttacaggcctgttgagcacaaacacgcacgatgagaccattagtttcatcactcggtgaatgataatgaattcgaacggtcactagaacgtatgtgaagataaaccaacctccataagagcatatcctacggaaatagtcaaagtaagacagaaaaagtctcagagttagccggctcatccatgagtaagattctttgcgctaagcgtatgcatcttgacatacccggttgactaaacatcataagtcttagatatcccttcagcccgtgagctaacgatggcggttgtcccagcgcgagcatctgaatttgatttcgacgcccatctgtcagcgtatactacatacgagctaacgaagagacaaaacaagaatcagaagataaaactcacaatcggttcaatgaaccaccataccacaaatatgggcaaacatcccaagttagcaagtacgatcgttcgttggaggacgacaccgacgtcggtctttgcgtgggtgggtgatgtgtatagtggagaggagagagtcatctgggtggacgttgcggcgatgacgatcaagttggctagaagtaagatcagagagggtttaggtgtgtgacaaagggatagtaaagatggtcatggtgagtgttcaacctagggcatatagacaaaatctcggatgggactcactggtaacagattgtatcaagaacccttggccgactagtttgcgatcaaaggtgtcagccatataccacccaaagtgtcgcgctgaaaaaggaaagactggtgaatgggaacataccaatagcgagttccagcggcccctttctacctacgatcgctgcactcgttagtcccactgacgactccagtataaagccgagaatgagcgggatggccttcttgaccaagtaggtaaattccttggtaacggacggatctgacttggatacgatctggatcccaacttctggatgaagctcggaccgatctatcaacggctgacgctctgagagagacatgctgtggatatgtatgttgatagagatatggaacaagcgaggttggacggctaaattgatgtgtttatgagaatcctcccaaatattttcgctctagtccggcttttgattacgtcaggaagtttttgagcgaggatttatccgtctttacgttatcttcggatgagctgtccagtcggagacctatcctatgtatcttatgtacagcgagagaacatgtatagaggatagatatctggacgtagcgcaaaaggaacatgaagttattatgttcagggtttctcttagggagccgatgttatcaatccaaatagatgtaaatcgttctggcgcgcagggacccaacgaaacaaggatcagaatcgatcgaatgagatatgttctctcgtctaccggtcggattgctctggaggtggcagttgagggtgcatggttggatgtcatgttcggacatataccttgagactaaacgaaagattatcaaagaagacgaacccccccaaaaaaactgcatgcacacatagaccagaatctctccgtgattcttctctcaagacagcatcaaggtttcactccccatcgatcgcaaagccttagtagctacttcatcataagagtgaagcaaattctgatagtcgatagcgtcaagttccttcttgccagtttgaccttcaacaagtttccatgtaaagacaaccatgatggtaattccaccctcaaaccctgctgaaagacgcaacactactcgcataacgacatagaactagtacacacacttgctgagagtgcactctgtgttcatataccgcccaacgaacgctacatgccatgcgctagatgctgttgatgtatgctgagtgtgttgatatcacgtgacctgccccgaaatacattccccgcccattcgtttgtttatcggtctccatctggctgaaccggttgcatcttaaggccattctccctctgaacgtctctcttcctttcctcctctacttctctcacttagcctccctgtctccgttatacccatccctgtaacatgatctccactcgttctcttgctctcgcagctgtctctcttgctggatcagccaaagccttgtcgtcctgtgtgctcttgtaagtattcagtttctacttcgtcaagtaccaaccttttctgaaccggatactttcgacctttttcttcttcctcttctctcttttccaacactcaatctattctcacttgtagtgataccacctggaacctctatgcattcggaggatcgagtgatgtaggcttgggagcatccccttggtcctgtgagttaatcttcctttcatgcatgaccttcctttctcttcattccatacaactctctcaaagctattcgctgaatcctcgttctcctctttccttctgtacatacgtttgagtacagccatttcggccacaacacttcccacctctggcagaccgtaagctacttgtctttcttcgtcctttcgcataccctgacactttccccatccaatacatccttacgcgccacccatttgcggttctactctagccccttcactggtgaacacctgacgtgccacctgaaccagtacaacaacttgttctacttccttggtgccgatggatccaactcgaatgtcatctacatctatgacccttcaagctcgacttgggcttctcaaacaaccactggtgttcccgatctttctcagacggatacaatcctcgaccacgatacccttgtctttttcaccctctctggatcgactttgtaccaactcgacttttccacaatcacttcggcaacttctggatctggtcttgcctgggacaatgaggttaacaatgctccattcaatagcgtgagtatctttcttctctttgttgttttctcttctttgtttttttttcttctcttcatcgttatttatatctcgctgcggcttttttaaacttcgcttgtttacctggttgattcccaaacgcgcgccatcaacgcccgatgttgcgttccgtacagtcgtacaatcctactatggccctcgcctcgaaccacattcagttctttggagcgcccaatgtggctgctggctctgctgaaatctttgtcattcactgttcgtctttgtcttcgttgtccttctttctttccctccatatgtgtatattaacgtcggtgtttgatgtctgctcggattcaatcccttagactcggatttccaagcggctgcccaggctttccctactttgaacggtggagccgcgttccctgactcccacggacaggctacctcgttcttcctcgacagcggagacgcccagctacagatggcctttgtgccagatgacttctcgagcagtatgttctctatctcttctattcctcatcgcagtccggatcatgcccagtcatctgccgtcctgaccttgtctttcactgtttttcttatttaatcatgcagcctatgtggtcactcattggaccagttcttcgaccgcaggctcggtaagtttattatttggatattctcttcccatactttgttgttcatcactcttattctgatcttcttcgattcctcgttccttatcccttcagacggatggcgccccagatggaatctcaacctacatcaacaccactcagattcttcccgcgccttcctccaaggacacatcttcctcctacgcggcttcggacaccacgctcgtccaactcgactctactggagcgctttaccagcttcaggcgttctcatcttccggtggatacgtggttaactcgtcagcggcttggtccaagataggatataccctcaccggaggtgtttccaccaacgggtcaacctctgcttcttcctccgcctctgctgccgcttcctctgctgcttcttctgcttcggcttcttccaaggcgtcttccgcgagcatgagctctgtcaaagcttctgcctcttcatcgtccaccaaagcttctgcctctgcctctgcttctgcttctgcttccgcttctgggtcgagcaggttggctcagaccgggtggtggggtctagtcggctcgggcttggttggtttgggtgctgttctcttcctttaaatcttgatatttcttctctctctcccacaaggacctcttcattctcttctctcttttcactttccagctacctttttccttctttttccaacaaaaaaatcacatcttggacattagttcttctttcattggacaattcttcttcacatcagacaagcaaacatttcttagccaccaccactcatctaccgtcgacgcgtctccttccactatctcctctcttgatccctttctattctgtccagtatctcgaatatcagccaagtcatcctcctcccgtgtacatgtcatgctttcttgtatgggtagaaatctgagagtgaaagtgtgttcatgtgtgatcgtccttttctttctagtctaccctacgttgtgccgcaccgtggtgcacccagcacgctcctcaatcagtcaaagcgaaagtagaatgtagaggatggaaaatcgaagaaaacagataggaggaaagagaaggagaaggacaagaggaggaagaggaagagaagatcaccgacgaccttcctccacgccgtccgcgccttccctctccaaatctcgttctcgctcccgatccggggtaagatcagtcagtccttgacgttcttcagagaaactggattcgtcgtctccttcgatcgccgattcaggtcttggtgtgccgtagatcgacatttgagcgacgatcactgcgtttgtgagagggtttgggtgaacatgtttggaaagagaaggaaccgtaacggtcaaacgttgagcatgagcgacaacaaagaataaagatgtgatcgtgaagatcagaagagttggaaaacgaaccgaggtcgatagatatggtgatcagaccgcaaatgatgaactgttttggcgatttcttaaagactgacggattttcaaacgaaaatcgagagtgaaagctcaagaacatcagtttcagaatctcaacaggaagaacgtaaagatggataacgaacaaaagtagcaagtccttgaaagagggttgaaaagataaattccctcttcagttgagaggtttagcgatgaagaatgtgacgcgcataatacacttacttgaaaatgtctcctcccaaccagcctattttccgaaggaatgcattgggaagaaaattcagtcacatcagttacatcagaccgttatgtatagatcgtttctcaaagagaggcatctagtgtatcagataaacgccggagatgcgcacccgctaacgtcgatattcgaagtccataacagctccttcgtcgaaaatttgagaatgcttgtggtgttggcagttgagattcgattcccaacgctgtcaagagttaatgcacaaccgggaacaagaggtatgaaagaatcgagaaagcgtcgaagcattcttcaatcagctgctttacttccttccgagtcccgataaagtataagagtacaaaccgataaagcccaagatatcaatgaacgtctcgtgaccaccaaagataagatagagcacgcagagtatgacgatcaatccggcaaggaattcgacatattgtccgaaagaagtcctgtaacatcccaacaatcacgagggtctggatcaggcggagttgcctagaagacggaagaagctgaataggttcaggaatatcactcaccaatcccaaaaatggaacggacggcgggatgattcctcggtatcaacgtcggatttccggtatttgagtagactacaagcgcaagaaacagatggcaggtcaaatgtctggtcactatatgtatcacaatctttcaagaacactcacatgaagagaagcacgagcatcgaaagacataggaagattgattggaacaggagggctggtatgtacagcaggatgatgtgtatgtcagtagctttcccgcatagagcattccaaatcagaagaacgtacctaattcgaatcgattgcccagccagaacacgcatcgtgcgatgttggcaatcaggatgatcgcacacacatctcttgagaagcctgaagacaaccgacatcacgaatgagaatcagctatctccatagaggcgataatagcgggaaagaatgagcacacctgtagaatcctgcttttttatgattgaccatgcctggtctgcatagataagcgggggaccgatcgcaatacctatggatgtaagagctccgataatattacccatgatgtatataagaccgaaaggcaagaaagtgaagatgaaggtgaaggtgagaaagtgaagagtaaagacgcgtaacgtccactctcaattaccaccaccatcatcaacctcgacacccatcatcttccctacgtagcattctctccctcatcttctcttctctccctctttgtttgttctatcgaaccattggtatcaacaatggcttccgctctcgaacgtaaagctactcgcccaaggctagactctcttcggtcaactacttcatccaccgcaggcggcttcgtccgtccaccctcaccaacgttctcacaaacgactatcggatctcttccgccaggagcaaacgcccctcatttactcatcactcgagctgatctgagggagagtctgggaagctatgaagaattgatgagttcgtctaaacagtacagacaggctctgctggcaaagagtgaggcgacggccaggttagcggccgcgatggaagcctgctcaaggtacgtcccgttgtgctctgtgtttttctttctctttctccaacttgatagtattctcatgtcggaaattttgtcggatcttgcagggtgaagggagcagatcactccggtcccggtctgatgtcttgcgcagggttcaatcatgttgtgtctaactctgagcaggtattagcacgttcattttacgaagtacatccttctcttctttgtccaagatgaacccatctctcgatcgtccctgcgcttattttgtttactttgttgtccaaatctataccttccttttcaaacttcaaaggactttgagatacccctgcttcactcactcgatacttaccgccaagaagttagcgaccgtcaagccaattatgaatctaccctggtcgcaaagacaaaggaaattcgacggaccgagtcggagaacattaggcagggcaagcggaagggtaaaggaagagatctgagtagcttccggaagacactaggcattctacagagtcaggtggacgaacttgacaaaatcaaaggagagtactatggagaggttcgtttcatctaaagctttctcttctttcaatgtcgtattcactatatgcatacaacgcgtggtctgttgacgtttacattctctcatttctgccctttcctttcgattcttgcaaccatgtccttcgacacttgctttttcgcaggtactggatgggtgcgcatcgctttgttcatcgcctggtctggagcgcaactcatcgtaattttgcttatcaaccctcttcgtctattatcatcttagggaagacgagatgtgggaatatttgctatcaaaaatcggaatggttgtcaagacacacgttgatgtgtatgaccggttgacgaccaaaggcaatgacccaatactagagcctcttctggccgcaaatccgggtgagaacgtatctctaccaaatatgtctgattgagtctatggaagctcattacatcaatgatccttgcgcttttagatccatttgaggcatatggtcaggcagatcagacagaagggatgtttagtatattacccccgtgcgcgttgtctcattcttttcagtgcaaactctactgtctcttttgataatcgagttcttacattatcttttgcgcgttgatgtccatcagaatcggtatcctccctcctacaggctctacatccaatcttctctcccttcatagtgcagcaataggccgaacgtcccatcccgttctcactggctctaatcaatcgtctcagccgttgactcctaaatcaagtagaccttccacatctgttgctcaagattcgactgatgaaccctccgccgtcaatctatcggcagaggatgacgacgacttcctttcgcctcgtaaagtcgaaagtcagaccgatcggtttgggtggatgatgggctcgaaagctggttctaccaacggggacctactggaggaagaaggtgaagacgaagacgatataactacacctaggaaagatcctagaagaccgatcgatacaactacgggagcagacggaaagacagacctgtccccaaaatctgatcgcgctatagaactaatagagaacggagagaaggataaagaagagagagagaaggatgataccgaggaagaggaagagggtgagggagaagaaggagacgagacaatttcggcacgacaggtcgaggagaggggaaagattccttgggaagccctttcctcttccctagaaggagatgccagccgggttggaagatgggcgactgaggttaacgacgatcgggattgatctgagcaatatgctatccaacttgtacacactggctgtggcctctccttcgatttttctcctcttgtttataccttgggctcctctacctcaagttatattcgcttttttcttcttccttagacaccatcttatagtctgtgcttttcttcgttctctcaagcatgcttgatccttgtttgcccaggaaataaccgtgttcctgtagtttactcattcgagtccggttacctttctcgtatacccgtctcattacatatgtctcgaatggagcgcatatcgtcccgtttttttcttcagactcttcattcctatttcttcgtatacagttttccggttggtcattcccgttctcctctgtattccctatctcgacacctttttcttcagccgtacacctccatccgtttcagggtaaccggaggcgaaatagtcagaatagatctatctgatgtatccgccttttggtctatataaagtgatagacgggaacccgtaacgatcgtgtctgcctcgatgggctggtcgaccaaacagataggcttcttatcgaatcaaggcaagacgcgaagacgtgaggcgtgatcgaaaaagaggtcgaggcgactgaggtgggctgctgttgattcaatagcaacga

SEQ ID NO: 2382 - DNA, 5227 bp, Xanthophyllomyces dendrorhous
attcaatagcaacgaagggcgaatgccgaaagcacacaaacaagcgagtcctatgtaccgccgatgtgaaacagaagacaaaaacagattggcatctatgaattgagaccggtccagtcagattgagaaagaagatcacatacattggaccaaatttcggtgaagctcatatcggtttcctcccaatgagaagaaaggccggctctacccgcttgacccaggttttcattaactgtgatattggtaattgagagtttcagtcgaatgaaggtagattgttcgaggcatgtttcaaagaagtctcactgtggacggtgacgatgtacttgaatcctttcggttggatctctgcaacacagaaagaatgatgagtttgaggcgaacctgtgaagattgacgagagagtgacgaacctagcatgcgttctttgacgcgacgtcctatctcgaccgtccagcgtctggttgtgtcggcatcgtcgttccaagcagagcctacaatgatagaagacaagtcaaacgacaagacaccatccatatgagctatgtgtgtatgggatgatcacaaagagagatacggacggaccttgaagtatcgagttcaaaagctttttgaggtacggttgaaaatcttccgagttgaatcctttcgagctgggcatactgttgcttcacacaagtccaagagagggagcgatccaagggtttgactctgctggctgtcttgctggcttgctggatggttggatggttgggttgttggtcggcgtcggttgatcgtttaaccggctggtcggaaattctctgtgcaccttttctcctctgacctccgtatccatcctactcccccatagacacaacaaacatagccggctggataacgatggacgaacattcgatctacagccatcatatctctcaacccactcgtcccatcctggcaacttcttcttcgttctccgtgcctctgagttcatcgggtctcgtcctggcgctcagtagtgatagcagtaaccataacacgccaatcaagactagatctccgcgcactccaaagttggatttgtcgagcagacgatcctatccagaaagtcctctagactcgcgtaatcgtataattcatccagatatggtcgatatcatggcagaatggggtggtatcggaaaaggcaaagagagggtcaggtcagagatcgaggagcagagtatgcgggagcttcatccgaccagagagaatgacagactggttccacaacccatcatcgttccacagaggggaatcaagatagctggatttccgatcgtgtttgaagatgttctgaaaacatctgtaggaagagaaaaagtcctggtaaggtctccgtgatcgactgatctctgttgatgatcatctgtcgtatgctgattctcttttatctgggtcttaaaatgcgtagaaaatcgtacaatacacaatcaagctttacctgtacctacgattttttcgacccaggaagaggccgactgatttagatgttcgtctaaaggcgcttcaggatggactagctatctctcggttcgtttcctcctctcgatgcgtttggatgacagggcgactctaccaggaatgctttcttctcatctctgacattttgtattctcttcagtcgaacattctacttttttggcacattgagccctttcctccgactcgcccgatcagctccgtctaatcagtttcattttcaagacctgatgggcgttctatcgggtgcatcggacgagatttattcgttccatcgattagggttcgtcgggattgaatggggagagagatcaaacaaatgggtcaagttcgtcctcctcttacctgatctgagctgttaaaccataactgaatttcactctcttttcatgtcgattctagcaatctttggctcttgatgacattgattggcctatcaaattactcgatatctactccttcgctcaccagaaggattatctcccttgaaagttcactaagcgatccaaatctcgatgaacagatgagagaagagattgaacgcctgcaaaaggagagagacatggaaagatggtcgactttgaaactttgtgagtgggacgtgtggcgcatctctcttgtttggcaagtccacgactgattcatgtacgcatccatcactatctatcgcgcacgtacatattcagggttcgaccttgtgttcgtgtcgtatgaagtttttggatggaagtcgttgaagaatccgttacagatcctatcaggttttggctcagccctcgtagcgttcgtattgactcccctactttctcaagaagagcgctcgtttttcgtcataaaaatgctgatggtcctcatgagtaattcatttaccgaacagatttaagaaaatctatgtggctcatcaatccaaattcatttcgggataagaaaggcacgcctcaatctgcctgggtccatatcggacacctcgattaagccagatcgttgtatattaactccttgtaaaatctgtacgagacttagttgtagttcctagttattccacttcggcctgacgagcataggcgttccagtgatgtattagggggaaattacatttaattgttactgctgcttgccgatgatcggagcattttgatcacacgttttccacgctttgcctgttcaccttcaactttgagcgcgtcttttgccgttcccattaggtcctgtttgaccgatcgagttacgccagtaattgcaagatcgtagaatgtaatagtttctgattgagttaaggttgaggcaaagtacgaggcagagcgagaaaagactgaccgctcgagcgttgggggctttgatactggataagtaggccaaggcaattgggaagtatttcgatggaagctaaaaagaaatcatacgtaggagtaattagtatggccttctgcatagcatgcatcgtacaggcaagggggtctagagatataaactcacctggacatcatcacatactcgtcgaattaaccacgatctacaagaataaattcaggatgcataatggtatcagcgcacgttaattttctctcaatatttttatgcagagaaacgaagatgactgactctctggctttgttgaaagtccatcgctcattgctgactccgtctcccttctttgcctttcctaaacgctcctgctttttcttctgtgcgtactgcttagcggtaagttcaaactttgcctcggccggggtgtaatccgattgaaacaggtttccagattggatggccgagtaaggatccaacggcagagggtgagcagatttcatagatttcttggggggcgcactgatcggccggtagatgggagaggggttaaacttgagatacagagttgcataaacgagagctgataggcagaggggttagtatcaggaccagatataagaatggagaaagcaaagggagaagagagtgcaagagaagaacctacccagacgagctccttctttcagagtggtatcggcttcgatatcttctttcgtaggggttggctcggaatcctcctcatcctcctcatcctcatcttcatcctcatcttcctcgccttcttcttcgacctgatcaaccgttgcttcacatacagaagcagccgaaacctcggccactcccgaggcctcttcatcgtcctgcccttcttgtccttcagccgaagcttcttccgagtcaacagcagcaacaggagcaggggcaagagcggcagcagtagcaacagccgcggccttggcgtcctctctagctttctcggcctggtcccgctgcttcttctgacgcttcttctcagcccccgtcaacttcttcttggtcgctggttctgaagtcggaccagaactgaaatcttcggcgtcctccctctttcgcttctcgggctgagccctatttaggttagtcgacttggagggcatgctgtttgaatgtgtgtgtgtgtatacttgtacttgatggctgtatacaagtcgtctatgagagagctggttgaaatatttcggccagcagagaaatcgtgcttagtcagctagtcaagcttactttagacgcctcctacttccattccttctctcgttcaatcaaccatcctataccctgtgaagagagtgagagaatggcccatcagcagcatcaaccgaactagtgagtcggacatacatagcttttcgatccaaagaagtaatagctcatcggttttccgctcacttagcatcccgcctcccccaccaacacttccaggtatgcaccagatgccacctcctcaatttggtgtccctctgccccctacatcatcatctttcatgggtcctcctccgctcccaccaggatggactgagcacatcggtgagtctagctgctcacgtctttttcttgcagaatgaaatctgactttatcgacaaatcacttatggtcatgtctgattgctcatgacgtaacagcccaaggaggaaccccctattggtacaacgcctcgacgaatcagtcggtctggacgcgtccactgccttcatatcctcccccaaactacagtgtacctccccctggctatccagcctttcctcctccttcctcccttcagcagccaaccgcttcatcttccaataccgatggcgatggcgatggcggaaagaaaaagaagaaaaagttcaagtccaagacgatcatagagggcacaaaatggacgcgaatcgaaacgctcgaaggggatgtgttttatcttgacaaagagagcaaggaaagtgtttgggaagtgccagaagaaatcaaggtacgtcgattcatttcgcgaggagagtgagacttctttggttttgatgaaactgacttttgaagatgcactaaacacggtactgtctggcgcgaaccgttttatgataggagcaagtagccgaactagaagctgctgagaaagctcgactagctgagattgaagctgccgaaactgcccgcttagcagagaagaaagcagaggaagaacgcgtcgctcagacagagatcgagcgcatccgagcagagttagcggcttccaccgccgactttaactcgaggaaacggaaggtctcaccaacggaagacgaaccaacagctgaaactaagcagcccaagttgaaatcgattccgactggcccttcgatcgctaagaaggcaaatccggaaccagaagtggatattgatttgctttcaaacatgcacaac

SEQ ID NO: 2383 - DNA, 16867 bp, Xanthophyllomyces dendrorhous
gctttcaaacatgcacaaccaggagagtgactctgaaactgacgagccgactggggatggggaggatggggagggagaacaagacggaattgggcctcaatcggccgaagatgaagaagcttggcagagggctgtggctgccgagatgggaattgaatatcttagtccggaagataggatcaagaaagaaagagaggagaaggaaaagacgaaacgggacgaaaaagagaagctagaaaaggacgaagaagaagcgagaagcaaagtctttagcacaagaggaaagatcgagatgaccgtcgaagaaggtcgagctcttttcaaggttcgtgttgataaaaaaaaatctttctcttcccgtgcgttagaatcttgtcgtgctgatttgttgtctttcgaaatatctctatcaatttcctttatagactctactttacgagaaagaggtttcccctgtagcgccttgggagacatccctccctcatttcatcaacgacccgcgttatgtcctgctatcctcactcaaagacaggaaggaagtgtttgaagagtattgcaaggaaaaggcccgagctattcgtcaagctaaacttgctgctcagcaacagtcatcgaacacgtcaactgcatcggaggagacagagagaaagcttagtccagaagaagcttacagggcgctattgaagaaggaagtcaaaagcacgcgaactaggtgggaagagttccgaaaggggtggaaaaaagacagaagattctttgcgttcggaagggatgacagggagagagaaaaggctttcaaatcatggttgagagaactgggagagggtgagtctttggactttttcctgtatcattttgagttgagtagaacgagagctgatcactagagactttgttttatatttttagttaaacgggcagctgtcaagaaagcggaggaagatttctttgcgctattggctgaatctagtgacctcggacccgattcctcatggaaagatgtgcggctcttcattatttcttcgaccatgtgtacatcgtgtgatgtccattgttctgcagacttacctatatctttgcatcatttgtttctatgatttgacggaactatcccaggtcaagaggaaatttgagcgagacccgcgatacgatgctgttgggtcatcctcattacgagaggaactcttccagtcattcctgaaacgaccttccaagcagacgaccagcgctgagtccaaatcttcgtcggcacctcttacggcagctgaattggaagctcaaaaggcaaaagataaaaaagaacgagcggaagctagtctgagggagcgggaagagaaagtcagggctcagcagggaaagatcaggcttgagaccggtagagctagagggatggttgggagggaagaagcggagagggagttcggaagcttactggtagataccgttaaggagcatgatgtgagttctggatgacccgatctgacttgagcgaatcatgtttcttaccgaacgtttcttttgtatcaggcgtcatggtctcactatgtacctgtcttggaaaaagatgcccggtttaattctccaagtctcaacttgggggacaaacaccgactattcaccacccatctcgccacgctcgaatccaaacgatttgctgcgcttcacgcccttttcctcgctcactcgcccttgctccagacatcgttccaggaaatctacgctcccatttcgggcgagtttgcggtaacaaggttaaacctgacggcagaccaattagaggatgagtacgatcgttggtctcggacgaggttcgaccgagctagagctgaactgaacgagcttctgaaagagaacgctttcgttgggttctgggctgggctaaagaacaaggaggagtctaaaaaagagaaggcgatcgggttagaggaaggatacgaggaggacgaggaggacgaggagggtgatgaaggcggtggaaaggccaatctgaaggagatggcaagtaagatcgacttgagggagatcgaatcggttctcaaggttcgttgaactcttccctttctttcctctcacgatccgaatttagctcaatcacttcattatatatatattttgacttagcacgaccggaggtatcgactgtttgatcatctcccagaggagcgagagagatggatcaaggtatgtgtttgcgcttttgatacctcccacaggcttatgtactcaacaactcgatgtcttgtttcctcccttaggaacatatctctacgttggttgcgcccggtgcttctgtccatgtgaatcactcatagggcaaatcagtagagaagagcaagatagggatgggcggactagtacaaaatgaagaatacaatgtcgcgtacttgttttagccccttttttctttagccccttgttttagactgatctgtgacaaacaggggtaaaatcctagagacgaacaccttctctgctttctttcactttattagccctgaccatcattccttctcgcttgtttatcactttcttctgcgtctcgttcattttgtcttctcataccatatcccccatcgacattcgttccgatactcattcagtattcgctcgctcgcttctgtggtcattttcgttgagaccaaaattcgaccttcacccctctaacagcacctataatcgcctcacgttatttcgtcctatctttcggtttctttgacttcatcagtacccctttctgtgaacaatgtctctcaaattctatgctcatgctcatgaccatgaccaccgacgccaaagaagaggatttcagctgtacgattctgcatcttgtaagataaattcattcatgttcattataataaatatcatcattcgatatatagaaggctttctagtcaataatttgaacgttaggagagaagtctaaaaattcgggattaatcaaaacaacgaaagggacgctaacttcaatctttttctggtctcctttgtattcaattactgtctcgaacgagttagcaaccccttctgcggttatcaccacggcctccgttactctgcctagcactggatcaaccacgccgactgccttagcacttaccactgtcagcctctactctcctctcagcacttccggaacagaaactcatctcatttgcttcttgtgtgtataatcctccgatggacttgatttagactactgctgccgctattactacgtccggtgctccacctagcgcggccctgcttacatcaacggctttaacctccgctcaatcggccatagtttcaagcagtatatcaacctcgtatgctaacatccctccagccagcaatgatagtgagttacagacgtgtacaacctgcctacacataatcctagcttttccaagctaatcgcctttgttcgagaaaccatcagcgatgacaaaggcgagaataacagctatcgaaacggggatgtcaactgcgctgctcgctactcaagaggcagatacttcatcaacaacaactgtgataatgactcagtcgtcatcaaaagtgaaaaaatccagtacttcctctcgttcctcatccgcgacgactcggttaagttcggccagtagcagtgcatcgacagcaatagccaatgctgacagctcctcctctacctcgtgcgaccactttgctttctttgatgatttttgtccacctctcaagatccagtgactgatctttgccccagttgaactgtttgttttagactcggcgtaggatcgattgctggtatcgttgccgccctgtgcgtgttcctgcttgttattggctgtttctttgtcattcgatcgaacgctcgtcagaagcgaaaacgggcggtcgaggttcgttctatctacttatcaaggttgcacatcgtctagactgtccatattgtatttaaacactcacatgtacccttccttttgtgattcactggtgatccgtttggtcctttgacctgttggacaggcctacgcaccctattcggactggaataatggcagaggatcgacattcgaacttcaggacgaggacagtggctcgactggaggaatgattgagcgcaagccgtcttggagagatcaagggcgacctcgagatatgggaggaccccgaccgcctacgatgattgaaagtgggagagctgggatgggtgctattggatctctcgggcgagtgtacgtgatatctgtcgtgcctttctttcatatgaaactgacatgcgctctattttgtgggaaaatgacagtccatctacttcgacaccagtccctcaactctccaaatctgctcagccccaaacttctgatacgaccgttccttcattctctcccggacaaattatccagcctcttttcactgctggcctagctcctcttcctccggtagctatctcttctacttacggtgagccaggaccaaacgacggcacaagatgggaagcacaaggaggagtgggaactggaatgggttaccccgtcggagcggcagggtacgttcaacaacgacagcaacaaccatcaccgcaacaccaggcctatacaaacgggccgatgtaccctcattcccatccgttatctcactctttgcagccgacgctgtcgtctcaacaaccgtatccctatcaaaaccagcaaccattcacagtccagtcaacggtcggccaagtccaaatgcaacagccttcaacgaacaggcagacgatgttcaatccggatgacgcgtacggaggcatgtagcaagaccttctcttcgtccccggattgccttcctatgtgatgtgtgatgtatgatgagtgttgtgcctatctcttaatcttttttctctcataccctacctacatattcttaacactgttccatagtaggcgacctccctctgctggccaaaagggagtcttcatcaaagcgttttacccaacgtggcctttcgcatctcctcctcttctaattccattctttcttgcttactctgataatccacttgctctaccctgtaggaagagagtagacgatccaaccacactgcgcttgctcctggtcagcctgttcctatcttgtcttttctgttctcatcattccgaacctgcttaatgttgccgctatcattatcgctatcaatatacccatggacgatgttatactatactcggttatttccgaagtccatcgtccgtaaagacccgacaagcccgaaccggcatcttccgagacttcacgtgttctgttcctgtttctctttattcctcttctgtcgtctgctcttccataaaaccgtcatcgtacatcgtgcacatccatctcttgctcccgtcgctgcctccttctctcatattgtgctccccttgagaatacgggaaaggaagagaagataaaagaaaggaaacgaagagagaaaaaaaagagaagaagaaaaagagccatgttcctccctcctccacctccactcccgtcagcactcgtgtcgacgctgctctcctacctagtacccaccccaaacccaccgattccaccagacctcatgtcaatagatctccttcaacgccatcagttccttcctccgccgttagacgagccgatcgcccatttcactcctatgtctagcaataccaagcaaggagctgaaatcttgcagatgacgggagatcttgtcgaggaggtcgggcggttaatgggaggcggcgaggtaaatcccttctcctggatattttatcgaggacgtttgttcacgtctatgtcgtggtgtgcttcatatcggcctttgctgacctacaacatttgaacctctggttgctgatactctttccactataagcaccctgtgttgacagcgagctataagcttccagactcacagacacttcaagctcggattcttctatatgcaacccattcgaatcagccttcacttgagattagattcgtatatgagtctgtcgagcgtggatggaggttccacgagcttcggaacatatcgaatgccccacctggcgatcaagttggttgggtcgtcgatcttgaccaggcggcatcttctcggggacagctggccacgtcagaacagggcgaccaggatgatggcgtggaagatgacggggatggcgatgaagaaggtgcagatgacttctggggtggctacgattcacccaaacaggacgactcattccctacgtcacctgagggtaccgctaatggtagtttgcctggagagttagaaaggaaacagtcgtcggcttcgttggacgactactggactagatacgatggagttgaagacggattggcacccaccgcccctccgacacctcatacacatgaccaacctgaagatcctgctcaatcgatcgacaccaacctgttctctttaaattcttcacccagtaccgattcttgcgcagtcgcaaagccttccgattcagttactcatcgaaggacatcatcgacggaggaagatcgagttatttatggaacgggcggagagacgcctataggctggacgccagttcatggaatgacacctgctaccgaatttgaacctgctcctcctacgtctgccacgcaaggctggtatgcccgaggcgctaaacgcgcaagttatggctttccctcatataccgaggaagaaggaacgtaccctaaatttcctgcccctcctttcaaaggtcttactcctgcgtcagagacgttcgagctaccaaacgttgatcatacatatgaagctgattcgcctgaggccgaggaagacgcaaaggtatctgggtccacagttccttccgatccacctccgttcatcggtcgaccaccctccagcaaaatgcaggtctcaccagaccgatcactctctcttttgatatcttcctctgtcacgacaaatgccctacagacccaagcgcttcggtcatccttacaatccatccttcaaatgcatgttctttccactcggaatgagctaacggccactcaggctgccgaagagtttgcacagatcgcgaggcaagtcgttctcgaagctagtacttccagtggaaattcagcaggccaggagaaggagaaagggatcttccaaggattcgcgggatgggttgggaaacagttgggaggaggggatggcgtggatagcgatgagaacacgccggttgaccgaaaattgggcgaatcgggatcgaaacttttccattaatccttttcatctttctcgtgctcttgttttttctacatgctccgattgataccttttgtttgttcagaccgttgtataactaaacgcatatgtttgtatgatgtcacctcgtggttcctcttgaatcaccatgttctgctctagctgctacctttgtgcttgtgccttcaaaaatcagccatatcatattatctccactagatcgttctatgtatctcgcttcttctgcttcatctctacgtgcgtatacattgattcagctactttgcacgatgaaggagagaaggaagatcacatatggataaaaagatagaaagaggaatatacagtcgacttgcttctaattaggaaagccggaaggagtgcgaatgtaagaaggagggtggttattaaaaagtcagagaatattgacatgggaccaagttcaggcaggtgatgttgacgtaggtcgtggtacaagcagaaaacatagctggaaagaatgaaggagagaatgccagagaacagatcgatggttggtattgatgggatgtttggaataattgatacacagaagaagtaaagatatggtaaggacgtcagagaggaagtacaagaagaaaatacgaagtatcccataaaacaaaggttatcatttttcccattttccctttatggaacccaacaagctcgacctagcgcctaataaagacccgacctttcgtctcgaagctaccgattctgacgagctgctatttgatgagactgcagatgccttcctcttcagactggtgacggaagaaccagatcctcccttggcagtgctctgttgagattcatccttggcaaagtcgaggagccgttgacgtttggtagaattagacgatgagttccgtctgttgttgggatcggagtgcgagtaaggattagactcaatctaaggagcgccattacgaaaaatgaagagtacaaggaaatatcagtatgcgacaagatcggaagttctggaagagcgagtgatcacgaagatagcaaagacgaacagagtattcgtcttcgtgttgaacaggctgaggttggggtcgaggtcgaacaggttgtcttcgaatgttggtcacgtttccctggctgtcaaactcatcttcctcatccagatagatcggcaactcgtccttttcctcgtcctgcataggttcaggtgaggcaaccacacgttgaccgggtcgtttcaaggtctacgattaatcgagcataaagcgaagaaggtcagcgcaagaatagacaagcggtctttctttgaggcgggtgacaaaaaaacatactttaatacttgagtcctttctgggttttccgatgccaagcgaatctccatagtgatgctcatcttcggacgcttcatcttcacctccggacatgagtccatcgtaagctgcatcatccttccaggtatcttggtaaagactggcaaacgcttcggtctcaggctcggccgctgatcgacagagaaatcaaggtattcagttagacaagagcgtgttaggtcatgtcaaaccagtattgaaaagaactgaccgagggcatctagtggatcaagcctatcaagttttcgcttccgcctcaactcctttctcatagctgacgttccaaaggactcttcatcttcagagtcatctcccagatcggctccatctttgtgcttctttcgcaatttaccggcagcaacatcctgtgcttgttgtaaccggagggcttcatctgctttggcttgttgtctgtgattattccaaggttaatatgaaacgttaacaagagaaatgaagagaagcaacatgggaatgatgacgtgcctgagaagttcttgtcgagcttcgtcgttcagtcttcgctgtttgtccgtcatctcctcatcattgaccaatccttcaacaatctcatcaggatcatcgtcttcctcttcatcgccatcgccggcagcgccaaacttgaatccaaatccgtctccctcatcgtctgattcgacggcttcggcttcaaagaattccttggcaagctccttgttcctctttgaccgatcacttttctgtttatccagctttggcttggaaggtacacgcttgataggtgaactcaagagttcctgatcgattttagagatcaaaacatcctcaacgtcctcctcctcggcctgggtaagaggcatatcctgacgccgaaccaaccgacgaacagtcgtgttcaacgggctggatagatcagcaggttgtgtgaggagagctggcagatgggatgatattcgggatggcgacgcgggcgtcttggcggaggatgtttcccaaggatcggtgtgcgatttgaaaggagtatccagagtaggcgaatcagtcatataggtagaaggcttatgttgtgtgaaaaatctgaattggtcgagagagaactagatcagcatagcggcattttactcgtagatagtggaaaacaatgcaacacgctgagtcaacaaggaaaacaacacatacccctctttgttaacataacgttgaggagcctgggtaggttcgcgcacttcttctggaagattgttaagagccacaatttcgacgtctcgttcggcttgggtgttggaaacgctgacagagggcaaatacgatgcttgagggacaagaacgctctcgttctttctaagctgatcgagcgctccgacaacaggctaaggaagaagaaggaaagtccagcatgaattcaacacgagaccgagtggcagaataggatcaagaaagtcatactttgtcatgtgcgataggagcctggctatctccatagaactgcgagaatccactatcctctccgcccagatcgagcccagtgttttctcctcctagatcaaacccatccatgctcttggatgattctccagaaatctctgtagggacttgagtggtagtgaacagctggctgaagccaccttggccgaatccttgcgctgcctgagagggttcggatgcttgggtgttttgaaacagttgactgaaaccaccctctccgaagctacctcctccgttttgagattcgtcagagacttcggtaggagcctgggtgttctgaaacaattggctaaatccaccttcgcctccgaaactctcctcgacccctctaactccgaacgaggcttcaggagcgacatcagaatcatgtgtttcggtgatagtaggcacaagatcggaatctttgaatgaaccatcattgctgtatcctagagagggaccggaggaggttgcttggatcgaaggcggaagagacttggcctgtgcactccctggggttggaaacttcttgctgtcctcgttgtcgtcatcctcctcgtcgtcgttgaacttaagaacgttttggcgctttctcgatcttggggccttgggtaaatcgtcttcgtcctcatcttcgtcgtctgatacttgcctcgaaagctgagaggacggaggcggtcgaagcgagcccagctcatcaatagcctcatcgaggttggcctcgtgagaagaagaagaggtctccttgttgctctccatcttgacggtcttgtggttgcctggatctgactcaggttcgagtgatctcctagaaatctcatcctcttcgtccaccagaacacgtcttgacttgattggccgaggtgctggattgagagtttcatccccttcgtcttcgtcctcaacctcggtatcgacttcggagtccgtttgggttggggtctcatcattgttcgatccacctcctagactccagtctttatcttctgcatcgtctacatcgccctcgtcttcactcatatccttcggcactcccttgatgattctgctttcgaccttcttcttgagtccgtctatgtccaactcttgtttttccacgatcgttctcccccgtccaaactttgcttctttcgccattcgttcctcccgagcacgctgattagcttcctccagaagtttctggttgagcatctgttgagtaaccgccacattgtggtggtgcttgactttttggccagataacgtacggatagcagcgggtgtcgtaccatggccgaacgtgcgccctgcgtatgtcacttgagattctgtcggtgctagcgaagtatgtcgtttgtctctcggagggcccacccccgaaggcgtaggcgtctgtccgcgcgataagagagagacgtaacggtccttgtctgcaggtttggccgtgaagatcgtgttggatgtcttgagggcggccgctgtgtcttcggtagagacgggttcgatctctacaccatcctgctcgatctcgccttctttctttactagctcgacgtcgttcaatccgcccttttgtttctccaagaatttcagcttggcctgcctcagcctctcgaagtttgctcgttggacccgctcttcctcctcagccgctttctgaagttgactctcctcgttcagtcgacgtttccgatcttcttcggtagccagggcagcaactcttttggccgcgtcttgagcgaggatcttgtctacgtcttggaagtcgtcgtccgagtccgccacagagtcggttatagaaagcatctcacttaatgctcgtggttttgaagatataggctgagactctgagggaggagaggtaggtaggatggagtcttcggacatcaactctttcggctcggccgtcggcgcacgatgagagttcgtcaagctagagctgccatctgtagtgtcaagagatatttgccggtcaggaagtttgaattgaggggtcatgttcaaaggttttctacatatcatcaaagatagaggtgatgcggcctaggttagcaaaaggacgtttgtcaaagacgactagagatgaattaaaaggagacgtactgaggttttagtgcgcgctccttcttttctttactcattcttgagaggaagagctccattccttgggggcgagcctcaggctttgtaattgcggtcttacgttctggtatatggaagaaaaaacatttgaagaacctcgattctgaatgagcaagtcataggtcacggaaggaaatcggcaagatcaacaacaaagacaaacctcgattcattctcgctctctccttgttcatctcttcgagctctttcttggtcagacccttcaaatagaaagacatgtccagtcagcgttgatcatcaacagcgcaagacgtttcttctaaagatagaaaagagagggcgtaaacgaaccttccttgtaggtcccatcatgagcgaactttcatcttcattctcctcgccgccgtcgccatagttctctagctctaacccatgatgaccgtcttgtctctcctttcccttatccgggtttactggcgagcttataaactcatcgatatcttctgatgacttctgatctgaagaggttttctcaatagaccttcgttttctgaaaacggtcttcacaggaacaggcgtcgatccctgtggaccggtcggatcttcctcgtctgaaaagacaagacgtgcgcgagaggttatcggctcgggagatcggaggggtgaagaaggagaagaagtcgggacttgagatctgaatgaacggcctcgatgtttggctttgataggtcttgcagcgggcggagttgatgaatcaccggtctcggcgtcgtccgagtcttggacaacatgccgtcgatgtgaagtcgtggaagcgacgcgaaccggataggtttcgtcctcgtcgtcatctccgttagctttatctcccgatgtgtcagaagagggtgcggtgacagaagatccggacacaagagttcgggactgagacgttggtggaagcgaggagagagacgtcagggatgaagttaggacaatagcaggagaggggaccgcaacaacgggtgtcttgacgctgagggctgaatgtacaggaggtttctttgttggaacaagtgccggtacagttatagcagatcgaggacgaccgtagacacctcgtttgataggctgcttcttctcggctcctagtatgggttttgttggttttctcaccgccgcctcctccgttgtctcacctctggcctctcgctgcatctctctaaccatccgatctagatcatctacgtcctcctcggaatcttcctcgtcatactctgccaagagatccttgtagttccctctgatccccttgatgggagacatgatggagctctccgagtccgaatccgaatcgagagtgccggttctggaaagagagtgtgtcgtgtctgacgaaagaacggtgctagatgtgtgcgcgtttatggatgtagcctcggaggatgggaacacagagtttacggtgaccgatgcggtatctgacgtagggacagaacccgtatgttttctcgaatagcctaccatgatggggagagagaacgcctagagcaaggcctgatggagatgtgtgggttcgattgtgtgtgtgtgtgtgtgtgtgtgcgtaggagacgttggccagaagtaattagttggatgagccaacaataaccgacgcgtcgagacgcgacgcgtgagatcgtttgacgcatcatcattataccatccggaatcatgaccgtcattgcgcacaggtgagaactcaggatcgaatcaagcaagcagctggggtatacagtgcttttggatataaaaaagaatgtcaagcaaacagacgataaattcggtcgacgagaaggaaggtgcgaggtcgaaaatgaaagtcgagaccagaggaggaagaagagaacagagtagatcaatcagtagagagacaacgagagagtagcatacaagcagatggaaagaatggaaaggctatagaggatagtatgacgagactgatccaaaaaggggcgttgggaagacgaaaggatatcacgagcggccgtcaggagggtcgttaggaaagaaggcgacaaggcaatacagagaagagacgctttgtattagggaaaggcatcagagaagggcattagaaacgcattagaaacgaattagaaatacattagaggcattagaaacgaattagaaatacattagaggcattagaaaaaggcactaggaaaccccgcgggagaaaagcattaggaaaagacagcagacacagtacaaagaaagactagaaaaagaagaaacgttcgaacgagacggcaatagaaatcgattacaaataaagactacaaaattcagcgagagccattagagaaaacgtcgagcgaggtcagacagccgccagcaaaagtcagggccgtcaatccgccctgacttttttgtcgattcttgctctctgggcaattagcagacacgcgtgagaaagcccactacggaaaacttcaagctacaccttcaagatggtacgttcctaatgtctttgttggtcgacagacctggatgggatgtcgtatagaatgggatgttgaaagagacatttcagcgtgcatggacgtaagaagagcgataggctgacctgtctgaacacgtttcccttgactttgatagggatgttagtacgatttttcttctctttgggccgacaaacttttgatcgggcatgatggatcaacgagatgatgtgctggagagcctttgaacagaggagcagtcgagacgggtgtgactggatcagccgcatgggaatggatgctggatagacttgggatacaatggggagccaaggacagaaatcttcaacatacagaacgctgaccaccgaattccctctttcctcctctttgtcttcctgccaaaccccgtactcggcttcacaccaatcgctacgaaacatcgtccaacttgaactctcattctcatcctcatctccaatcgaccctccgtcttttctgacaatctttccaattcctaccgcttctaaaccacgccggttattccttcccccacgcacacgaaatcctatcaaacgtccacttttaaacagctaacaagcctcgtggattgctcgccgcccgaaagctccgaaccagccgaagggagaaccgatgggtatgttttctctggtgacggctgcttgaccacggaatctaagaccacttttctgatcaccacgacaaatcatttttgttcatctttttattctaacactctccgtccttcatcctcgtctgctcttccaaaaactgttcattttttttgcgggctggatggaatccgttgctttgttttgggtcggagggattttaacaggccgataagtcctacaagaagcgagctctcggaaacatctacaagacctcccccaccggaggatcttcccacgccaagggaatcgtgcttgagaaggtcggagttgaggccaagcagcccaactctgccatccgaaagtgcgtccgagtccagctcatcaagaacggaaagaaggtcaccgctttcgttcccaacgatggttgcctcgtgagtaccgcatctctttgctcctgcatgttggatcgattagatcacagtgttcctgttaggggagctcagtaggttcatcttttagaatggtcggctaatgcttctctgtgatttcaacgttcagaacttccttgatgagaacgacgaggttcttatctccggtttcggtcgacgaggaaaggctaagggagatattcccggagtccgattcaaggtcgtcaaggtttccggtgtcggtctcctcgctctctggaaggagaagaaggttcgttctgacccgtaagattaagctgtacttgaaacatcgctgacgagctttctttttaaccctgcgtcgaatctttaggagaagccccgatcgtaaattccacgagcggacctctcagtggcttgtcgatatgataaatgtctccaatgcactttcgacataacacattctcatcaacgcttctggcacaatcttttgacacatgcttgactaagaatgacttgaagatggcatacatacatcaatggaactcggctaacagtctagcttgaacaaacatccttcaccgcacttctctgcccttccattgtcaatatgcatattctatcaaacaaagattaggaagtctgagtgctgctgtagagctgttgtagcgcgtaaatctttctactcgaccaatttccttgccttgaaacttctgtgccgtctccatctgtgtccgacaccaaacagaacgaccatgtacgctcagacatgatctgcgctactcactcagccgacattatctaaagaggttgaactcactagtttcttactactgtaaaacgaagagcttcaaccctcgaaagcccgacttgactgtccggttagtaaccggttgatctttccttgttgggattcatcctcaaacgtaaacgacacaacctcctttcgctccatccatccatcatccagattcgtcgtgcttgtgatctatatctgttcggtctactcttggtccaaacagtttacatgccagaacccaacccaccatcagctgcaacctcggttccacctcgaacgggaggtcttttaaaccctaattcatcgatagctactccttcttctggttcggctctggcgggatctgcatccaacggtatcgctactacttcagccggaccgagtagtgctcctttcgcatctctaaaagctaagccggtagctacagccggactttatacctctgaaagcgttcgggtaggttggcttgatttcgttcatgttctctccccccccccc

SEQ ID NO: 2384 - DNA, 42281 bp, Xanthophyllomyces dendrorhous
ccccccccccccttcttctgcgtaaagttagatcgaaactgaacgcgacgtgctttgcctctacgtgtttgtgatggaaccccttcttttctccctttgggctttttcttcattgacatggacgaatgaactgatggactatcgggttcctagttatcggccgagtcgatagggattgccaagttggatgaaagcgtagcggttgcgttagctggagacgtagagttcagattacatcaagtgatcgaggtgcgtcactttctttctttatatcctcatcttgccgttttcttgatgagaaatgcataggaggaaggccttgtctgacctgtgttatgttgatccgtgtgtctttgttctacctggaaacgtctgtctgattttaggaagcgcacaagtttatgaaacattcaaagcgacagacgatgctcccgtccgatgtgaataatgctctggaaatattgaacgttgaagtatgtttcttcctctttgcaaagactttgctttgaagttttccctcattccagcttcatagatatctaactatgcgagcatatgtaatctcttgcatcctctctatagccaatctacggacatctcccgttaccttcttcatcccacccgacgttcgctcctctccgagcatccgaggtggcttcctctttatccaaaaacaaatcatctgccaacgcttcgtccactacggttgaccaattgtactacctccaagatcaagagatcgattttgcaaaacttctccaggaacgaccgccaggtctagtcaacggaggcgtccgctggacggcccattggttagctgtggaaggcatcatgcctcgtgtgccagagaacgtggcgcctgaccatcacgcctacagggtaaatcctcaactgtccagtgaagatccgtcggcgatggccaatggtgtatctggctcgagcgcgacgacggctggtggaggatcaagcgctggaatcgtgaatggtggtcaaatcccaatcaacaagacgaaaccgaacttgtctcaggaactgcagctctacttctctaggttgaccaaagcgctcttgccgatggatacgggccttccagctggagcggggactggtgcggaaggcgaagcgccggctccagtaccggtgcaaactcatccacctgctgggacaacgggtgaactgactgatctggagagagctcggttggctgcgttggcgagtctgagaggcgatactgggctacaagggctggtggtataccttgtcaggtggatcggtgagagagtacgtcgtctccgagtcttacacgtctatttcttggtttcttctacatcgataacatcatgaccgagctgaccggatgggctttctactcgaatctaggtcatccaaaatcttggaaacttgctacagctatcatatgtgctagatgctatcaacgcaatcttggctaaccagactctgttcctagagcctttcgtgagtctttgggctttgtcattcttcgcaaacaacctctgaataatgcactgaatgttatctcatcttcttttcacctcattcatttgtggctaatagcttcaccaactcttaccccctctgttgacgcctcttcttacatacccgctctaccagcaccatccgaccacgcctgaaggcaaaccgatcagtcatccatccgcttcggacatccgtcgactagcaggtcaagtgctccaggtgttggtgaacgagtttggaaacgtctatgagacccttgtccctcgttcgtatctctcttctttgactttccctccttttgtttcctcgctcatgatttctgttcttctgccccttcctgacccacgagctttccttggtattctatgtaggtttaactaaaactcttctccggtctcttgcgcctccgaacccacccggtcgtgtggaaggtgctctgctgggactggcagccatcgggaaagagggtctccggaaaggattatggggtgatatcgggttccggacatcgaaatctcggactcgagaacctggtggtgtgggtgtcaaggcatggggagaagtttgggagcgagaaccgtggagaccagaagagagagatgccgttattcgtgctggtgttgtacgttcccttgcgtctttcagcactatttatttctttgaaccaggcttctttattgatcgtttgtccgtgcgtgtatgtttggctctcaggctacgctgtcggttcttctcccaactccccgcccacctcccatgccgttgacggacccaaactttattaacacgctaacgatcatcttcggaccaacgttcgctcctatccttgctaccgaccagtggctgtccgaaggactggtcaacattgtaagcagtgctcgtgatcgagcggaccaggcaaagaacgagacggacggaaatgaggatgagctcatcgtcaatctgaggacgtctcgacagcaaccttatcgaccaacgcaacctcaaccgcatcagagtcttccacctctgccttctgttcaaaccggtggagatcaaacagagaaggatgcggacggggatgaagatatggacgaggatatggaagagatcaactagactacactgatgcggcgatgatgacaatgtatgaatgatgatgttatgaaactcggagccgaaatcttggaaaaatcaccgccgggtaaagaaattcagcgtagccgcctaacaagctatccgagaattctttccccttctgcccgtctcgccccaacgtcccattcatctcaacagtttttccccctcccccgtcgcggacgggttcaaaagagatgggcagagggatcagtttcttctttatcgattgaactatcatcccatcctcgtttgtcgttcatatactagtaagattctcacagccatgaccttgttgagccctcccaagacgtatcttttcaaggagattgaaggccattgctccggtggatgttacatcgatgtctatctaccatcggtctctccctccgaaggcgggaagactcccgtaggtaagttggattgttgatcacattcgttgtatctcattgagcccacatccatccgcgcactcacttgttgtcttgtccatgtgttcgttcgaacagcattgttgatccatggcggagctttcatcgtcggagaacgaggagagatacctgatcatcagatcaactatttgttggaaaagggaatcgcagtggttgatgttgattatcggaaagcccctcagtacgtggatctctctgtgttttgatggccgatgcatttgtgttgactgtgtgatggcatctattttgaactacagtgttgggttcgtggagatgattgcggattgtcagagtgcctacgatttcatccgatcggatctgaacgatctgttgaagaaggatggatacgatcagggtgaactcgacaaagacaacattgctttcggcgggtattcgtaaggatgttttctcttttcttcttcttcttcttctgcttgttatcgttcgaatgcacttgcttcgttccacaaaagtctatctgtcagactgatggctcacctctttcttgatctatcagcgccggctcctaccttgctgcaatgctcgttcgtttccttctttctatctagtctgaacatccctacgctccttgctgacgaactctccttctctccatccacaggcattgcaaacaaagccgaaggctctactcctcttctacggtctcttcgacttgttgcagatctcgcccgctccgaaggaggcctacatgttaggatgcaagccggaggagattgcttatatgaaccagcttcgggaccaagagatcgttatcggtgctccgactttgtgagtggatctccatctttatcttcatctttacgtatttctcttatagcctctcctttaattctttgttttgaaccattaattgacaggtcgggttgctgtgtgtgtgcgtgtcgaactatgcagaatgcccgatacgtcggcgaggaaggtttacctgcacgctgtaagtcttcccttacgaaataaatctctccaaggggtggccacctttctctgaacgtgatgctaatcccttgtcctggatgaacttttttttttcgatggatgacatcaaaacacccatctcaaacccacgaaacgttcaccttcagcttttactcgccggttcactcatcgcgaccctgttgcccgctgacttgccagacgatcaagagacccgaacgagcttctcgcccgccttcctagcgacggccgacttcccaccctcgttcttcatcgtcccccagatcgacatgctcgtcccgtgcagtcagtcctggttgtttgccaaacggctcgaagagctcggggtcgaggtgggcaccatgagggtcgacggggcgcctcacgcgtacgatcgaaaggtatgtcggtagcctgtgtgacggccccaagtaagtgagcaaacgagcgagcgatgactgaaactccacctcctttatcttttgccgttgccggatccgatcgatgattggatcgtatagggaggcccacagaacgagttggatggatcgaactggatcaaagggacgttgcccggtttggagttcctcgtggacaagttgggtcgaaagtagaggataagaaagacatattctactttgatcttaatctttgatttctttttttctcctttccctttttctttcttctttcgatagagagcagggaaggaggaaacggaaatggatatagatttgtcgatgtattattctaaatttatcaatggacatcatctacagactcgttgtcgagtagcctgagccctacgcctgactttgtttctttttctttttcaaagcctattttatcctgctttcatcctgtcctttctggttgttctttttgtccatcgtgttctcttttgtatgttctgtctcgttgacgaagaaagaccagggaggttatcggtacattcggataggataacagaaagtgtttccctaagaaatagagagaagaggtaacaagggatatgaacgagacagagaaaagagctcaaagagcaaaaacaacaaggatgaacgcagatggacgacaaagaaggatgagggaagcatgaacgtaggaaagcaaggataaagaaaccaaaaagaaaaaaagaggaaagtcagagacaaaggacctggcacttaggccctggcctcgacagacctcctctccgaggctgctcctcgctgagtcaacgcgctctgaccggagtgaatgtcaacggtagacacgttgtcaaactcgacagagacaacctcagctttgaccttggcaggacccaacaaccggtggaaccttcggagcgcgatctcagctgcgtctagatcggtcaccatcttctttccgtttcggagaacaaccggggctgagccgtcaagaagaccgagctgctcgtttgtccacaacggcttgacctcctcagcagagggtgaaccgacgccggctcgaccaccgatagctgcccaatcggccgttcgcttgagtccaagcttgttgaacacagactcgatcgcacccaaaaggtgggccaactgctcagcggtgtgaccgggggtgggcgtaatcctcaatcgctcctccccaacaggaacggtcgggtagttgattgactgaacgtagattccgtgctcgttgagaagcgtgtccgaggcctgcttggccaggccggcatcaccgacgaggacggggatgatgtgagacggtccaggaacgtaggggatacccttcttatcgagctcagtcttgagagctctggtgttaatctgctggagccttcgatctccgagataggcactctgataggcaacggccgcccgggcacccgccacgtttgccggaggaagcgaggtggtaaagatgaacccagcggcgtaggatcggatgagatcgaccatgtcagcggaaccggcgatgtaaccaccaactccaccccaggctttaccgagggtaccggtgatgatatcgacccgatccataacagacccaggaatagcatggggagagtcaccggcggcgaggtgtgcctcgtaatcaaggtgctcagcgacaccggctcctcggggaccgtacatgccaacggcgtggacctcgtccaggaatgtcaacgctccatacttgtcggccaagtcacaaatggcctcgatcggggcaacactaccacacatagagtacacactctcgaacgcgatgatcttaggggtctctttcgggtacttggcaagctttgcctcgagatcggtcagattgttgtgcttccagatctccttctttgctccagagtgtctgattccctcaatcatggaggcgtggttagatgaatcggagaagtagacacagccgggaagctttgagccgagggtggcgagggtggcgtcgttagcaacgtagcacgaagaaaagacaagagccgagggttttcggtgaagggcggccagttcgtcctcgagtgcaaggtggagagaaccgtttccggcaatgtttcgggttcctcctgcaccgtgaccgtattttgtgagtgttcgcctggggaaaaggaaaggaagataagcaacggaggcgtgtagatgaacagaggggaaaaggagctgtgactgacttcatgatctcaacgaccacagtactcttactcatgccgaggtaatcgttcgagcaccacacatcgacctcatctctggggttggcggtgtgggcaacggggaacttggcagccaatcggttgatgttgttgaagtatcggtaggatctaggagtgaggaagaggaacggagagatggcgatcgattgtcagagaagtgattcatcggatagagcagagtgaaaagagaaagaggaagaagaaaagatactaacttgtccttgtgcttcttgtccagctctttaccatagaaaccctcgtagttgaagctgtccggtgagctggcggcaaccttgtttttattgatggcgtgaacctcggcgacggccttagctgccaggtgggcgtgggggcattttccgccggtaaactggtcggaggcgatcaggacgccttgttgctggagggaaagagaggttgaagggcggggttattgaattagttgaaggtcataacaacatacaacgagggaaatagaaaagggaaggtaacaagacatactcggtgaagttgctcgacatcctcagcggtgacgacgacagtaggtcggctatgagttctgttggcgtaagcatgaatggaacctcgaccaggtgcactctgttgtccagggcatccggtggagaaggatcgagatgaaccagatgggagaggacctccgtttgccttttcgatgaggttgcgaagggagaagggaattaaaaaaagaatagaggaagaaaaaaaaaggagttgagaaaacgaaaccgacgaatgagaggagagtcaataaacaaaggaaaagaattggaaaaaaacggaaattcgggaagagtgagaggaacagtcgagtttagtgtctaccgagagagacggttttcaaaatgggagttgggaacagacgaaatacatgtttgccttggagaaaggcaagacgagtggcaaggcaaaaggaaagggcatttgtatgctgggccgatctcatcggggagaccgattgcaggttgtggtggggggatttctttgactaatttgccctctttgaaaggagggaaaccagcaccaatagctcctccgagcctggatcggaagagaagagagagaacacgcaaagaaaagaagacgaaaggaagaggctaacctgttccaaggcaggacccataacagggcatccgatggcctgagctgtcaaccggttgaatgcgggcgagagcggactaggggttgacgcgaacgatcggagctgggaagtcgatgtcttgctcaagaacgggcagacacctttgaatctggtgaggcaggcagggataggatgcatggtgagagcagacgaggagcagagtgaggatggagaacgagagaaagaaggaagaaagagagaaggaacacgatggatgtgcaagaggaaagaaaaagaaaaaagaaggaagaaaatacatttaaaaaagggacggacaagtgtgtaaattggttgtgactggttacaaaagctcgccggtaattcgtccgtttgatccgtcccgatgatcaggtacgtgtaacctccgaggtacccggccaatcggagcaggcccaggtaggtcggagcaatagattgtggctgtgtggagaccctcatagtcacgtgtggtttacatgtgtcctatgtctcgcctccctattactctgctttgttctctattggcttgagtggtgatgcattggactgctggtggtggtggtggtgggctggtggaactactgctgctgttctctccggtagtgttatctgccactatctgctgctctcttctattatctctctgatgtcttctattggcttgtgtatatgcatgtatgtgtatgtgtgtgtgtgtgtgtgtgcgtgcattttgtccgcttgtttattagatacgtgttgtatcttctctaatgttctgtctattttctttctgtattgtcttttctttttgtctcttcctatgttgttttccaatgtgttgtctcttcaagcccctgtgacttcctcttgctgtcttctaatctcttctttctctctttgtgcgttccttcgagtgttctctccatgtgtatgtatatttattctgttctctctctgtttactctctctgtccattcctccttctgtctctatcgttctacccatccttcttcctatatcttctctatgtttcattctttttctctctctctctttctcacgccaaaaaaatccagaagggttcgggtgtattaaatcatagacatccaattggccaacgcacacacacacacacacacacacacacacacgtctcagagatcgagttctcctgactagtcttcttgtcctgctgacgaaacaaagacggccggtaaacccacacgcacacacctacgcgcacacacacgtcacacgcatatagccggatcggctgaaccaagtcgatcgaccatagctaatgttaccaaggcgttatcaccggttacgctcaacttacctccgtccgagctgactactcccatcatatgggcaaacatggggttcttgaccccaactgacttgttagggttagcccatcggaaatgaccgaaacataggaaaaaagctgatcaatcccatcaaacgattcggatacacaacagaaaaagcacgctgacctcgtctatctattcacccatcatctcaacactcacactttcaagcacctcatgcccggcccagtttcgctctcgccagagagggatagagcttttcttgccaattcgatcgatcgttcacaccaagaacctatcgagggagactttacagttcgttcccttctctctcttagtctttatcttcttcatcgtctatccgctcactttttgtcgctcctatcagatcagagctgtctcggtcgggttgcttggtaagagcttgcctctctccaattgcgatttaaaaactttttgctggactcattcttcctccttcttttccagtcgggtcggtcgtagcgctcagcaacctgtactttgtccgtctttatctctgttcgatccgtttgagctcgcgtcgtcctccattatgacattgccttttcttcctcactctgtttcatccaaccagggtctacaaacaggatggatctcgatgatgtctctccagtcggctcttctcggctttggcatattcaaaattctcccgtcttttctcccgttcaagaaaccattcaccatgcaggaaaacgtggtgatgcaaacaacggccgtcgcgacgtgagcttcttggcgtcttcccgttctctctgttttctcatcgatcctgacgtggatagagacctgctcttgccttcccttgcctttctaccccatcttccagagggacacttcctttggcggccggtttggtcgggatcattcccgccctcgaaatgctcgaagagtctattgacggacagtcagtccatccatcctcgagcctttgctcgaagaagctttctacctaactaacgttttcgtcccgtttcgatcgtcttctatccgcttctctctctttttttttctctcacataacgaagaggaccggttatctttacgttctggcagttgattgcctggagtctcgccgttgcgttctttggcgtctttttagctgcccctctgagaaaacaagtcgtcagtagacttgcccaacatttcttttctcctcacccttcctttgtactcttcctccctgaccacatggcgaaaactacagatcgttaaagaaaagcttgcttttccatcagggagtaagtatctttcctcttttccttctttctattcccgctcgcccgctcatccttcctgcctacacttctcaacacagccgcgacagcccaactgatcgccgttctacacgaccaaccaccaccctctgaaccgtctggtggactcagaaataggtataaatccgtacgcacacaagattacacatccaatatctccccctctatatccagatcaccctctcccgagctcccagatctcgaggaagggctggatgaacaggttgaggcaataggtaccaccgcttggagattgttggccagtagtttcgcctcctcggccggcttgacggtttgtctcttccgtctttatccgttcatctgtttgtccagtcatcagcagactcaaacaaaattatctaatctctctctcgcgcccccctcctttctctctggaatcaagttcttgagcatattgtttcctgtcgtgtattccatcccggtgtttgatatctttcctggtcaccttgcagctaaccatttgtggacgttcgtccttccctccctgtcttcttctcctctctcgctttgttcagccatctcttattctgttatctttctgattgccaccttcttcccttctacataggttctccccttcactttcgtacgtaggtcaagggatcatcatgggtttcccaactacactcgctatgaacctaggaatgatcactggctggggaatcctcggtccgttaagtgctcgtatgggctgggcaccaggtgacgtcgggagcagtaaggacggagccagaggttggatcttgtgggttgcgttggctatcatggtaagcgctgttgtctctttatcttaatatgttctctatccatacatatctacaacatatacataactgacaagacgttgttgaaataaaccttccttgctcccgtctgatagatttcagaaagcatgatatctttgattccaattgtgatagctaccattcggccatacatctcgtatcgaaagcaacgatcgtcttcatccgtcttcactcgagtaccagcctctgatcgaggggaagcctatgttgatcctcatatgtttgatgacgacgaggaaggaggcgagggctcggatacaaacaacgaagagtatgaaaccgaagacaggctcgtcccattgaactgggttgtcatcggcctaatgggtagtgccttcctcggcgtggtcctgattcgcgcgctctttggaccggatggaatcaaaccctgggctaccgccctagggttcgttctggcttgtctgttgagtcttcttgggtaagtcgttcttcttcttcttgttgctttccttcctctctgctgtctttcactttggctaatcatcctttctatttacctcttggatcaaagggtaagagcgctgggagagacggatttgaacccggttagtgggattgggaagatctctcaactgctctttgccgttctacagccccacaatggttagtcctcttcttttccttcttgctcctgtcttcttttcttccttttcggttctcaaatcttcttgcgtatattggctcggctttggggtgtgatgttctatggtgtcggaaaacgctccagtggtggcaaacattgtggcaggtacgtaggtttcattatatttgaacttgttgagatgtcaacataggatgttaaactcgaccggctggatcttgacaggtgccgtggccgaagcaggtgctcaacaggccggagatcttatgcaagatctcaagaccggggctctcctccgagcctccccccggttcgtctattccttcttgtcgactacgaggaaagggggaaaacagaaaggaagagtgcggctcacatcggaataatctttcttagatctcagttctacggccaacttgttggttcacttgcctcggtgtttgtcagtacagctgcgttcaaaatgtacaagagcgtttacgtgatccctggacctgccttcccagctcccactgctggtgtttggttcgtcttttgccttccctatttctttttcttctcgttctgtgcatagtcgtcttgattctctttgagctgatcggtcgatttgcatcctactttctctcttcactcaggctcaacctagctcggttgctaaacgatggccatctccctccttatgcaccgacgttcatgatcgcctttggccttcttttcgccctgacatccatcataaagacactaggcccgacgctcttccctgatgcccgtaggttgaacaggctgggcgcaatcttgccctcaggcgtagcctttgccatcggctttttgaacactccttcgttctcgcttgcaaggttcgtcggtgggatcctcgctctctactggtccagtcggccaggtgcccgagctgatgggagcacgaaaggaggtgggcaaggtgcaggcgcgagaggaaaagtacctctggcagcgatcgtcattgcctcgggcttcgtcctcggggaaggtctgatgagcatcgtgggcctcgggatgaaatcggcgggtgtgggtgtcgtcagttgttttggttgtcaccttggaggaggagggtactgttcgtcttgttgaggcctccattcgtttgcatttgtgtttgtgtttctgtattagcgtgttcctgtgttactatcgtccatacgtcctcttgtactttccgatatagaatgagcaacaacctcactcgtcctcgtcccgcctctattggagagctctccaggaaggctatgatagcatgaacagtcgccgataaaaggttcggccaaaccctaccttcggcgggtctcatcggagatgaccgagccggagtttttactctctattttttcattcatatttagcacacgacttgtttttcccccacttgttctttcttccttctttctatttctctcgatcccgcaagaaccatacacacccatctgaatactcatttacaacgcaagaagggagaaaagaagaccaacaagaaccagaacaaggaaaacataaagaatcttggatggcaaacacaccagaaacagcctcgcccacactaaccagggttccgacccctcagacgtcatcgacatcgtcttcggtcgaaaaacctccaaaggagttactaccaccgccgccggtccggtcgtcggtcgatttgaccgatcgtcggctgttggccaaacttgagaacgtcggccgaccggactcgacagtatctgatcctcagaccgataggactgagaacggagaggacctcgttggcgggcacacaccgttggggatggagggcgagaaggatggacatttggccggtcggacggagggcggtgaggaggacgagagaaagaagggtgatctaacagatcaaacgaacctcttgcccttcagacaggtcggtctcctctctctttactttctccttctgtatatgtatatatgtttctgaaacagatggacttaaccacacgggattcttggcttctggatcatgataggtcatcttggtattttttggactgtcgatagctttgttctgtactctagtcgaccaaacgatcggtttgttacttctttccctcaatccctttcaatcgtcaaactgtgctcaaccgatttcttctttacttctcttctccctttcttccttccctctgttgtccttgcatatcgcgctgggaaatcatccgaacagtctcgaccgcgctcccagagatcggagcggtcttccaggactctgaaaagagtggttgggttgccacttcatatttgtcagtctgcctttttctttctttccgacgttgtcttcataatattttcgcagcggttatgttctctctttcttctccccaaacacaagatcgttctggaagctcactgccgtaacccatgttaatatagattgacaagcactgcatttcaaccgctctatgggcgatttagtggtaagacctcgtttctcccctgtcgtctcttcactattcgaactagacatctgatactctgtcttctgttcgctctagatatctttggtcgaaagatcatgctcatcatcgctctcacaatattcttcattggttccctcgcctgtgcactgtcaaagacgatgatccagcttatcgttttcagagcgctctctggaatgggaggaggtgcgatcattacgctggccatgatcatcggtccgttctcttttatttctctcctgcgccggctctgtacgtgttgtacttactcctcttgttctgtaatctttaattcacttgataatctctcgcagtgtcggatatcgtttcgctaaaagtacgtctgatcatctctatctccaccctgtgttatgaatctaaaattctaaatctgactcgtcttgcgctctttactttcataggaccgtggaaaggtatgcgctctgcttcaaatcattcttgtcttcttaaagatatgcacacgtaactgaaagtattggtcctcacgccttctatgtgcatcagttctccggaatcacaggaagtgttgttgttctctcaaactgtatcggtccgctgattggaggtgtctttaccgagcgtctcacttggcgatggtgtttcgtccgttctttttcttcttgaggttcctttgacttgtttttctgtgttttacaaaaacctgaacctctcctcttctttctgtttctatacaattctaccgacagtggatcaacattccattaacggccatctctgtcatcgtcgtcatctttgtgcttcctctgaaaagagtgcagggcagctggaaggaaaagattggaagaatcgactatgcaggcgcaggactcacgttggctggtacaacggtattcctcctaccaatctcttggtgagactcccttcttgcccacagacatgccgtctgttctgaacagggtcaagactgacactatttcctctcctctttccctcttgacgaattaaatcaaaggggaggaacggaacatgcatggaactcagcggccgtgatcgcacctctcgttatcggaatcttgctcttcctgctattcttctggatggagacaagagttgccttgcgtcagtagatctcttcttcttgttcttattttattccgcatcatgatgaagatcttcctcgctgattctctgtccttttaatactttctctgttcaaacccaactcagccatcattccgatgaggatcttccgaaacatcactgtggcgggtatcatgtcgtctacattcttgactggatgcatgtaagcatggtctcacgcctgtcctcttcattttgagaagctattttgacgtaagagatgttcctcctgcttcacagattctatgctcaactgtactacttgccgcagtacttccaggtcgtcctcgacgcatctgctattcggtctggtatccttctcttcccgctcgtatttccacaggtgttcttctctttctcctcgtacgtcccttccttccactcccaccacgtcctctcacagcttgcgcgctctgtttctaacacaaccttgactcgatggttgcagaggatatttggtctccaagacaggagagtacaggatcaatctatgcctagggttctttgtctggacaattggcctcggtcttatctcgacgctggatgagaacacgtcgctggggaagattattggttatcagatcttgtgtggagcaggcgccggtcagacattccagacgggactgatcgctgtgcaggcggcggtatctcgttcggaaagtaagcatcttctctccttctctctctgttttcccatcgtccgttctctctggcgatcatgggctgagcctttcctcttgacgttcttctcctacacaatcgctcgatcctgttccttctctccgtgtacagtggcggtggtgactgcgacccgaaactttgtacgactgctaggaggaacgatcgctctggccgtctgtcaagcactcctcaataacgctgtccgcaactctcttacaggttcttctttaatcagctcgtccgagatttcgaccatcacctccaatccgacaaagatcaatgaccttgatctttcacccgaacaagttgcctttgccttgaaggcttacgtacaaggcttgagacatatctggtacttttgcatcccgtgtgccgggttgagtttcttcttggtcgttttctgtgtgaaacaccgtaagtcttgagaatcccttgctgtctccattgtatacccaaccttcttctcatcatccctttgtcctcttcttttcttcttttcccctctgatctagattccctgacgagggcagatgatgtcgagaggaaacaagagggtcatgcctggatggcaaacaagaacatgacgaaagaccaacggcaggctcttaacctcgagaaaggtatcttgtcaacccctccgtctcgaccgttgtcaccttcgaacggcaagccatctggagtccttgtcgattcgtctgatccgtccgctcggttggaagattcgacaaaggacgacgagagaaggatggaggacgatatcgcgagcaggttggagggtgaacttgtagatggacagggagcaaacaggacgactccgaccaaatgattcggttctttctcccttcccccatctgtgagattctctctaccatttcccgtcacgttgccatctttccctttgttcctacgtagagagtaaatgaataataataagcatacaatagttcgaacctcttgcaattcgatgtatttctatctgatagatagtatcagtttgtctccccggcccatttgttctcctgtcttatcactaaggaaagcatatcaaatatggatacatgttcgagatgaggaaatgagaaagaaaaagagaaagtatttcctcaacaagatgatactccaaatcatctaatcgtccgagccttggaactaaagacatgatgacgatcagcttaggagatcgcgtatatcatagtacaaggatctaaacttacgaataatgggctttcttccgctttccccaaagttaagacatctagaacctcttcctcttcttccgcttcttcttcatcctctacctgttcttcttcttcatctccgtcttctgactccagatccggctctgattctggttctgaatcctcttcttcctcactctctccttccaactcaatcctccgtctccgagcctgttcacacaacatgtccacctcccgctcgacatctggttccgccttcctcgtctccgcgtgggttcttcctcctttcaaccaagcaatctttcgagagtcaccacttggaaggtaccgaaccataccgtttggtactttgacagggtagggatagtcctttaggagaatcaagcgcatcttatctttcagattaacgttcgatcttatcatgacagacaagaaaaagaaaggaaggaagaacattcaaagatgagatgagagtactgtatcttgttcaaaccaagagaatcacataccgtttggaaagaacctgatagagtgtttgatggtgacaggtcagaaaaatcttacaaggagaaattgatcacaaagaggttgatatcgaactcacacggctataccttccttgtgctccatgacgtctgatagaagaaagaaacaaaaaagaaagtgtcagatgcaagtcactgtctgtagagattgatagagatagcgagggaaaaggcaagcctactcaagtatggccgtccagcagttgctcgtgtctagaccaacttcttgagcaacacggacaaactgacagccacaaaggtgagagagcgacatccgcaacacatactcggtcagcatttgtgggccctattcgagactatgcaatcgccagaggacttacaaaccgagtctccactggagaccatccgtttctatgattttcatttccggcgtagctcgaggtgagcgctggggtgtgcgaccgagaactggacgatacgatacgtctttgactcttcgaggaggtgggctgagtagaaggtggggacgaagaaggacatcgtaacgagacgctcgcaggaggagaagacattctggggggcgagagctggcgctggcgtttccttgagaatgagctagtcggtcggaagtgaattggagaggaaggcggggtggtctgacggtagtcagaaggcataggtgacatatgctgcccggatgagcttggatacggagaggtgtcaggaggagcgacagaggacatcactcggctcggccacgaagggggaagaatcttagctgacataggcttccttccggtgcgagcgcgaagaaaagagtcatcgatgctactgtcagactcctcggaatcggtatcgaacatctttcttttgttaaaaggtcgtctgagagatgtgctctgcgatgatacaggaagtatgagggaagacgatggagcagtctcagtctgctccagagcagtattctgaaacgacgaaatagggggatgagcaacttgttccgtaacgtctttttgaaatccgggaacgggctgagcctcagagccaaacggctcaggtgtcaaagtcggaggtcgatagggtatcttggttgtttccttcaaagaatgggcggatggaactgacgtgatatgaacgggtgttggagaggatgggaagatcattggatgggaggctgtatcggttgatggctggggtgttttctcgattaccagcagatctccatcttcttttctcacttcattgccattcaccttctcggtcgaaagcgctggtagttgcctaagcttgagaagctccattgctaattctgtttcctcatcctcattcaggtcattggctagcggagccgccgccttctctgaatcatgtagaagcgaaggcggattaactcctacttgagctaaaaccgtagctacagtatgagtggttgacgcggaagacgatcgggcgtgatctctatgagctttgcttcgtttaagttcagcggttcgagctttcaagctcgctataaattcggcggaaatagaagatgtgggtgaaacctgggcgagcggttgaagctgagagttagattgcgactgtggttgcgactgtgattgtggttgggagaagagaacatcctcccgggtgagcgcaaatgtcgcttcaaggacctcatccgcattgatgtacctagaagaaaagacatagttcacgttgaattttacaatacgtgaacaaatttttcaatctcgttcgaaacgtgcgaaggtatggttcaaaacatacaagcgatcagaggctacatctcgtgctaaagggtcagaggggacgacctggttgatttgagattcacgtaagctatcgaaaggtgaagcggtattgtagaggccatcagtatgtttcaacggccagatgaaagttgaacatataaatgagaagaagggaaagagacaaacaaagatcctgatgattcctctcttggccttctaatcgcccttagatccaactcatccaccaattcgttctcttcaaccttgattgacgttgatgatagccgactctgagctctatccttcccagttgataattcatcttcatcggacccttgtactgaggtcgcatccccatttgcgaagagtgtacgtccttcatccatgacctcttcttcctcgttctttccaagcaaatcttccaactcttcagcatccattgtatcgtttccttcccatcccttgttcgaaggcgactccgacaggacaagtatccttgattcttccaacggagaacggtcctcgaccatcaaaggacttgacggtgcaggcggaatggagagagcagaataacgtggcttggttctactcctcaattcggattgaataggtgggatatcgccgacaccatcgtccggatagtgggcgtagcttccccggcgtcgggagaggccgacgggagtgcgaagcggctctcgttgcggaagaggagcggatacccgacgggaatctggcgcgggtgcatttgggtagcgagagctcagggaagcggagtaagatgttcggacagaaattggaaccgaaggattttggggatatgggcgaatgtgatgtataggctggcgaaaccgggtagataagtatgtcaatgaaaagtgcaaactggagatgtatcagatatatataatgacaagattcattagttactaacctcgctcagtcgaggccgtcttcggaaatcagaccgagcggtttgcagcattgtttgggaattgtctagatctagtcgatccggaatagagggttgggaatgatcgagaaggagagcctgccgagattgaacaaaattgataacttctctttggaaggatgagaatgggaagcgtatttccgagtttgattgcagcacgtttaactaagtaacgatggtgacgaagacacgtatatgcgcgggtgcaaaggaacatggagcatccttgagtttccagcgccatataatcaattaagaaatacaagatagatattagtgctaacctctgctactcgggctctgctcatggttagccagcgctcatcgtccaaagttttgagcgcctttgttcgaaggccctgctggcttgtcctcctggaaacgagagacgacgaaaacaactcatccagtaattgactttgttgaagtagcgacagagcaggtcttttcaatatatagagctagacgttgaatgattgagatggggtgactaattgagtcagaattcaaccttctaatgaacatatcgaaagtgagaccgacctgagtgccaatatcgagcagtaatgttaacaacccatcgtgtctgaaggcagaacccataccgactgctccgcttgttcctttgaaaagctgcaagaacattctccaagactcttgaagctcatcaagttgagcttccgaagcagccgtacccctaatcccggcaatcgcgtgtaagaaaactgcatagtctgataggcgaaaggctgtgagttctgtcgggtcggaggttggtgctattggctgacccgatgaatcaacggatggcgcagaaagcaggaaggacgaaggggagggagaaggaaagagagctcgggttgcttgtaggagttgccagaagatcgcttccctgtgagagtccacaggacggccctggttctttgagtcaatgtagagcgatagaagttgattggaagcgaatacaagagtagtaatctcgcctctggatactgcaggaggcacaaagggtactgtcaatgcagatggaggaggcgtcaaggacggattgaggcgaattgagttgggcgaagatgtattattcgtcgacggagaatcaagcacagaaggctgtcctgaaagagaccttatattgtacactgtggattgttcaaccggcacggatggaggatcgaggatgcctggctcggatctgtgttcacggtcgtcatttgtttcctctggctggaatgagcctgtttgagaagtaatagatgtagatcgaagttctctcctagttcttgaaagaggcgatctaccagccttggtggtagccgtccgtttagcaacagctgcctttcgaggcctaggagtcgtctcgagatcagcgagtcctatctgtgacagtgaaaaagtagagcgggttacccgcctagtagacatctaatctctgactggatatactatctggactggtgggaagccaaaacaagggttgatataaaggatggtggctcagttaggatagaagatggtaactcagttggggttggagagtatggagcctcaaaggcgggaggagaggttgaagcaagacacgacacgacgcgacgcgtcacgcgtcaaaatgagggacacgtgtggagagaaggcgcgtggttatctaagatatatgaaataaccctcgtatgatataatatccaatccgaaaaaaacccttctgatggcgaaagcggcccaggtcgagttgagttgtctacttttctgatcatttttcttcgtcaaacacacacattacatccttagggtatagaatcgcaatatggacatccctgccaactctcagctgcccaacaacgatagcatcaacccggcggactcttctccagcgtctagacatcttgcttccagactcgaacagctcgctctttcggctcgttcgaccgaatcgtctccttctcggcttgagaaagacagacaagatgctcagcagagggtcggcaacctggaaagactgggagatagtagcactggtgcttgggagaagggaagagtaaacagacaggccggtatgtttcaaccaccttgtatcggttaggcgttcggttttggatggtacggctgaattctgattgatatgactggctgcctctatccgtctggtccgaaagcagctcccaaatcatctgctaaagcttctagccagctttctcctatcgactactcccgagctgttcaaccacctggcatgtaccctcatcatgaaggctatggcttccgcccagagaccgttccatcgacgcctaaagacaccgagcccccaatctcggctgagaacggagagaaggagcaggaagagatgcaaatgacggtggtagccggtggaaagaagttggtagtcgacgaagaggggctcggatggccaggtatgtctgttttactatcgcttgtctgtcatccacataatctgttttgactacttactctgatctggtctgttgtcgtgccctcgatagccaagtccactcacgttcgactgaacgcaacgcctgaggaatctgctgccaacgtcgctcgtctctcagaagccgtccgaacactactcgaatgcattggagaagaccctgaccgagaggggctcttgcgaaccccagatagatatgcgaaggctttgctttggatgaccaaggggtacgaagagagattgaccggtgggtttctactatctttgatgatttaagttgccctatatgattgctcacaaccagccttcaacttagatgttatcaacgatgctgtctttgctgaggatcacgaagaactggtccttgttcgagacattcaaatctcctctttgtgcgagcatcaccttgtaccattcgtcggtgtcgtgagtgtcttgtttcatcttttgtcagcccaaaacgtacttcatggctgaaacgtgaaacatcttctctgatttatccatatgcctagattcatatcggatacattcccaacaagcttgtgctaggactttccaagttggctcggatagccgagacgttctcaaggcgtctgcaggttcaggagcgattaaccaagcaggtagcggttgccattcaagaagctatcaagcctaggggcgtagctgtcgtaatggaggcctcgttcgtccggttctctttttgtctgactttctgtcttctgtgttgatgatccgaacatcttctctctttcaattcatctggataaataggcacatgtgcatgtcgatgcgaggtgttcagaaacctggagcatcgactgtgacgtctaccatgctcggttgcttccgagaacaggccaagacgagggaagagttcctcacgctgattcattcccggcgcaattgagtttccttcatttcaattcctccttctcttttgatttctttatctgtttgtttccgttctgttcgtctttctacttttctcatggtctcagctccggtcttgttctctatcttgtcttcgctttggttcattcttcatttttgatgttccatctagaatttgatctcgttgtacagttcatctaatccccgattcaacattgggattctctcatattctcccgatcttcttttcactactatccttctacctatcacagtagtttacgactatcccacaaattttcttccaggtttccacacttgcattctgctcctcttcctccctccggtcattcttaggtcatcatttgtttattttccttttatctacactcctttcccctcttccctgtctagtactcaggtctgcctcctgatgagatttagcaacttttggggttatcttcttttcgacgacgatcataatatgaaacgtatcatgtaaacggcaatgcggccgatcggtgttctcggttgtctagatgctagacagaccaactcgagatttcaccagagggacgatcaagctaacattctccatccggtttgaacatcgactggacaaattcatcggtactgcgctttgtgcttaaccggcgtccgggtaacaaggaacaccgaccggtcaagtggtccatctccaaaagatatttcattcgacatcacttcgagagttcaaccccaaacgatccattcctcatcatagatacctacacctaaccaagtcagccgtgtttgtaaaacgataataaaatccaatctatgcccggccaagaatctacacctatccgagaggctctcgatcttcggtacgcgttcgacatctactgatctcaaactcaatgagcgttcctcagattaacattcttgctggtatcttgttctgaaccactctatcaacaggtcgttggagaagtacttgacggaaaaccttgaagggtttaagggaccattgtcggcaactcagttcagtatgtccctctacaagtcatgttcgtactggacagctaagatggcaggagaagctcactgaagaggatcacgcttgaaccaactcttttcagagagtggccagtctaatccaacctatctccttaaggacggaaagtgggtaacgatacgtgtttaacctttgtaaaaagaaagaaacgggttcagaagaaatggttctcattctgttgatccacttttacatgattcagtggtacccagaccgtcctgcgccgaaaaccgcctggtcagctgctcacccccaccgcgcacaatattgaacgggaataccaaatattgtctgctattcaagcctataatgaatcgttgcctgagaaggatagagcagaggatggaattcccgcacccaaagtttatggagacgtctgtaaggacgagaccgttgttgggagtcaattctacttgatggttcgtagaacgtcccttttactttctaattgtaggactggaaatcggtagagatatgcagtaggcgtcgaccgaatcttctgatacttcagacattttcttaatgacttccggttcgtatttcaggagtttctcaaaggcagaatctttcaagacgtccggattcctgagctggaagagaaggatagacaggaatggtaggccgtttcatcaggttctgattgaagacaacaaagacattgatacatctatgtttctcatcatcgtaaagctggaaggctgctgttaagacactcgctgtaagatctttgtgcaacaaagaacccatatggttcctattcgatactgatatgctcagacccttcaactcgatagaatctttcctccgcgcaacttgatcttcccgcatcgttcaccacgacctcaactaaggctaataagcgaaagccctactttgcccgtcaagtatcttctcttctcaaagtatcttctatccaagcggctgttcagggcgtcggcaacatcctcactgatcctaaggaacaagccgaagttgaagagtttttaagaagttccggcgtggatgtggcggatgagtactattggagaagcgaaggaattgtaagtagatgtttcttctagcggtagtgtcagcatatcctagtcgttcaatagaggaggctgaaggtgtctttgagtgttccattttgatcttgtcttgcgcatgttaaggttcatggggactacaaactagataacttgatcttccatcctacggaaaataaagtcatcggcatcatagattgggagctttgtaccatcggtaggattttgctgtctcactgacgatccaaaacaaacggcctcagcttattctaagcacattggttcccttggttctgttttataatgacggtgacataggatctccactggccgatttatcaaatcttcttttgccgttctccctccctctgaatggcgtgcctcctgctcgttcgtgttgatctcatcagctgtgaattcgttttgtcggtcttgttttgcgctgattctgttgttgtaaccccgagacagaacgaaaaaatctattgatcccccttcaaggcaaacaagctaccgacgcggtcggcctaccgtcccaggtctatctactcaaattatggttagagacaatgggaggttcgactggggttggtgagatggaagacttgagggaggcgttgatttgggtcgaagtcttcacactttggaaggtttgtctttctttcttttcttctctttcctctcctcttcttcttcttcttcatcctcctctctttcttacggctctcttggttcttcgggtaaatataataaaaaacagcttgcgatcatctgtcaagggatcgccgctcgagttcaacgcggccaagcttcttcggctgaagcgaaagaaacaggaagtagacatacaattgatacgctcggtcgaatctgtcttgacaaggcacgcgtctctggatcgggggatggcaatgtcaaggctaagctgtagtttgagctcgtcagcaacgattctctctcttactcttcctttttgtctatttgttctgtatatcagcatgtctatctcttagttgtctacttagcctgtcaatgtgttatatccctgtttgtacgcttgcttcctacagtcccattcctatcaaacaggagataaagacattcgttgtacgcgatatggtatttctgttgactcgctttcccaattttacatgcggacggtcgcgtttcgtgaagatgagagagaggaagtagaacgaggaaaggtcgtcgacaaagacaaacattttaaggaaggaaatctacttctactctttagtatccacggcctcggcccctgtagaaaaagacgcaatgaaagaactaagctaagtcagtctgttctttctcttcaaatcaaagaaaaggaaagaagatactagagaagaacgtaccgataacctcggcccctgggctgctggaacccgtatccgcctcgctggaaaccacgtcctcgccctcgaccccgacctctggctccttctctgaggaaactcggaacgttcgttctcttggcggtgacctatcacggttggttgatgtatccggcaagatcgcgatagcgagttgaataggtgaacgaagtttgaagaagggatatacatgaggaggttgaacatgcatacaagcacagtatggttatcaggatggcaagaaagagaaaaaaaaaggaaaagtcagtaacatatttggcatcgagaccaggaagccatgtacacaaacctttattatacgtcctctgaacacagactcgtccaaaaccaaagcacttgtgatgaatgacggctcagcgaactcgacgtaggcgtatctgttgatgtggcaagggagaaaacaagcatttccatgagtctcggccacgtctcgcaaaggcggactaaagatatgacactatcctaatagcaaaggaggatggtacgctcgaagaccgacttaccctttggggtgaccagtgaatttatcgcacaagatcgttactcggttgatctgtccgcaagcagcgaagtgtccttgaatttcctctggggttgctccgtagtcgacctaatcgatgtatcgatcgtgtatagaaagatgtacggaacagacgcggatgataggatcaagataggtagaggaaagtgaagggcaggcggaacgcgttaagtctatcatcagctcctttcctcagatttcatctggtaaacacagtcgaatatatgctcacgtttccaacgtaaatacttcggccatctacatcctccttgtcctcctccatcggctctcctccttctaacgctgcatcgatacctgcaggcgtggagctacctgctcgcccacctgccgaggaagcctcctccctctccacttcggcttgcaattcacggagctttggtaagaacggatggttggtagcaaataaggtgaagaaagagagaaggtgttgaaagaggagtagaaacaggccaagggaaagagaacgttaggcttctgaaggctggattgaatatgagacaagtagtcccaggcgtaccttggcggcctcagcctccatctccttgacacgttgcttcatagcctcgagctcctgtaaagttacgatccgtaggattccatatggacaaagaggatgggaacgaggagagagaagaagtagaagaatgattgacaagaggagcaattcaagagttgatcagagtcaatccgacagtttttgaggatgacgagacgtgatccaacagaccgacgaaacaacaaaatattcttccaactcacagcggcagcctcatcatcggcgtgcactccttcgttgttctcgtgatcggacattataactaggacgacaagcgagggacaaggatgggatgaggtgtatgtacgagagaaggtgctctgttcgacgtccagcctgcccaagccggcttgtggagggtcagcccgaatgacttcaaattatttttcttgtctgattgagatcttggcctaggatttctcaccttctctcctctctttacccctcaccgtcgttttcctcgtcctctcccttttcacttttccttcctttcccttccatcaatatgtccaagactgccaaggtcgtcgttgtaagtcgtgcagtattgctccatgtcgttttttaggcattttgttgtgtgaaaacagagcgaccggggccacgatggtttttttctttctcttgttctacttcaaaagctcatcagactaacggtctccttctttccgcatccatccgatgaatctaggactggtcccgaatcttctccacctacgggctcggaaagggtgagtggtctgtgtttcctttcagaatagatcccgcatagactctgttcttcgcagcttgaatctttctctctttttctttgaaacaaacaaagatctctaattctgacgaatcctatgactttatcctttccttgcccttcatttcttcattcctgggtcggctgtacatcttttcttgaacactcttccttgaatctgttttctttcactggtttcctgtcctcgctcgtttcctcgatcccaaccattcttgttcgccataaaattcggtccatcgcctttgaatccttgctccctccctttctgtgatcaaacgttacgactatcaactctctctgttctccctgtttttctcctctttcatctcgcctgccggacaacatctgcaaatacacacagagaccgtcactgctttgaacgctttccgaaagcgtgcttccgaagctgctaccgccaacggtcagctcactcagctcgccagctcgagccaggtcgatttcgcccactaccgatcagtcctcaagaactctgccattgttgacgagctcgaggctgccatcaagaacttcaagcctgtgactattgatccttccaaggaaatcaaagccatcgaggctttcgaggccaaggctgtgagtagattttttccccatataccgaagccacgggagtttcttttctatcgagtactaccagcagaaaggcagtatcgaagagggagaagtcataccgagaaggcaactgggctggttcggagagggttgcttagttttgggatcagagacgtgaagaagggatgtgtgagacggcaagtaacggcggagagtctggcgtagatgggaggtaggcatggagctggactaaggctggttagagacgaactgaggattttctgcaccaagataacgggttggatcgacgggtctcaagacagtcccgatgctttggctttttgtcttttttttcgcatctagacgcggataagacgaatcgaacttcacgaaaaacgttgtgtcagagctgacatctcgaattcttttctttctcttgcaggtcgctgatgctgaggccaccaccaccaagatcaagtccgagcttgtcgaccttaaggccacccttgccaacatcgaccaggcccgacctttcgaggagcttgaggttcgttcgccattactgtatcgtgtttcatagcaatgcagatcgctgatgccgtcgtcttctcttttaccttgcctaccatcttgactttaacaaaactcgtcttcgcatcgcaatgcaacagaactctgatttcaccaaggctatgcccgagatcacccgaacggtcgacgtcatggtttccaagggaaagtggaccatccctggttacaaggagaaggtcagtcaggtttccgtttctctctttgccgctcatcctacttctgattgacaaatccgttgttttcttctacatctccaatcagttcggagatctcaacgttctttaagcggctcgatgactttgtttcacctgacctgtcaagaaatcgtttcaaacctgtcgcggaggagagtgggggtagatgggatggtggatggtgtcttttctcttttcaaagcatgacgtcgactctttatctgaacatatagaccgatgccatgttctttcttctctctttctcttcattgtaagattgatcagtttgacatgttgattaaaaaaaaacccggagagacagagaccaagatggggagagcagtcatatatataggaagtaaagccttagcccttctttctcgttcatctcattcgacgtctttttgattctctctcccccgtctcgctatcagccgctgaggaaactttgatcttcctcgctgtcgccgccgctgtttgagttcgagctcgaggttgagacctcgatgggggtagatgcggaggagagatcgaattggtttcgtcctctatgtcgtcctcgtcttcatcctcgtcatcatcgccgccatcgtcatcatcttcgtgctcctcttcgtcgtcttcatcgacgttatcctcgtcctcatcttcttcatccagatcggaacctccttcgtcctcgtcgtcttcgtcctcttgattttctccgtcttcatcaccatcttcgttcccattcgtgttcccgtttgctccgtttccttttcttgctgctcgggaacccgatataggtgcttctccatgatcggacgcctcactatctgtcaattcactctcggcagctagacctagaagatccgactggtcaatctatagagaaaacgtttttgagtgtgcccaattagttatcacatagagcgtcgagagaaggagacgacgacgacgcgctttctcatgggcagagacggaaagctgaaaagatggatgaacgcttacatgaatatcgctcccatcgtcttccacatcatcttcatccctagacccatccacaccttgactaccatgaccgccgttgacgaggctgacttcttgtacagggggtaaaggtggtggagtggttgaccggccgaggtagtataacaaagagggacgatctcggatgtttgtgtatgccgcttgaagaaacgaactaatccagttttgagcgaatagcggaaagagcatgatgctgatatcagcatgtctggctactctgtgagaaagatattaaagaggacgaactcgttctgaagttgcacttggtttagtttatcaagggtgatcgacagttccttcatcctcgttttgttgagcttggtttatcagacaagcgaaggtcagcgaacgagaaaacacgtattttcagtaccagacgtatacgtgtcattagtatttcgtacttgggtgacttcatcaaactgatctcggactgaggaaacggaagaaaaagacacgtagcccatccagatggaaaaatatgtgagctttcaggatcgtctggttgactcttcgatgagatcatcgagctaaacaaagatacatacgcatcatgaacctggttaaacggaaagaacacccccaaaatggaaagaaagcatacagtcagttccaacacattcccaagcaaagtgtcgacctcggatgaaacagatagatctgggatgtacttgtctttgaaccggttgggcgcgtctgcgggaggttgttctgctggtctctagaatcggccgtgttcccaacgaagaaacagtgcaaagcgccagcttcatcagttcttgttcttgctttgtatggctgtacgtcttgaagtacgtgtgaaacagaactcactatcgaagtctttcttccccctccgacacctcgcccaaccccttgcttggaaactctctttcgacctgccgtcggccacgccagctttgattctccctccgccaaggcctctgataacttgctttccttttcctgttccgactctttaccctttcctttcgcccttgatcgtcctgccggttttgccgactctttacccggttcgacagaagtggacttcggatccggtccggactcgtgtatggcgctctgccgagatctacctcctctggaggcggcctttggtttaggcgtggaagatactgcaggttcagggatggggtaaggatctgccgggatgccagcatatatcgatgtactgggcatgtcgatagaaggctctgaagtagcagaaggcgatccatgttgagcgaaaagcgccatggctgatggaagttgctggagagatggtcaacgagaggagggaaaacaagtgaagactgatttttcaggaaatggccgttctcaaactcccaacggccaaccaccagtgatcagccaggcaggccagctagctcaagccttccttcttcaacatcatgacggacaagcagccttcttcatccaatgatatagaagctcctccgacggcggctcagttggcagcgttccaagcacgggcggatctgtcggtagtcatgctgagaaacatgatgggcaagatggtcaaaggttgggttcctccgacggctgaagaactgaatcaaacgtacgtcctctttcttgttctcttgctctcttcttgatgtgatacttcgcttggcttggtttgctctttcattggagaatggagagctagtcctcgtagaccagccggtgtgttatccacacagaattcaaacgggatcactatcaaagatatcaaccctcaggctcctttcattttttcctctcttcaacccttgttcccttcatgttctgtgctcgttccattcgaatagaagaagaaacagtccctcttttctctacagcaagatgctgacctacgtctttgttttacccttgactttccgttcatagcgatcctcaagtcaagccaaacgcaacccgaaaactcatcaacaaactcgtaccgcgctcctctgctgcttcttcttccaccttggccccttcgtcatccgctacgacttcgttcgagcaacatcaacagtcacagcagaacaataaacggtatagatcgtctgctgtagcaaatttgatcaaccaacctgctcccagcgagaaaaacacaaccaacggaacctccaacggcaacggtaacggtacaggctcaaaaagaccggggcgagacaaccaagactcggattcagatgaagacgaggctgaatccaggtctagagctgtagggaagaaggcaaagttgtcgaacacggggatagatcaatttggtggaaagaacaagaagaagaagaaacaacttcagcaacagcaggtgccaccaccaccgtcgtcgacggctgtagctactgacaagggggccggaaacaagtcgaaagacacggagcctggtcccgagtcgagacccgaacaagaacaaatcaatccattccgattgttcgcttctccaaaaacttcactgccgaaaccgaatactgcacccaagcctccgtctagctccacctccatttctaccccagcgtctgcaactgtagctgtgtccaaacctgcgtcgataccggcctcttcgatgtcatcgacatcaaccgtcaccacctcgacaacaggggcaggatcttctccaaagaaacagcaacagcagcagcagcagcagcaacaaaaacaacaacccgctcttctcaatctaggttctccctcggccaacgtttccgaacctggtgacccaaacaccaacgctgagggacaagaaaaaaagaagaggaagcggaagaacaagaacaaaaacaagaataagaacaaggcgggtgtctcaacagaaggcgaggataaggatggggacgaaggggatcaggagcaaagattgttgtttgattgatcgggcctgtcgggataatatgaaactcctgtcgagacgaaaaagcttctctatctcccttggggacaagatactcagtcttactttgaagtgtttcactttctgtctggatgcacatgcaagctcaaagtcactaaagaaggtagaaatgatcattgtatcacattcccttcgaacgaaattgaattaaagaaaggatggcgggggcgaaggaaagagggaggggggagaattcgtgcagaggagcaagcgagagggggcgcttagatggccttggagctgacgagctctgtagaacaaaagaaagagaaccccagatgaggaagcaacgtcagccgaaagagaaacatccaagatgaggaaacccaaaaagagggatagacgcactctccaagtcggcaacggcggaagcgacaagatccttcttgaacttggcgttctcgagctgcttgagaacgttggactcgaccgtcttgacgagatcattctgctgggactctcggacggcctgctcgtgtcggacccaggagtcaaggacagccttagcctcggacgcaagggcggtctgctgtcggagggtgaagttctcggcctcgagtcgagcggtctcctgtgttttttgttgttgttattattattaaagtgagggcatacaagatagaaggtattaacctccggtctttccaagccaaaacacgtatgggaaatgatgttatggatgaagcagaggagggactttttccagtaaagtacaaactactcttcctcgtccactctggagcacgtcaaccagttccatcttctgcctttcctcatcttgcctcgtcgcattcgtcgcaattccccattccgtggtagagcatactcggccgtgttctcaccaaactcatccgtagtcccagtccccatctcaatacatcctccgtctgtgttagaaaagagaacagaagagaaagactcgccttggagagagcgaacatgctcttggtgacgtcaacaacgtcgttcaactctccgacgtggtcgattcgggtctgaacagaggacttgtgtcgctctcgagcgtcgttaaggatgctcttgactttctgttaacgtgaatttttttatgtggtaaaggcaacaagaagatgaagcgtgccgtgttatcgaggggatttgggagatcaacgatgggtgccgaagagaaggtaattatcgatggccgtaggaaagtcagagaagggaaagaagttgaaggataggatgtatagagtggattacaaaaaaccaaacgacaaagaaaaatcgcaagacgtagatcagtatcggtatcgatatcgaaagatattgaccatctttctcgatccgctctccttcaagccaatcttagcaagaacacgaacctcgatgtggctatcagcccaggcggcgtaaggaccgctagcggcctttccgatgtaggtagcaaggatggcgaaagcaacaaggatgacggtctcatcgttgacgacctaatctcggaaagaaagaatagaagacaagaaaaacaggacgaccaggatgaatcggagggcgaatttatcatcagagcgaagagaaatcggatgagcttccagcctgaaaacctaaagagagagaggagagaaagaaaaaaaaagcaagagtgaagaaagagaagaaagaaaaaaaaagatgacgaacgtagatctcctgggagatggcggcagcgaatgctccaacaccggccaagatcgttccggtcttgccgacagaggtcgaagggacagaggcgatgatggacgaagccttctcctcaggagtaggctctataaatcggcaaggacgaatcacgaaaacaaacaaggaggaaacagccgagattaagaagaggagaaagaacaggagggagagagaaccccgagaggaaaacatgcggtcagttctctatgatctacgcttcctctgacgaaacaaccaatcgaccaaagagatcggttggtcgaacgtcgcttgtcccacgtcgccaatgggacgaaggccccatctcttcaagctggatggaaacgaatcacgtactagaggcgtaggatctacaaaaagatggggggaaaacagacgaaagtccaggaagtgatcagtaccgacgtagtatgattcacgtgtccctctcttctttatatccctcgtccaagctgttttccgatcgattgagaacgatcaactcaccgagcgacagtagcccggggaaggacgacggcaggtcggagagctagctcccccccataaaaaaagacacatcgatggaacccatccattcggtttaacaaagaacccccagaaacaaacacccggacacaaaagcaaaagaacaaaagaccatcaacttttttgatgagcttcctcactcccatcatgggattttttttttcaatatatgaatcacgcccatcggtccgaaagctcatcaggtttcaagatcgatagctgatggctctcttctcccgtgattggcctattggccatgaaccggacgagaaaaaaaaagagataaatcctgacgaacctccgactcgaagggacctggaaagaagtttagaagccattgctaaaggacaaggaaagaaccgggggtgtacgaggaaggaggggggatgtaaggtgatgaagcgtttgagacgtaaaaagactaagtgcgtgtacaaggcggaaaatgagatttcttcagggtaggcgatcgtttgtcttagcgacttttttttccttcttgctcgccaagatcgatccggacgatgaaccacaagatacatgcatgcaacaacggaaacacacacacacacacacacacacacacacgaagagagaaggaaagcccaagtaaccaaaagagaggaaacgtgaaaagaaaaaagaagaaagaaaaaaaaaagatgaagagagaaggaaaaaggagaaaagttcattgtacaggtgctagccttgacatccggaaagaccttgtatatgtgtatatgtgtatatgtaagttgatgaaagtgatcagcaataatagacgagagcagatgtactttatctagaaggaagatgattatgaaagctggatgatggactgaaatgagaaagaccgaatcaaaaggaaaatataaaggacgtgagcgacaaagccggataccggaagaacatgaagactgtgtcctctctaactaatgagaatagatgagtgatcaacaggtcgtcaaccgcagagagaaaagaacgacgagagaattcaagagactccggttcagaaaggaacatggggagagagagagtcagaacgtttgttgacgctcagccgttccctttctcgacgacacccgcaggatgtacagaagctcaagagctaccgtctcaagttgatcctggacagggctcgtgtttctctgcatgcttgagtccctcggagtagacgaggagttgatctccgtaacgttgcatctcgtccagagggatcatgagcgaaaagtcattcaggaggaggaattgcagttcgagctggttcagctcggacagaggtaagccgcctactttggcgtatcgagagttggtgtaaaacacatctgagagccaaagatgagaacaagacgcacgaaacatgagaacggaagagatgagtgagtgatccgagcgattgaggcaggtaagaattagagaacggtcgggacataccagagaagaacttgcttgctacagtgacaccagcgatgaccaaccgatggacgttaaaactatcaatcgcaaagcctctaccggtcttgccaatggcgctagccatgttaggatcaactcctatcggaacattcttaccctgggtactaggacctttgccgttaagatggtcgttttcctcagccatctccaaactgaacctactcattcggtcaaagtacaccagtaaggataagaagacctcattcgatgccgggcagtatttgaggatccgaagcagatagacctcgatagagatccctgggacattcctcgcatgaaaggagaggtatgaagaaggggtgtgaagcgaatggagcgaggccgtcaaatgtttctttggatctattccagtttgatggacgttttgagaggaggaagaggaagaggaggaggacagggtgggcatgatggtggccgaggtgggacgagaccgacctgaggacgaggccgctgacgaggatgtcgatccggtcgacatgaaagacgacgtagcatccttccattccatctcgtggttcattcgttgattcgacggatctctgtctccatccgactcggagtctctacttcctcttcgacctcttgtcgacatctcgtcttctatggctgctccgaaagctgctccgttgggggtctcgtttgagccaggatccgaggtccgcaacgcatcgtttgcacttgcaatctgctgcaataggctggccagcagtttgaccagctcctgtggtggatatgttgccaggttgaaccgcgagtcagaaggaccggaagatgacgacgagggcgaggacgaggtggacgatgacctagacgagtggtcgacagagcctggaacgaaggatgctggtggatgtgcggtggacgaagctttgggtgtggagtttaacttcagatttccagtcgatgtggatgacgacgaggatgatgaggatgatgcaggcggaggtgtttgctgtagaatgttggaaggcgaagtgggatgagaaagtggagtgggtggtttgatcgtggacgatgaggatgtagacgaggtggttgacgttgctgagggcgagaagtgattgtgcgcgttgatggaggatgacgaaggaggcgaaggatggtccgtcaggccactagagagtcgccgacgaggatggaacgaagagttggaatgcactggggtggccatgaagggatcgaaggcttgggagggatctggatgaacgtgctggatccggtgggtttggtcaccggtggatcgtccgctggatgagaagcctgacgacgcggcgagcgtggacgactcgagggaagacgtcccgatcggtcgagagacattcgagaacgatgagaacgaagttgacgaggagggtgccagggtcgaagagactatggaggatgaggatgatgaacggagatgttggtggtatcgggccgaagggctccctctgcctgttctgtaaccgtctgccggtccgtccttctcaggaaagggcgagctgtcactttttggtctgcctcctccgagtgagccggcgactaccagacctgcaagagtggtggaacccttgagattcttgtacaactgagctgcactggttgagtttgaggaccgtcttcgaaagtctctgtctgcggattccagcaggtgggctgacgcgacgggaatatctgtccgtggtctgtggaggagggtcggatgggagctgtaggaagaatgcgaaggctgactggaagacggtaccggtataggtccaaccgaggacgacgacgacgatgatgatgaagaagacgacgacgaagacgacgatgacgaaggattagaagcggaagaagacgaagaaacaggagcagaaacagaaacagagttggactcccagttgttgagcgggagatgaaggtgatggcttgacgggcgagacattgtatgaaccgggtgagagtctgcctttagcatggccagcttgaaggcgagggtgcgaacgatgtagtgagacgagaccgaacgaaagaagatgaacgagatgaaagaagagagggaagagaagaagaagagaaggaaagaaagaaaaaagggaaactggcgagatggcaaaaaccaagaacgttggtcgagcgggtggatctttggctgccttgtgagaacctggatggcggtttgtattagggatcgtctgtagtgtggcattagagaagggttctagtcttcgtcaaactacaatgctttcctagtcgtgtactacacatcgattctattactttcgagctcgcccagatgaatacgacacgctgtagtcagtctattgggacagtttgtagtcagcccgtcgtcccacattctctaatgcggatcggtcggacactacaaaagctctctagtcactctatagaataatccatcgcgttcaggcaccatccgtttttttccctgtctccattcccctgtcagcatatacccatccacccacacccgcacaagcagcatgtccatcctccagagatcgtccaggtcgatagcaagcacctcgctcgcctcgtcctccgttctgccgttcgttcggtctatccatgtgctcccaaagtatgctcttgatctcaacaagccagtcaccgccgttacccatggagaggaaaagccgatctttctgtcggcccagaagctcaaggtacgtttttgtgattgtggttttcgtgttcttctcgttcttttcgttcttcttctctccttctctcctccttctttcgtgctcgttacgtccgtatggatcggtctgctcgggtgtgatccgccagctgtgagctctccgtcaacggctctcgagatagacacagacagagaaaaagggaaaaactctgcagagagcgttgctcgtccgatcttgctcaaatagcaggctccctgctctgcacaaccttttgactgcatatacccctccttgcctgttcactctgatcactgactttgcttccctttctctctccctctcctgtaaacgcttcctcccttgccctccaggccctcgccgtcacttaccagcaaggactgttggaccgactgaaccagcaggttaaaggtatgctcccaatcactttcattccagcttcttctttgctagagtcgcctagccaaggagtaggttctctagcgtacatctactgaaacctttcgctgatcgctctctgctttgtgtcatatcctttgacgtgtacccaaaagggaccgaccttgagtctgcccatgtgctccagaccgtgttggcctcggcggccgacccagcgctggcattgacattcaactatgcgagctcagctttgaacaactcgttcttcctcgacggtcttgtaagtggccttctgacctatcctttccaactcagcatcgccttcaaagagtgtctgtttcttactctctgaccgggccttcctacacaaaccgtcagacacaatcctcggcgcctcctccggtcgactttcttcccttgctcctcaaatcatttggctcgtatgacctgttccagcaggctctgttcgacgcaaccgccaagatggaatctacatctggatggatctggcttgtccaggaggttaacgaggacaacaccgtgaaccgattggcctggaagatctcgtacggtgccggctcggtccttgtccgttctcgactccaagacggctctccacgacctctccccccggttccatccgcctcctcatcctcatcatctcgctcacagctagaagccccccaagcaacgaacagccgaacgtgggaagctgctttgcagaccaacccagctgctagaccttccgttcatttcacaaccatccaacaaacaaagtctacctccccgatcaggacgtacccgctcgcctgtctgtcgatgcatgagcgaacgtatctccctctgttcgagacctcttcctcctcctcctcctcctcctcctcctcctcctccgccgcctcttcttcat

SEQ ID NO: 2385 - DNA, 61036 bp, Xanthophyllomyces dendrorhous
  misc_feature (15194)..(15203): n is a, c, g, or t
gaaaagaaaaaaaaagagagagaaaggagatattagaatgttttgtagataactgtttgtctcggagaacaagaaaagctcctttctatctgccaaaactactcttttcttccgtcatcggacactacaaaaggttcatgcatcttgtccaatcgacagtcaaggctacaaactgagaatccaaacccaatggagagagaacaaagagaaaacgtcgaaaagaaacttttctccctacctttctacacatctttcttagcagagtcgtttcaacacaccaaccacatccttcaaagcgtcccaactttggaaccgttcttcctcaatctcctcctccaacggctctacattcgattccagtcgttccaacgtgtccggtcgccggagagattttatgccttggattactcgtttgaaccttttgatctcacaccagagggggttggtacggagttagtcatcaggttgcaagcaaatacaaaaagagcaggttcgtgcgtgcaaccgttgggggaagaaagacaaaccgttgttcgaaacctaaaggagagaccgagatggacatcaaatctacaaaccgaaagcaagttcacaccccgttcagcgctccgctcccaaagacgtcagaggaaacaagacaaaagaaaaagaaaaagaggggggggagggggggatcgctcggtctcaccaaactcgacttcggatgctgctttatccacgatctctgacctatcagcgtaaaccagacatcagaccaatcaatgccacatattcgcccgagacggtcaagaggtatagggtattcctcactttttatgaatgttcagtttcttttttgtccctttgagtgagagtaaccaggtccagacatgttctccctgatgggtctctagtaggacggcgcgcatagtcttcgcgatagatgctagggccttatctcttagtttcggctgtgtgcgtgttgagggaaaggagagcagtccgattagcttttgaaagaaggtctagaaacaccattgaggaaacctccgtttcataaaacggatagactggccccttacgggtatcttttgagagaacgacacggtgacggcaaggttccgatattttatcttttccaacggcggtaagggctcctctacacgttgtgtaggcgcaggagggggtagcactcgtctctgagaaagcgcgctagagctgagcattgtagctagtttaatccgaaacgaagggaaagagagagagaggaaaaaaagaacttcaggtaaacattttacgagactcttgtaggtatcggtcaacaacaaaaacaaagaaagtcaaccaagaaaaagttgacgaacacttcggtatcgttgactttgcaggttgggaggctttaggtttgataggtagctgaatttgaacctcgtcagattcctcatcagaatcatcgaacccctgggtaagatcaatcatatccacaggatctattctgctcatctttcttgctacaggaggagatacaggccgaggccgttttacagggtttgatgagctcgggacagcacttaatgtcgacgtaggcgatggtagctttcgtctctggatgagaggcggggatgaggggggtgaggatgagacacgttttgatgcagcaaaagcgggagatgcaagatgaaaattggttgtattagatgccgattgtatatccagatcggtcgaccggatgggaaaggaaggtgctaattgacactttgagggagatagattaggttgaacagaattcgacgccgaaggcaacgtggtgttctgttgggctaagtagtctgcgagcggtgcggatgtcactcgtttgaaagggactttgaatggtttctgcaatcggtttgttttggatagtagtcctggtaaggcggctgggagattacattaggaaaaaaaagtgtatcagccgttgaggtacctgccaatctgaacaagtcaaagaatgacttacaagtaagcgagggtgtagcgtttaacgctgagacaactggtctatataccttagatggtctagttgaggggcctgccggaattggctcacgcagttcaccctgctccacatccaccttcttctccgcctccagactgactcttagtccttctgcctcagcctcgattctctgcatggtatccgaagaaaacgggccgagagagcgcgtcttttttatagattgtacagacgacacttggccatctgaacttcgatccgaataagtcgtcgctatcatatttgatgaagccgagcttctcagtgggttggagtcttgcttgctctgtctcaacattgctagagcagacgtcacttctactggatggtcctgcatccggggaagaccatcgacctcatcatctgcgttccagttcgggttcatctcgtactcctcggtctcgaatggttctaagctgtcgtattgagtctgctgagaggcgacaaagtcatcggacgagagaacttgttttcgctgtttgaccttggcaggatctctacagatctacacacatgccatcattcatgaacagatgagccagactgaaatatcaaacgtgtttgtacgacctttatgacagctgtactcacatcgcacatcccattgcagtacgccatcaacatctgaggatctgtctcgtcaatcttttctccaaagaaccgacagatcgagacatgccgacacaatttcgaagtttccgcaaatgcttgcagctatcctccggtacaattgaggtgttaaacctaactcgcgtgatgatttcgaaggaaatagaaaggaaagaaaatcactaacagcttttaaactatcttggcctctgacggctcctcctgggtccctctttctactcttagacgcgtctgcttctctaagcctctcgacttttgcgcaatcctcccgagctgagatgatgatgaagggaaccccacattgtatcaataatgttttgtatatgctatgcacgtgtgatggaaatagtactcacaataatacaataaacatctagagttctaaaggatcgaaaggatcacatcagaaagatgacttttcaaaaataaaaaaataaaaaaaataaaggagaacttgatactcacaaatccatctctaccggctcgacctgggtcaagatgagctcgtatgatgtcagcttatcaattcaacgcgatcaggagccagtcagtggtgaatgcacgactcaccggtttcttggtagaaccctacagtggacaataaaggctatcattagggctctggaatctaaaatgcgcttctgttgatcaggtctcacacaccttcaaaactcttaggtaggtcatagtggacgacatatcggacgtcaggtttatcaatcccctaatcaagcccaaagcaaagctcgccataagtctatctgattcgtacgccatttaacttgaagtttgacagagtcatgcgcttaccatgccaaaagcgatcgtagcacagatcacgtccactctctccgttggtttgtcgtctgcagtttttctagacttcccttgtccgttcgtcttctccttagggcctttacctggaactcccagccactgctccagccctgtacttgcttctaacatcgctccaccagatgctgatcctccaacccatcctttcatatgatcccttagtacgcttgcgctcagacctttatgataggactttgcgcgaacccctttgttgcgaagctgctcggctataaagtcacaggctgctttggttcgggcataaacaatgccgcacacaggttgaggttcgagttctccgttagcattggtgataggaggtgcacgcttctggaaagacagaatgaagttcgtaagatcttggatcctggtctggtcattctcgagtgaagtcggtcggtaccgaacctacaacaggaatacatcctcagagggttaagtaaaaagccaacgatcagcaaatgaatcgatgagaggattgtcgcggttggaagcttacctcgtagtagagattctttctattgaatggctccaccgatttgaatagatgttccttacttaacttgagacttgcgacgatatcgtcttgtacgaacgatgtagcggaggccgtcaaagcctacgtgatgtttggtgaagacaacgtggaggtcacatcaagtcagctcagggtaacagaaagcgtgttagtagcataagtcgatttgaggagactaaccataatgggaacatctggaaactgatctcggaaggacccaagagccctgtactccggtcggaacgtgggacctgttggttgatagccataccatgaacaaatagacagatagatgtatcttagtgaactagatgaatgcgcgctcgttgaatacagcaacttaccccactcggatatacaatgcgcctgttccctcatagatataataaaggttacatcagcatcacgacaaatattcttctggtattcagatcatcagatcaaactggggaagataagaccgacctcatcgacgactagtcgatttaattcaccctgcttccatacgaccatcagattcgtcttgaattggggggtcatgaaagtttccggagtcacgtaaagtagcctcgtccgaggatgaccagaagctagatctttattaatctaatagaaacagaaccaagaatgttcacaagtgtggtcgcgcataagaatatgagtcctcagaaacataggcgcacgtagacgcgctcacctccttcttctgggcgaacgtagattcggacgtaagcatcatgaccgggactcctagctctcgaagctgggcaacctctataacatcatggccgagggtatggagctagtaatcagtctggtgccaggtagatttgtctctctaagcgcaagagatatacgaacgattctgcataagagctaagagaggtgagataacaactgtgaccccatgttcctcggcacatgccggaacttggaaacacatactctatatcatgaaagctgtctcgaagtaagtccctgatacggtatatctaatctgaagaacactgaacgcagatcatacgaaactaacctttcccattcctgtaggggcaatgaccagaacatcggctcctctgaccgcggcatctacgatggatttctgtttccctcggaacgactctttcataaaagctaatagacaggtaggtgatgttacgggataagcgacgcttagcgggatgaggcgcgtcaccgtatgggtggtcggcagaaagttggacatactcttttgaagaattctgtacatacacgagggtgatatcgggcattgagtcagatattatcggctcactatcacatttctagagaggtgtatcttgttcttcgatttcaagaactaacctgagacagtcaacctgaccgctgatcgacctcctgaacgatcgagggaggatcaagttttttgccacctgagtagttgttcaaaacaggattgagccaaagacgtataacacgcaggcgaatgtattcatcagtatatatatcagactgaaagttcgcttacctgagtagccgtgttcaaattaggatatgtacaatccaaaggtagctctcgaacctgatcttcccgttcaggatctaagtcggacgggtgaccctcatcgtccgatcggtagaacaactcttgttcggacatgagagctgccaggaagaggctgtactacaattcttgtcaaaatcctgtgggtctattacgatcaaaccaagggcaacagagtggagagtgtcgctgtttcgagggaggatatgctgctttctctgtgggttccgtcttggagttgggactatttccatagtaggtcatctctgaagcgcgtctccaatggttacgcatacacgcgcgcgcacgcgtatgtgtgacgtgttcgaaaggttactcccctcgccttcacgatctccttcatcttcttcatctttcattcttatccgttgtacctctacaagtcagcatggaagacgctatcggaattgtgagtgatccattctttctcggttttcggtacttcagttggtttgttgcacgtcagaaacatattgcagagggaatagatatacttaccgaatatggatcatcttctcagatcgtcgcagtcgccgtcatatatgtcgcatactcttgggtctctaaacgtttgtctagcttgcgatcatatctattgaatagcgatatcttattgtcgtcttcaatggaacacctctcaaccttctgtctctttgttcttcttcctttcttcctgggcacggactctctttcacgccaggcgcgacatccactcaagtaaggccaagcgggccaccggtcttcggacagggaatcttgagaggagtttcagaacccatggttcgtgttgtttgtccgtctgtcggccgagtttgcgtcaacagactaagctgacctgcaagacacttttaattctgtttttctgtccttcatcatttggcaactttctgtatgccctccggtcctctctatctctcctcatttttgattgtcaccttcttatgaaaggtcgatactgtgtcatctgcgtttccggatattccgagagagaacatcatgtatgacctttcaaagacccggaaccctcagataaccgtcgaaaagatcctcactaccggaattcttccacctgtatgtctgttttaactgatcttcgttttaagcgagctctgtcgctccgtatcgcctctgtctgatggatactcatatcttctctctatcaattcgacctcttcggtagcctcctccgggcatgttccctgcttcagaaccttcacatccgcctgctcgtcccaacgcgaacgtttcatccgccacaacctctcatgccacacccacgccgacgcttctcgagagatacaaccttcaatccagagtgagctccgttaaaggaaaagagcgcgctgtggatgaggtcgatccaatcgacaatcaatcagttgtaggaagtaacgctgccaagtgggagagcacggccaaggagcgggaggacagcttaaagaagaggaaggaagcaatggtcctggaagccaggaggtatgtctcttcttgcttcgtttcttccatccttgtctactgtcatgacagaccgactgatgaaattgtttcatgaatggtaacccgacctttcttcatttatctgatagaaaactgctcgcaaagaaggcgaaagcacaagagttctaaagagaaaagggctacatgtctcggtcgcttgcttatctcttgttcttctcccttgatatatgacctctgatgtctttcgtctccccctcccttccatccctcgtttcgaactatgaatgcgcctacatatgctctaaaccgggacagagacaaacaagaagaaaaacaaggaaatgactgaaatgaagagaatacatgtatatacagaaatacagccaaggcccatgctgccctgataagagcttctcctctccgcctctctgcgtactcaggcacgcgcacgcagatcgaggcaaatcaagatcatcgccagccggcatcagccctgacggctgcacctcttcttcctctaccgttcggagcgagcacgccccccttccaggatcttctgatctgatcgagatcccaatcgacctctgcctcgctcgtcttcaccagctttcccaggtccgccaaacttttcccaggcacgtagttgtagatttgttcggtgattcctccaccgagagatgacccggtggaagaagtgaaggacggtggagttttgtcaaacatcccgttccctggtaacgttgggttttggccattgccggacccatccggatgtccgttcgcgaacccgttagagttgtggttattcgaatttgatgagtttcgggctttcttggatgaaccggatgaagaggaacctgtgggatggccggcgttgccgagagatgaattgaagatgtttgctgaagacgacgttttcgagagcgacgggtgggacaagattgataacgatagatgggcgggtggggctaagatttcatctgtcaggatggagaatccagcactatttgtgccgggagcggaggatgagctggatgaagacgtgccgttgacggcactggagccggaaagagggagcgatgtgaacggaagatggagggcgctgtcgagagcagacgcgtgttgatgtctagacggacgaagctttcggttggcggcagatgaatggtggccggctgagctcgcgctgttcaagggaggaagcggggagaacgagtgaaggtctgaagatttggatgtttagaatggatacgatggtagttcagcacgatcgatcagtttgtgcttaggaacaagattggagaacgagaaaggcgaaggaaagaactgacctgaaccgtcgcctccgtctttttcctctctgagccgcttcctgcgttcctctactttgtccaacaggagattcttcgcaccttcctttgcctttcgatactcttcctctagccggtctttctcgagctcaaacagtctccgactggattcgagtcggtattcatggtgcatctccacttgagatagcagggcgtctcgctcgagtgtaagcaggtagagcgaaaggagatacgactgggacgtcggaggcaaaggaaggagtgaggatgccagatgagataatgattgatgggtgtcgatatacatcctgtgagagcgtgtccatatgtgtgtataggaagagagagcaaaccgatatgatcagttttagatgtaaggatttgtttggatgctcttccaccatccttcaaagtaagccgatatagatctcctagagaaagtctcgaaagctcctcatctctacatcctctttgagaggagactctcaaaaaacaagcacactttcactgccgtaaatctcgacaggacgatctctgctgagcagatatgttcctttatgtttctcgtcccgtccgggttgcctcatctccaaggagtagaagagaccgcgagccggatgactctggaaggcgctctctgacactctatcaagaaaaaaaatagatatggaagaagagagaagggtcgggaacagagagagagatagagagagggaatattcttaggataggatgtagaaagaatggaaacacgaaccgatctctatcatccattcgttccttgtgtttcgcctctaccttgtcgacccattctcttcgtttcttatcacgcttactctccggctgactcccagggttaggaccgttcaattctgatgtccgacttgccatcctctggatgttttctttctttgcaagagatgcgggtacgggatggaacaagagaaagagagatgaggagggatgcgtgatggatcaggaatgtagcgatcaagaatagtaggtgggagtatccgaaaggatttgcttgatgcaggccgttctgtttgttctttcccagctatagaaccggacgggcggggcagaagggggaaagagagaaaagcgcgtggataaataaatagcgtgatgagaaaaggagacgcgatgcatggtaagaataatcgactgcgctttgtccaagacctctgcgacgttgcgtcttgtctcgtccagtcaagagaatatctgttggtccggtctcatctttcgacgtcctctccgtttgttcctctagtcaagttctgtaaagagaaagaaaagagaagggaagaaaactcttgattgaatccgatgtcatttgctccttgtaagtttgatcgttctgtcgctttgatggaatgggtgggatcctcggcaaaagaaggaaaggattcgagtgctgatcgtcctttctctctctgtctcactcttttcccatctcgtctgtttctgtcgcttcttttcggtctcttccgacggctttgggattctttgtctgggcgattcgcaaactgatctctactctgatttcagatcagccgccgcctgatctacctcctcaggatgacttgcctggagggaagggaaagaacaagccgaaacgaccgtggttcaaccgggacgcgagctcattctttgctactagtgccggcgcaggtggaacgaactatcaatctggagggtcaaccaactgtttgtctcgtttgtctttgcctggctctctcatttttatccgtggaatgtactgacgagatgccggaggccttctgatcaaatcaaaacgtcgtcgatgcgtgtgtgtgtgtgtgtatatgcttatgtgtgcgtgagaaccaccagcccaatcgtattcttctgtgcagccatctggaccgatagccagctcaagctcggcccattactctggagggaacggtcaagccccaaattattctgtcgccgaggaaggtggtacggcaaactcgtgggagactcggttcggatggagagtagatttcgaggctggggcgacttatctgttgggcccgttgacgggtacggtgtctttcctcctcttgtttcttcctgcggtcgtgatcgtataggcgtggtgctgatgaacaggagactttttgatgattaaccgaaatagcggtgttgctgttaattctcgagacaacgaatgactttgtccggttccatggttcgttgtctttgtactcattcccaaggcacccagccgagcgatgtattcaatcctcgttttctactttgacttcttcttgtcctctctctacctctcacggaacagcctaccaatctgcccttcttacgacaccactattactcctccacttctttctcaagctgatctttccgtactggcttcagtcggtcatcagctttgggtcgtttggcctggtagtattcatggcctaccgggcgtttgtggacgcgaaccgaggtctcgaacggttctacctacctgtgcttggtgagctagccgagcgatgggttggagatgaatgatccgggcggagcttcctcgattgggctatgtgtggattgtgttcttggcgtctgccttttctgtgtgtatacaactgtgttttcggtttgccggaacgtaccagacggaaacaacaccacatgctgagaggaacatgtacacaaatagcatacatccggggaagcatacactcgaaccaaacaccgatggccactcacatgcccggttagggttccgatgggaaaacgcttacctaaggttgctgaataagggtccgaccacggaacagcgccccttagggctgcccaggcgttgaaccgagaaggaattcaaaaaagaaaaaaggcgaaaaaaaaagcgatccgtgcgtcagagcaccgtcatctggcagccccctaaacatcattccttcccatcgactccacttttcattcccccgacttcgtcacccgactgatccaggtcagagcaccacaacacagacaacacaacagacaacatcaccacacacgtcagtctgttcgtcagcattcgtcgtttggtatccatctcttgttctttatttccctttggttttgacggatggtcgataaatctctcatcggttagcttctttcttcctttttctctcttttcccttcccttccttcttttcgttcctctttctcctttcgggtcacttctttgttctcttcatgttatactaatgctgggtcacatccggtcaatgaacacacacaaacatatgctaaccttcgccatcccatctgttgcctttttctttggttttctctttcactcccggtccactcacccgcttgatatgattccttactcatcacatccttctcagctgatgatactacacgcggctcacctacactggccgcaggtgtgcccacctccaccaacgacgagccaacagtgatcccgcgtgcatcttctgtcggatcgccaccagggtcagaaaaagaagacgcgtcggatgtaaagccagaagacctcgttgacgtcaagccttcggacgcgtcaaaatccaattctctgtctcctcccgcttctttgcctccggccaatccaccggcggatgaatcgtctacaaaggcatccccgcctggaacgttcacatccaatgcgaccgtccagtttagccgtgccgtccgaccgacatttcccggctttcatgaaaggacccgatccaagttggactctgaaccaaacccgtttgagcagtcgttttcaacctcgaagtcatcttacggcgcatcttccgtcgcgtccagacgatcacctcctgatctctcgtccgacaggctctccccgttcgcctacaacggaacgtcttccgtccctcagcccgttctcccaagcgtcagccagatcaccacacctctcggagaggacgatccgttcaaatggccgctcaacacacccgccatctcatccatccggggtgatcccatctcgccatccgttctgtcaaagagccagactacacctgcgtcgagcgtcttggtctcacatgctctcaactttgattgtaacaactttgtccgcaccgggttgactccagggacaggcatgacacccatgtcgggcggaccgactagttttccgcctccctctcctggaacggctgccttcctcgccatggtcaccaacgccaccgcgggagcggccaacacgatggccagctcccagtcgaatgaggaaaactcggtgatgacgcccggcactttcaacgggatgatgaatcatttgaacaatctgagcagccaacagcagcaacaacagcagcaacaacaccaacagttttctcagcccttccctccaactgcacccggtcagacctctactgatggcccacaaaatgcttcccaatcatcccgtccgttggctcctccggccggcaaggattcgtcggacgactacttttcccaccgcccctcaactgattccaagacacatgtccagcaagttattcagaatgatcaggcagatgccatcaagaattcgaccaatgctgccgcccctgctacctccggacctcccccggctgcccacgccgatttgaatggtccgaacgcatcgcatcactcccagtcctaccttaatgcttcatcccatatggctgactccaatcatcaagctggtcccggcggccacccacctttccaccaagcctctccggtgccggctccgttgtcccaccacaatggtggcgtccctccaacagaccgctatctccaacaaggacaagttgctgctagtcaggctgccaacggactgttcttgctcagtcaagcccatcaggcaatcgccaggaaggagcaggatgatcgagttcacgttggttacggaccgggtggcccttatcccggacaatcatatggttcttcccagcagctttctccccctgggccaacacccgttaaagggaaagggaagcgcaagcaagcagccgctactgacggccaatcacctcctcccaataagaagggtgcggccactaaggcgagagcaaagaaggcgatgagtgaagagagtgacgattacgcacagattgacagtatgatggacgagagcatgagtccggtgtcgtcaactggcaagaacggaaagccagaaaccgaagaggaaaagagaaaaaacttcttggaaagaaatcgacaaggttggtcttgatcttctctcttcttttttttgcctccctccctctttttgttatttttatttctatcatctctcgtttgtttatctgtttgtctgtctgtgaacaacactggctaacctgttcctctcttcatcacgcgctcgctatctaccagccgctttgaaatgccgacagcgaaagaaagcctggttgggtcagctccaacaaaaggttgagtatctagagttggaaaatggccagctcacaaatacgatctccaccctccgggacgaggtcaaccgacttcaatcggtcttgtcaaagtctggtcttcttccaggttcaggaccgatgaacaccggccatccaaacatgtacaatcaaccccatcctcctcatcatatacaacaacatcagcagcatcttccccagccgatccattcccatcctggcgctcacccccagcaccacatgcaagctggcccaccggctccccaccaagcattcaacgggtcgaactctgggatgaaccaactgcccctacctccaccgccctccggtggtccttcaggtccttcgtccggacctagctctcaaccaggctcgatctctggaccaccgatcggtgctcaatcatcacctctaggttcatcccgaccaatctcccaagtttctcttggaccaggtcatccgccgtcccaccttcacccccagaggggtctcggcgcgttccagcagacggcgaccgctgggaactattaagagcttcgattgtcttttctcttctttccccctcttttaaggtctcgcttggctggaccgttgtaagatgctttttcttgtgttcgttcttttctttccttcgctttgggggcctcaactggagtttttctcttcatcttttcacttttttcaatctcgttttctctttatacaccgtcttttttcttttcttcttcttctcttccctttcatacactattctgggatttcttctattccttctcttcgcgtgccagatatgttctctaaatctaatactttttcttgatccacttgcctagcccagccatctttttcttccttcatgctcttcccttgcccggagctgttcttgcctttcttcctgtcccccatctgtcattccgttgttttcggtttcttctctttatcctctttgtctttttttcttcttggtttatctctatcttgtccgtttctcttttttctttaattatctccgctaatggatgataactcatggattgtctgttctcccttctcatctcagattcgctcgtaaccagggaagagcaagaaaagaaaaggaaagaaaaaaaacatgtcataaactatgtttattcttcaaagagcgaaaggaaaggaaaggaaagaagaggagagcatgcaaagatggcagcgttcgaagaacgagagaacgtattagcggaaggaagactaggggtgatcgaaagttgatgatctgcacgtcaactagtttgtcatgaatccccacgtggcgagtctttcacattggtagactggagggtgcgagtccgggggcaattcaaactgcttgtttgtaaaaagaaaaagaaaaaatagaggcaaaagaaaccggagccgaaacgaaacgaaacgaaannnnnnnnnncgaaatgaaatgaaatgaaatgaaatgaaatgaaatgaaatgaactacaggatttgtatccagagctttatttctgcgcgcaacaaggtccatctcgagtagagcgaagcctcatatctcttcgtgttcttcaaagatttctactccgtgagcgatctttcaatacttgagaagaccagagagaatctcggatgggacgtcatccatcaaaaaaacaaaaaacaaaaaacaagtgtgtctcgagaaaagcattgggacattgagcgtatggtctccatgttggccccgtgcacgtgttttgtatcagataagaaaccagacaggcaaagaaaaaaaaaggactaatgtccattaggaaagagaaactaaataaatcactagaaaaagtcgcaaagaatttgtagtatggacactacaaaatggcggaaaaatacaagaaaatggtcgagcaacctgacttttgcttacacccaaaatccatcctgacttttgtcgccaggcaaattcttacccaacaaactgccgaaaacgttttgcgtacgaatctttgttgccgtagccctcatcctcgaaagctaatgtacgtatcgactttctgtgtagatatctgtgttgatcctgcttgtcgtcgtggtagagaacgcgtgctgctagatatcgttaggacaagagaggggaagtatgggagtagggatacgtccagaccgttggagagggcaaatatatgacagtggaacgcgaaaggggttcaagaggaagaggtcacagatgactagcagcacgaacctatctggacgatacagaaggaagcacaactcacatatacatggatcagcaagctgaccgttgcttcatatcccgatgtaatatcttcagtcctcaagatggtaagtcgcctgttgacacccaaactcttccaatcctttgacgaaacacgaaaactgacaatgtctcgtttgcgttcaaacagaccaaagtaagttgccagcctatgatgcggtaatagtaggaagcggaagggtgggactaattctctccctggctccttgtaaacactcttagggtacctcctctttgtacgtggtcttctctacctggtttctttcccccaagcatttgagagctgcgactaatccttgtcttgatctcttctatttcttttgccatttgaattgtcatccttcgctgtccatgtctaattttcacacgaaaacgcgttcctctccatccattcgaccatcatctttgtcctactctcataattcttctacctgcctcacagcggtaagcgacacaccaagacccacaccatctgccgacgatgtggtaacagggctttccacaggcagaagaagtgcgtttgtagtttatgatctaattgaaaaagaaggaagctgggaaatggaaagcttgcatcaagttgtccagaaggtagtattgacctcgcgtactgggtatcaatctcttgtactacaggacctgtgcccagtgtggataccctgccgccaagatgcgaagcttcaactggggagagaaggccaagaggagaaagaccgtacgtcgaccattcttccttgctctctttccaaaaaccctattctaatgattgtcttcattctctaaactcttacttcgctcactttgcatgccatctccagaccggtaccggtcgaatgcagcacctcaaggacgtctctcgacgattcaagaacggcttccgagagggaacttccgccaccaagaaggtcaaggccgagtaatcggtttatccatcacctggtgatcagggcgggtaataatcttttgttagagactatccatgttctgctgccgcatcaaacaattttttttgcacatctcgtcgttcatttgtgcccttcgttcaaacgcctacaaaaaacttgatccttgtgacatcaccgtttatagtgacaatctgttggacttgatacgtcaatactacatcttgaggcacatgagacgatgtggttctccttttctctgtcgcatcgaggaaagtgtaacacgccaatctggctaagaaagctgtcttcctttgtttcatctatcgtttatctctattgttctctaacccaatcctgagcacctctcgcctcctctcttgggtctcgaggttgatcgataatcgggatctcccatctaccgacaccaaggtagacccgaaggatgatcagatctctggccatacagaatgaatcccaggcaagatttatctttgaccctgggatctcttgccacttgatcggcgattctttgatcgggatcgggaactttttggttttcttttgtgggttgtacgtcccaaaaagcaaagaaaacgatgactttagtcagatcacacctctcgcatcatatatgtggatatgttgattttgagaaagaaaagagaagaaagaaagacagaccatggtggatgggtcccagagttgacagtagtctgccaagaccaagagctcaacatcgaaactccatcgttcgagatgcatccgttcgaacaaaattcctgcagtgtccctagtgaatagtttgaacccgcattgggtatctcggatgtttcgaacgccgagcgtacggacaaataggtgaaagccgtgcatcagacagttccgaacgaaggagcgctaatcagatgaaaaaaaaatcccctttcaacataagaattgcgcgctcttctgagggaaaggcagatagaaagctgaaggaaggaaaggccatgagacaaaccttgacaactaggtccgtctctactagatgagctcggctcccgatcgcgactccgtatgatctgtccttctgtgaagcaaccctggcgttcacattgttgggcgcgccccgcttacgcacggttgcaccggatcgatcggatgtcgatgaagctgtggccgtagccgaggcggcatttgaggaggaggatggtgatggagaaagggtaacctcaatcttgtcgaggtcattctggagaagagaaagagaggagaacgtagatgcgccatcggcgtcggcaaagagaacccgagcgccccttgaatgtaagataccctgtgcgagaacgagaaggagagatgattgaatatcagttctctggatgaataccaaaaactgagaaatcaaacagaaggagaagtagcctacatgcttcactgctcctcctttgcctctgttgttttcgagggagataattcttagttctcctctgcctagtccccttttttccgatcccttccaacccttgagttcccatttccttccgatctcgagtgcgaccaaatccgtgccgtctgagctcccatcgtccacaacgataagctcccagttcttcaacctatctttgcctgtcccacctactgatccatagacctcctcgacagtccgggcgtcatccgtcatccagtcatgcacctcctgaagcatcggaggcaatctgagtttctcgttgtaggccgggacgatgatcgatagcgccaaacttggcggttcgtttctccccgagctcgatagagtcgagggcagaggcagcaggctcttgggatccaaggaggaaacatattttcgttcgttcggaaggatttcaggagaagaaggagagagagaaagaagcaagccgtacgcaaacaggaagagcgggcagaggagggagatgaaaaagaaaaatgtatctgtcggggagagttccgagaattgctgacgggccgaaaggatcatcgggtccatgaaagacggtgacatgatgacctgtatgccctgctgacctggtggtctaacaagagagatagagaaacaggaagggaaaggaaagaaaagaggtcgatggtgatgggaggacgaatgaatagctgatgatgcagatggtgaagaatattataaaatactatgaacgtttgtagtgtgttattcggatttttgtagtttcaatttccaatagaactctcgatcatttcctctccgttctctccttctctccatcctcttcgtcctcttccaagatgtcagatcagtccttgctaactcgttatgatagacggacaagaggttgcatttgctaaccgtgatgacgttaatttctaactcccatcaacagccaagatgggtgtttttgagctttcttttccaacgctctcgatcggactgttcattctcactctgatagtaagcctcttctaccaatcaacccgcacgtgttgcaactaaacagacaatcaaacttggcgctcttctttggcttcatcaaagctctaccgtttagttctttggcctgccgaatcatcggttgctacgattcctggcccacttctcgcaagatatagcccattttggttagctcggtcggcttggaacgggacgagaagtctgcaggttcatgaagcacaccggacatacggttcggctctttccgctttcaccagctgttctctattctcgatgacgaagaaccaccatctctcaacagaatgttatttggtccgaacgtatggtgatgctctacaggaaaattcgtgcgtttggctcccaaccatgtgtcgattgcagacccggcagctattcctatagtccttggacatggaacaggttttcttaaatccgagtaagtagctctgatctgcgcttcgacttaaatcgcgtctaactatcgactgagagcatctttctacatacccatctttgtctcttcctcctgcatgctttctaaatgattaaatcatctaaacggataaataaaaaacttcacagattctacgacgccttcgtttctatccgtagaggtgttttcaatacgagagatcggaaagaacatacaagaaagaggaagcttatctccaacgtcttctctcaagtaagccatccattgtccatcctcttgtgttgcttccttctagctttcggggacttttccagctcactgtcctctctatcatgcgtctcttcctccgtttatttgtaaagaaaaacgttctggattttacctcctatgttcacgaatccctgtacttgctgatcactcgatggaacgccctgctagaccacccttcttctccttcatcggacctggaaaacacagaaactgtgttcgacaccctaccgtggttcaacttcttagctttcgatatcattggcgcactcgccttcggaagacctttcggcatgcttgagactgggaaggacgccgcgcctatcccgagttctacccagaatcaagcagaaggaaaggagggaaaatatgtcgaagctatcaagtaggtcacgatcaagaagccgagattcttgtccgagaagggcgcgctgttcaagatgactaaatcagtctcacatctctcggatttttggaatagagtcttgaacgaaaggggagatgtgtcagccacacttggctgtctgactccttggatgaggtataccctctcggttgtgacttatctttgcgatgcgcacacataactgatacatccgtaatcggggtttacgtgcttctctgctcattcgtcgtaccaagaccctacgcagcatatcatccctggtttgttcaacgccttaaaagtgtcaagcatctcgccggcgtaagctttcttccacatacaaattcatgatctattttctcgtctgttggattcgaactgaatcatacgattttacactcgacggtagattgctacagcggcggtgtcccatcgattggaaaaccctccttcttctgatccacgagatctgctaagtctcttacaaaaaggaaaggacgggaacggaaacgagctgggaagagaagagttgattgcagaggcgatgactcagttgatcgctggtccgtccagatgtctctatagagaacaaagttttccccaaaagcgctagtgagctgacagcctaggattcttctttgtttttttgtaatctctttaggaagcgacacaacttcgaattcgtcttgtgctatcttttactacttagccactaacccttcgacccttgagaaactccagcaggagttagacgaagcgctctttaatcttgacccctcttctccatcggtccctacctatgatgatgttcgtcttatcactttcgttctctcccggtcttaccaccttcatcagctcatattttatccaaacgtctccaacacgtactcttaggtcaaatctcttccgtatcttgaagcagtgattaatgaggcgcttcggatccactgtacctccggaatcggtctacccagagtagtacccgaaggaggggcgtttgtatccggaacgttcttcaaacagggcactgtactgagtgtacctacgtatactgttcaccgggacccggatatatggggagatgatattgaggcctttaggtgagtcagcttaaccggctccgataaacgccgaaggcggctataaagagtctgatcatctgtaaatcggtgaactacaacaggccggagaggtggtacgagttagataaggctacgatgcattctgctttcatgcctttctcaacaggtcctcggttcgtttctctcctttacaggttgatcaatactgagtgtctcttgattctgatagactgatttgttttatgcgcttctttatatgcttgcttgtaatagaggatgcgttggaaaaaagtatggccaaccctttctctcttctatccgatccgctttgtcttgttaacgagtttacatattggatttaaacactcctgtcgacgtccctatttggtttccacggagaaacagtctggctgctaccgagctcctactcatcgtctcatccttggcatggaggtataacttccagccatctatcaaaaaccaaaccgtccgtatcctcccttcattacgcattgcgacttgatgcttctccaggatcatcctgctttgtcatttcactcttgatccctgactgtacttccataaattcgctcgatagcttcctgtgcgcgaagggttccttcgaaagccaaccgagtgcttcctcaaaatatcacgaaggcagcatactaacaccgctgacgatccgtaagagacgggagagacaaaagttgataagggggaagattagcagtagctaaatcgaatagggctgagtgatatgcatgttataactctttggttcaaaaaaattgactgtaagaaggacgaacaagagacaaagaccagaagtctagagggagcaagattcttttacaagaaaagtagaacaaagagggaaggagaagggcgaggaagaagttgagtcgaaatgagaaccgaggtgtgtatgtttgatacatgttcataaaaaagataaagtaatgtaggtgtgagaggagagcggtatgaagaggatgtgttgtgaagaaagagaagaaaaaacaagatttgatttttgtgcagaagaaacaacaatcaaaggatgtgactgatagtagaattgaccggaaaaacgaaacaggaacccattgagaagagaacagcacaagacaaggagcaagaaaagaacacgagggacaaagagagacggagaaggaaaaaaaaactaaagagccagatcgcgcttggccgcaatattcactccagaacaaactcgtcaacatcacctgtctctcttctcgacctttttttcccgcctggctttcttgactttctctcccctctttgcacagaatcaaacggcaacatgaccgggctcgtcaatgtcctcgccgttccctgggattggacggtcaggtggcttccacccactccgacctcgccagctgctgaggtcctaaagatcgagccgtttccaggcgaaaagttgtatccttgacttgccccaggacggacgaccatggcggatgagctcccatgggcttgctggtgtttgtaagcggcggctgacgtccgaccacggaacgtgccgatcggaatccgatcccatctggacaagtttcgaagcgacttgtcgtggagtgagttcggggcttgatcagacgcggatgacatcggttgctcggcattggtagagtgatagagaaatgaagaatcaacgacatcttccaagttgataggagggagttcaggctcgggtgaagaaggagtttcttctcggagtgaagggtgtcggcggagagacgaagagttattggcaggcgcaggggctgaaccaaatcgggcccgtttggtggggccaggcgagaacgggttgtgtgtctgatcagatagagagcgaaagtgatagaacacggattacaatcgtgaagttagtttcaggaagaaggaaagaaagaaccgaggagaaaaagaaacattcgtaccttggcttcctgcttgatcctcttctttccacttgtcgtcgatccaccccgacctcttcctcttcctctgtctctacctcggatcgagcctcttcctcgaccgcctcttctctcgaacggactgggcgtctgaacacccgttctagacaccccatcgataatcacgttcgtcaatccgcccacaggagccgaagttggaaagaacgagcccattactggtggtttccttgtgctttccattgcaattccaacgcctttggatgtcgacggaggaggcgtccgatgggaatccacatctgtagctgtggcacctgtggcagtggttgaggcgggaggggttggaccgttgttgatgacgggcggcaaagggggtgattcgaatgaggctgggatcgaggaatgatgatcggtagagtgggagggcatgatgggtgaaaccatgatgtgcgaaggaaacggggtcgtactgacgaaatcagtcgatgtatcccctacgggcgaaccgatatcttcttcctcatcatcctcaacatgctgaatgattactgtcacaggtgaaggagcttttggagcatccaactcgttatccttgggcgaagggaacgaagcaggcgatggaatcggtatcggaatcgacattgaatggacaggaatccgaggggcggggatgacatcttcgtcatctggaagggaatccgtggtgtcgccctcttcgtcccctaagtacaggtcctcatcgtcaacttcgtcatccctacaaggaaaagaaaggaagaacattcattgagattaatactatggcctctgaatgagaaaaagtacaacacaaatcacataccaaagtccttcccatttctctgcgtctctggcaccgtcactatctccctcgctctctgttgcgaattcgaatgctcctccgctacccgcgcttccaagtggatcctctaagttcatgctacctccgtctcctaaagcacccaacgctccgaaacagagctgaccatcgagatcctcaatgatcatcatcccaggagacgttccctcagctggtgttccgacggaatcctcgttctgagcaaaacttgctagggcctcttcaagtgaaagtacagagagcgggagcgcattttcgtgtggagacaataagttatgagcggcggatgtccgacgaaggagcgagttcagagtccatcctcgttgatgatcagactctgatccttcgcacacctcgctctctgtttcgtcgccttggccctgtccgtctgggaatccctcgtttgaagcagagaccggtcggccgtcggacggagttccagccgatcgggttccagaagtacttcctttcaaagcggctccgaatattcgttcttcctcacccgaatcaaaatcgctgaggccttcgaaccaaagagcttcgacatcatcttcgtcgctcgagtcttcgctccatggttcaccatccccaggtttgatactcgaacctaggccatggtggttggaacccgggccgggtagtctggctccatgggaatcgaaagcgaggatgtggagatcctcttcttcttgatacgaggacgaagggtgaggttggttggttgttgacgaccggcgatggtggctggaccgatgatcgttagtggaatgatgatgatatagatgggcaccggtgggatgggatgaaaagtgtggagggagaatatgatgacccagctggagctcgcctacgtcagagtttaacgcttcgctgtcttcttcgtcgtcatcatcctcatcgtccgctgctgaacttgaggccgaatcaaggccatcttgagaatcgtacgctcctcctccgttattcccaccagacatccctccaggttttctctgctcccacccacccaacttccgcccccgtcttcgcttctcccaatcttcctttctcatgaaatcatcatcctccgccaccatcgatgaatcgtcattctcgtcatcgtcaccctcggtagtggtcgagaacgatgttgagctctccgatccggactctgtggtagaagatgaagcccgcatgaaaacccctccatcgttcatgaacgaagcttcttcctcgtcgtcatcgtcaaactcgtcaggtaacgacgtcaagcttccatcactctccattcccggcatatcgacgaggatgggcgtaggcgggagtgcggtggaagatgaggccgttgtctttttcttattggtagtggtctgagctctggcggaagaactgggcggtaaagccgaagtaggggtagcagcggtggatgtgatagtatgtctatgagctaagctcttcatcaaaggcttgtcatcctctcctgaggacgagagtgaactctctgactgggatacgtcctctacccatcgtttcgttgatacctttctctggaccgacaagccgtccgatttcttgcgctgatgcgatttggactttgacttgactttgtcttgaattggcgcgcttaaaggggcggagatgtcatcatttatggcgatcggaaaagatgaatcggcagaggtagagccggaagggtaggccgagatggacacagtagcagacggtccggtcggtccgttgaaggcataggttgagggaggagcatgtttgggtggtttcgaaaatggattggttaatgccgatggtcctgtcggaatgggcttagacccgtcccgatgggtgaacgacgacaaggccgcagccgattggctcggtttcattggtttcgatccggccgagaccgtcttgagcttgtgggctttcggaccagtcggaattggtttgctatatggcgagttactggcagaagagggcgccgagagagtatcaccatagttaaatccgggttcgtgcgccttcgctttccctttgtccttagctgtcatcgatttcggaccggtgggtggattaaaggctctctctttgactgctcctaagctgtttttctccctagatttgccactcgtactgctcccgctgggcccagactttgtcgatgtcggagccgagtactgagaagccttcttcttgaagctcggaagaggaccgccactggtagtggaactcgcgcccagatttgatagcggtggcggcggaaagactcggtggacgttaggccgggaagatgttcctgctgtcaagagaccatgttgagcgggaggaggcgaaccaagaggaaccttagtgatctttggtttcgatgagccgagctttggtttcggttttgctgcagtcttgccgggcttctctggtttagtgaagaacggggagacagatcttgatggaccggcggggataggtctggaggcatatggatggaccgctgcgggagatgtaatgggtgcggaagaagagccgagtgtgggcgtgctagcggacgcgcccagccggagtttgatcgttggcagccggggggagttggaaggagagttttgggcggaacccggtgggttagggtgataaggatgagaggacatgagttctgcccacagtatggtttatgcggtctgatatgagtgacgagttgatgtatcaagaagcaggttggaaggggcgattgagtcttaagtttatgaatgtgtgcgggtgagcgtgtttgaatcggtagtagtgtattttctaaaggaacgatgagaggacattgatcagctccgaatgtcgctggcctcagggtagtcctggcgaaagtagagcttaccagagtttgagccaaatctgtctgcagatttggacgtgcgtatcaggttgtaatttgaagaggagaaattggttggttcttcaaggtgtgaaggtgtgtgtagtttgggcgatagagttgtgaatctaagaccataggcgttcaacaagacaatagtcagccaacagaatctagtgtgcggacaagaaagagaagcacgaagtgaacttacagcgatggacaaaacgagggacgagctgaaggaggctatcttgaagtgttgaaaatgagaatgaggatgtgaatcgcaggagggcacaggcatcgtctttggtgtcagggtccggatgtaggcaaggggaataagaggagagggaatataagatagggtgtgtaatcgggctaccacaaggatgtgtgcagctgttgaaacaaagagaaggcaaacgagatctgtcaagggaatatgacggaagccaggctgaagattatcggtcctgtgcgattgggaagttggcccaaagctatcagggaagttgctattgatgttttggagaaaacaactaaggaagcagacaaatcggtatgtctggctgagtgtatgctatagttccaagctggatcgatcgaagggagaggatagaacgtttcaggtgtgggtgagagaccgagggagagaacgaacaggaaggttatcaggaaaactcttcttaaagctgtgcattcagccgccacagcgatctttgcccgtgacgcgttctgggtttcgacgcgtcagagcgcgcgtcagccctcagccagccaggcagttgggtaggtagccaggtagctaggtagctaggttgacggatagcagcgcctaggaaagactagtcaggagtgccttcttggtctaaccaacaagctcttatgtacaagtaaatcctataggccagaccacagatgacaagaagctcggccacgtgaacagacagaatgattagagtgcattgcattagaaaacgaacgaaactcattacagaattttctttctagtgaactacagaaatatccaacagagaccatcactcccatcaatcttctcttgagttctggccggtaagcttcttcctcgtcgtttagcttgtaagtgtgaatcaaagtatgagaacacaaccgagagagtatgggtagaatgcgcttgagaggaacgtctgtaggaagcaactgagcgtgctctccttcttcccttgcttagacttttgtctcttggcatctttgccttcttttttcttgtcctgttgtccaatcatcttttgatcaccgtgaacatctctccatctttctttggaacacatctcttccatcaatctagatttctcgagctgttttattgtctagaggcttccaagtcaaggcatcgtctctcccttgcctaccacctcgtctgtttttctcttcggaccctgctctctgtgagaggtcgactaatccgtagtagcaaaaagtcccgatcgctcgttcgtatctggccctttttttaaaaaaaatcctcctttgcctttctaccttgcatgcttgatcgctaaaacaggtagcacccactggcctttgttctttgacctcatcttcctatcagcgtgtggcccatccttccctttcttctgcagctcgtacagaacatggtccaaccatcccccactccagtgtcgtacccaatatattccccgccccgacagtcactccactttcttcgttatctgacaaaatcaagcacgtcccctctgccatctaacctggcggtcgtggctctgttgacattgttattcgccacctaccacgtcacccgattcgtgaaatatcagcaagtgaaacgtcgttggcgagcgagtgaacgtgcacggagagagctaatcaagaaagagtcggagcgatcgtccgcttccggcgttgcctcttcgtctacccttcccaacggaggctcaagttcttctgttggcaagagttccgtcagcccctatatcggagaacgacctagcaggagtgagctaggtgcaaagaagagaaaaaagtccaaggcgtcaatgacggcgacgacgacaacagcggccgtggtcgatacaaatcggtcctcttctgtagcaaccacaatatccccggcttcctcgatcacaccctttcccaaagagattgacgagcctgtgatcgttacaacaaagccggcatctcagtcgagtggcctgtcactccggatagataccaaagcttcagaagacacaagcagagacagttccgactcgaaatttcaggtcgttctccccttcacatccaagcgacggaataaaataaaccggtcgacgtcctcgccaaactcgtcctcaacacctactgttggttcaaactcacaaagtagagacaactccaccgacccatcctctcctcctgcctctactaccaccgtcatcgacagcagtaacaacaatgatcacgatgaaatcgtagaaaagttcgctgccgatggtcaatcgactgcaagttcctgctcgggtctaactgggcaggacggagatttctcgccggcatcctccatccagacgacaccgactacatccattaactcgtctacccagtccctcgctatatctagtgcaaagactcacccggtctggccttcgtcccccctggatcaagcaggcccaccaaaagagacctcgccttcccttgagcacgaggtcgagtccctccgagcgtctctctccactgcgctctcgaccttgtccagcatgcagtccacacttgcctccagccagtcatctctcctcgggtcccacgcccaattgtcagatgtgacggccgagagagacacccttgctcgctcggccaccactttcaagtctgagctggctgatctgacaacatcgatcgcccggtcagaatccagagcggtctcggccgaggaaaagcagacagagctaagtgcagaggtcgagcagctcagaaaagacctcgagagagcgagaagggaggtcgaagatggtagaagatggggcgaggagcgaagaaaggagagcgaggatctgagaaggaaagaaaaggcaggcaggagggagatcgaaaagttcaaggaggaaggccgaaagtgggaagtctacgaacgagaatttagaagaagagaatacgaagtttgtcctttctcttgctctctgggcttgtcgtttgaacatgcataatcagatctaacgaagcacttgctcccgctcttctttgtcgaaactagttgaggtttcaacttcatcatttatctaccatgcacactactctgcttcaccacgcccggcaacttgaggctcatctccgagagaccaactatgcgttcgccccgatgcctgtccagacgccgatggccattcctcctgcatcttccggctcttcttcatcaacttccgtttcgactttagccggagcctctattccagcgtatcctgcttcgccatctccttcatctcaagtaggttctctgcaaagcccaagacagccaagaagcccgatgggattccctgttggggtttttgtttccatcgccgaccctatgtcggccccgactgcttcgagccaacctcatccttatcaatatccacattcccacgcgcatgtccagacgcattctggacgtggaaagcccagacgaggcatgtcatcttctgcccacgaggagagttccccaggtccatcgtctggctctgtttctgtgccagtctcgggatcggatccttcgccagcaccaccggcatcatcgtcgtcgtcgtcagaggaagtgacgaaagacgtattaacttcgatccttaagacatcttcgactttacataacggttcaagccatccaccgttgaggccaccgcctttgatctcgtccacctcgtctttccttggtcatcctacctctcagactcaacccactgttggaatgagcaaggagggatctaccgaaaacggtgatgaaggaaaaggaagagagagtgaagaagatgaagatcaggaaatcagctttgcatctatcatgtcatatgacgccaatgccagtccattgcctcgacctgaaggagatgatatcgaggatggtcaaatcggtagcggaggtgggttctttggtgatcaatcgtccagaaaagagcaggacgaggacgagaggtttgcgatcggtttagaccttccccagccgacgtctgggtcagaagtagtgaatgataggaaaaaggaagcggacgaagagtcggtagcgacgccgacagtggaagcgcctataggctcaaatgggacttgattttttttccttcttttttccctctattgcctctattcaaccctcatgtggttgtttgttttctttgcgctcgctttacctcagtcctccgttgattgccccaaggcctatatatcgatccggaacttatctccctgcttactctctttttctttctcttttcttccctataatcgcctttctcttcactacttgaaaggaactagtgctctcctcgtagtttcttagcataaccccatccgtctttctttcctctattccacttcattcgttagctatcggatgataaaccatgccgaacctaagagaatcattctcttcgccggctattgataatggtatattctgacgtctgcactcggctgaaatccatttacaacggactgaattccatttataccacgtggctttctttctccctcggttcggttagacgggtgaattcattaagaagtaaacaaacgaacaatcagataacgaaattgaaaagtacgagcgatcgatcgatctacctctgtcctctctccttcttatgaactggacacgttggttcttttcatccggaatggagcctcatcttccgatccaactgacttgggagatacgagtaagagaagacaactgcgggtgtgggtgcgaaagaagggcgggtaatcgtaaaacacgataaggcaagacataggccttacagaggagaattatgccatgataaacttcgaagatgagatgatgacaagggacgatacaagaacaagcaggagcagagtatgtttgttttgtgttctcgcttcaagttgtccttaaactccgacctaacaaagagaaggaatggttatcccatacatccatctctctctctcctaatcagacgagacaagatgatagcttgacacatagaggtaaaggaaaagaaacaagaacatgattccaaaaaatccaaagtgacagtaagagagaaggaagaaagaaaaccaggtgaagaaaaggacagattcttgaaatacacagataagatcaggcgtaggcataaagaaaaaaatggcctcttgaagaggctataaaacgggcctcaagaatgagatagaagaagacaaaatgaagcgaacgatatatataacgaaaccagagagaaaagggggaaagggaaagaaagagtggaagaaaaggaaacaaagaaagaagagctcttccacacaacaagtacactactcctctttttatatattaagaaatatcaaagaaatatagaaaagaagaaccgaattatgaactccctttcccttcctccccttccaaacatccatcttttatctagccagtagtctcgagcccgtcgagagcggtgactccggagtcatcctgctctcccagattagtaatgtactggtcgaaatcaaactctggtaattcatccatccccaaaagactgtcaaatccgtgagtaccaaggtctgtcgatccaggtccgtttgcagaagcacccgtcaacccggggttaccgcttccactcgatggatccacctgagccgacggagcccattgttgatggtgttgctgctgctgctgctgctgctgctgctgagggtgagactgctgaggtccgaccgcattagatccagacgaaggttcaaacccgtcgatcatcggtgtactgaccccacctgggttattcatagacagcggaagaggtgaggtagaattcggatgtgatgatagactaggatgtgggtaaggtgaatggcccgtggatgaaaatggttggttcgtcggggtagaagcggaatgatgaggggaaggcgcggtaggtgcctgaagagaattcatatattgctgttgctgttgttgaagtgacatcggtgtgggctgtctgctcggtccaggtgaaggtccatccttcggagtagatgccggtggtctctgctgtgtctgtcaaagcgtacatggaaagaggaagaggaagagggagaggtcaaaaactccggaggaaagacgcgatggtataggggcagtcgctatatagtagcgtgcacaaagagaagggagaaaataagagaaaggaaggggctacgaacaggaagagcaaccggaatgggttgaccggattgaattggtgtcgaaggtggaggcatcatcgttgaatctctcggggtattacctgcgacatttggttgatttctcggactaggggccgtcattggtccagctggaccaccacccgtaacgttactcgcagatgacccattagattccccttgggtgccactttgcgcggttcctcgtcgtttgggacctgtcgaacgagcagagttgggcattccatttacgagatgcccaccgccccctcctcctcccgctccaccggaagacgggtctccattggaaagccgagccatggcttgcatctgctggtcttggagactaggaaacggagagtagtggggatccggaggaggctgcatgaagcttcctggactacctgcatgaggagacccacccaaaggctgctgggctagctgcatctgacgctaacaagaaaatccgacagataaggaaattatcggcaataggacaccaaagacgaaggcgagaaaagacacatacaagcgcgccattagaagggcttttcttcatctttttcccttctacaggctgaccgtcatcagtcgggctcgagctccgtttctgatgttgcccattctgttagagacacaaaggagcaaattcggtggattagactcagatggacattaaaacaggtagaaagaaggaagaagaaaaaaggaggtaaagataacgtactaagaactgttgctgttgctggataagttgcgcctgctgctgagaattcattatctgtcgctgttcgtggatctgctgaggtgttagcccttgaacgctatatcaacagaggcacccaagaaggaaggagtaaagtaagtgatcaagcaagcaggacgatgaatgagaaagaaggaaaggaccactcacccagacctcggctgagcctgaccaggtgcccttccaggtggttgattcattcctagctgcatgccttgctgttgggcaaggctttgccggtgttgggcaagagcatacgtgtaccgaccttggacaagggcctatcgtaaagacaacgacagaaagagaagagaagatcgataagctacatgatcgaatgccagagagcaagaaaactaaggaaactgaccttttcctcagctgtgagggttgccagatctctagctgccaagccaagatagttcaagacctgtacgatcaacccggtgtctaacacgcctctgatgccgagtaactcaaacgggtgctgttgtcctgatgagagttgttggagctgcccgccctgcggaccttgtgttggagcgcctgatgctccacctggacctccaggaccagcctgcatcggtggctgtcctcctactgctccaccagaaccaccaggttgaccaggctgagagtgagagttatgtgtcctgatgagttgaggttggagctgggtcgattgagctgggtgaggatgaagatgctgttgatacgatccggctggagagggccgctgaccgggatgagatccgtcttgagtgggatgtcccatcagcccattcggactaggggactgcatctggatctggggaggtccttggttgtggaaccgctgctgctgctgctgctgctgctgctgctgttgctgttgttgctgttgttgctgttgttgctgctgctgaggaggaggcatcgctccgttgtaggccggagattgatggtagggtccacccgtggtgggtggctcagtaggatggggatcacttggtgcgagcggatgtgccgaaggaggctgcatgtgatttgttcgtggggagggatgagctgatggatggaacggttgagcgaatgaaggttgctgctgctgctgttgtgggccaccagccgattgaggagtctgagatggcggtagtgggagcccgttcggatcttggaaaaaccgatgatgagtctgtgggtatggtggttgaccgcctgtcatttgagcggttctcggtctacttgcaccggccgagccggctggaattggagcctgtccgggttgaccgcctggttgttgagcgattcgggataacacgcccgatggtggatggccaccggcagcagcggcagcagcagcggcggaagacataaagcccgattgttgttgttgctgctgatttggatggttgatcgtgtcctgaccgagcgattggccatggacgtacactctagcgtccttcccgccttctctacttgtcctcgcgctaaagacctcccagaacacggtccaccattcatagagtaaaccctgtctcgcatctatcggtaccttgacgtccgataattttccgagaccagcctcctgggccaacgcgttggcggaggcgaggaagcgtcttttggcaagatagtctgcgatgtacatgtcgagcatcgagcttccttcccataccgggctcgaaggggatggcgagagcgacggatgcatcgtcgactttggtgacggacgaggtcaattcgatgtatttgatggatacgtcggaggtgccaggttggatggttggccgagttgttgttgaggaggttgctgctgttggcctagtggttgctggccagtagaagcgtccgtcgacgcgacgggttgacccgaatgaggatgtggatgggaaggaatccctggcccagaagggtaataggactcctctgggggtagaaactgaggattgatcggtctgtatggatgctgctgttgctgctgctgctgctgctgctgttgcttttgctgctgctgttgttgttgctgctgctgctgctgctgttgttgctgctgttgttgctgttgcagttgagatggtggtggtggttgagaatggggaggccgttgttgggaatgaggttgaggttgctgttgatagaacacgggaggggcggaagggtatgacatccggtcgtgttctttcagtgttctttgatgccggtcgtattcgtcgttctttttttcgtctcgtgtctttcaggatcggggacggagagcgggagcgagggaacggaaagatgaattgaatggagaagaaagatgggagaacgagaaaaggagaaaggagaaaaaccgggtgaacacaaaacacggaggatgtatatgtgcttggctgattagatgacgatgggatggacaagaagggagagatcaaagagaaagaaagaaaggaaagtgaacagggtatcaaacaaacgatgtaaaaagaaagagaaaaagggaaagagaaaaacgagaaaaacgagaaggagcgacggacaaaacagataaactgtccgaggcggcgagcgacagagaaagtcattagagaatgtttgtattgtggtactacgatttgatagtgagtttcctaatcagaccgaaacattacacttttatcccaatctttctaatggacaactacgacgtttttgtagtctccttcattttttttccttcttgttctccttctgcgttttctcgtctacttgatcggacattctcgccctctgacgcttcgaggagacgcttcgaaatcgttcattcaattcattcctccatctgcctttttctctctctctcttttcgtttcgacatatgcgttccatctggcatgtctcctctcctcttcacatccgcactcgcactcgcactcacgccttagaattttcctctcatcaccttgcgatagaatatcaggccagcagctatcccacctagatgagcggctccgtcgatcgttcggttctgtggagacaaaccaaacgaaatcagtttttgtcagaatctcactctacatccttgtaaaaaatattttctagacttacaccctgccagtatacttcagatacaagctcaaactgaagttttttgttttttttgttttttgttttttgttttttaaaagaatgaaaaaaaacacgaaaccaagagaacaagagaagaatagatgaggatggccaagttccagatttagtgtttgaaataaagcagagggaaaagaaagattaggaaaggatttagtctctcctgctgtcatcacaccatttacactcaaatctgaacgcaccaacgaccatccagcaagcgcatatcgagcgttcacagggaccacaaagaacaataaaagctccagactaggcatagccgctgccgtaaactgacatcactcagacagaaggaaacaaacggtcagatccaacatttttagatacttgattcgacagatgaatcatgtcaatcacgaacagcagttaacccaaacatgctcccggacgctcctactcctggagccttgggccaaatcgtccgtgtcaacgcgctagccacgttccctgccactcctgcaaatgcgtatagtgccaagaaccgagcgttgcctatcgagctgtaggtgaatggatgtgttcaagaggaatgttcgtatacgagttcaggaaaggtgtgcatgtatcagcaaggaagcatacatgcacacgtcagaggagcatctaaccgagttatgttcgaaacgtacctgatgatctgaggcgcgaattgatagacaatcaccatgttgaacaagagatgcaacggagcttcgtgagagaacgtagacgtgaataacgtccatcttgtgttgttgttcgtacacccgattattccagtcgattagccatcatagactctcttcaataaaaattaaatgacgatgaaacgatgacgaaaggaaagaacaaaacatacattcgaccctccttcaagttaccaagagaaagcgcccagttctttctcatccagactaacatcggtgcctcgttaaaattcgagtacttcatccaagctatctgccatacaccgcacactgccacgttggctattgcgatggccccgaccaggaaaggagcatgttctcagttagctagctcttcttcccatccttcctttgcagacatattaaacacaaaaggactgcacttacctccgatgattccatacaccttccattcgaaatcgtttacaatgtcagcagtcaaagccttctccgagagagcagaccaaaagagcattgatcactcacgatctgttttgttgagagcctatcccaaggtgctctcttgcctcctccaccacctcgaccggtataaccataacttcctcgaccaccacttcgtccagttcctgtaccccgataatagctgtctctgatcgcccttgatacatttgatgttgaaaacgatcgaactgagaagcattttggtgccgtcggcggtcggaaggacgatcggagaacgtccagagacgggcgagccgttctggtcgagtgggaaaaagaacggaaggctgcgcatggggtcggtgatgaacagagtgatctcgaacggagagatccgagtacatatagagcgctcataggtatatgtgtgtaagtgtgagtgtgagtgtgagtgtgagtgtgtatatgcgtatatgcgtgtatgtttgtgatgataatcgatggctctcttgacgagaaattccggaaggagagaaagagagagagaagctgatgaagcggcttcaaacgcccgatcagccgatgttagggttcaattgagtgtaatatcttcatctcattgttgacccttgctgtccatcctttctcggatgactcccggctcgatctacgttcgtccttctttcttatagaatcggctcaaggaaggatatcatcaaggtgtcatgctcgcagttcgatttcatccaaaacatcttggagctctgtacaaaccggtagcaactgccgtcgtaaaagtaccaaatctttcatccctcaccttccgatcaatctctacaactccaatcacaccgtctcctcctccggatatccccaaacacaacaagcctgatcggccaggctcatcagatgcttcaggctcgagcttgagctcgagctcaaacctggtcaaagcaaatgatggatcagtacctgttgtgaagaagataaggaaacgcaaggtggatatgatgcctagtcaacgaaaggtagatggtgaagatcatctctacgattttagtgtgtccctttggcttctttcttttctgctctccttcgcacatgtttagaatagaaagactgatggattcaatcggtctgatacttcttgtggatctttttttccttctctgaaataagaccctcctaatccgttctttggtgagctcgattcgacattgacgagccatcggagggtaacagcaaaggatatcgcggcgcgagaggagcctccaacgcaagtcaaaatgctcgtccgagattacattgatgatcacctctacaacgttcgttctgttcttgatatcacaagcccgtctagtctgtcggtttcaggagtctgggaaaaagctaaacaaaggactcctctgtgagggaaaatatatatagccacaatacggatacttctcctccccacaactcgagatctttaccacggccaccaaagacggctatgactttacctctttccaatcaagtttcgacttcgaaaacaccgtgtctcaccgatacgctgagtacgtccagttggagagagagaaacagaaggcaagggtgagtatgggggaatacgaagatgagatcgggaaagggggccaacagctttggcatacacctaccgagcttttcaaggcgagtgatgctatcatatccaaagaatctgcctcgttgcctagtttgatgaggagagcaaaaatcagtctgtgcgctgaccgttgttcctctgtctgaacacaaaaacagccgtggtacggccgggctatcgcgtcgtgcctcgtccaagactataagcttaatcattttccgtaccacgatatgatcatctacgagatgggagccggaaacggaacactcatgaccaatatattggattacatcgaagaagttcatcccgatgtctacgagcggacaaggtgaggcagttggttctttgatatgccatttacctagtgcagtcggaagaagagaccttctactaaaccgacttccttctctttgaccgaaagttatcgaatcattgaaatttctaaaaaactagcagataagcaaaaggtggttgctagagagaatggccacttgtcaaaagtgaatatcataaataagagtatattcgactggaacgagcgggtgcttgaacccaactactttgtagccatggaagttctcgtcagttggccttcctcctctctgatatacccccactcacaacagatgtgctgatgagtggcatcttcttcgggtggcctttccttaacaggacaattttgcccatgacttgatccgatatgatctggagaccggtctgcctgtgcaggcactggtggtgacggactacaccggagggtttcatatgatatatgaacccgtgacggatccatacattctccaataccttcacctccgagcattgcttcctcagccgctgtgccagtcaccttcgttacccgatatgtacacccggtttcctcttcttcggtccatcagagccggactgccgttcgcgccgaatctaacgaaaccagaatacgtgccgacaaaagcaatgatgctgatgggtatccttcgggattatttcccacatcatcggatgctgtttagtgattttcacaagctcccagacgcggtcgaagggttcaatgcacccgtcgtccagaccaggtacaacggagagatgattccggtctcgacgatcatggttcgacaagggttctttgatatcttcttccccaccagtgcgcccctatctctctatctgttctctttccttgcatttgatcaagtgttgactgtgttatcgtgtctcttctctctgctgaaagactttcgattgttccgagcgatgtacgctcttattcaatctctaccctcactaaccgaacctccggcccatctccggttcaccccgctaaacaacccaaccgaactatcgttcatttcctccaacccgacggcgatcccgccgacgttctttgcttctaacccacctgtctatccgggtttaccgatcccttcgcctgaatcacttgtcagaccggtgaggaacggaagtaagatcgagatttatacccacgaggagttcttgacgatgtttgctgaggatccgagtaggacgagagtgaaggatggaacgaacgtcatgttcaagtggtgtatgtcctttctttcttttgttgaaagagcgagacgcgaatcctcctgacaatcatgttcaatctatcaaaacagtcgagaacgcatccttcatcttctgaacccaaaaaaagagaaaagaaaagaacaggaaacttgatagcccggcacttgaatccccgaacaatcaagtctcccagtatttctaaatgttgtccaaccccatatccgcgttcatacacacattctaagttcggcttcagagtgaattgtccatgtctcgatctcaattgacaagggagaaaacgagatcatgcgctcgttcacagttgtataccatacgtcgtgacctatgtatattcatcgatttcaacataaccaggaagaagaaagagagacagaacatgcgtttccatgcgtatctggagaggttagggtatactgttaaaaaaactgagatttgtacaaccaccagacgaacgaatcgagaaggaagaaaactaaccttcctccagatgagaagggagggaaggaaagagagaatgggagaaggatggtatcaaaacaaagaaactcgggtgtaagagtaaagctaggagtagtggtaacgatgaaagcagaagcgatgatcatgcatgatcgcagacgggccgatcaaagaggatggatatcaaaaagaaagaaagaacgaacagtggaaaagatgactcaagagggaatatgttgaatgaatgcaggccgttgatgatgtcatgctgttgctgctgtctgttgatgctaagggaaccgtgatagtgatactgctgatgattgtgatgccaaagatgatgataatgatagagacgaatgcatcacacatatgtccctctcaagaagtcttcgtgtgttgttcgaatggttgtcgtttttgtctgctgccacagagaggacgatcagtagagatcagtcaagagaacgcatagaagttcaagaagaagacagagaaaaagtataatgagatgagacaaacctcaaagtcttccatagcttttctaaatccgtctagttctgtcctcataacggccttcaaattgactctcttttccttctggtcctcccaactctggatctcctctcttgatctttcccacgaagcctcctctgcctttatacctcccagagtggttctaatggaccttaaccgtcttccggcctcggtcgctccggagagtgtgatctgggaggtatctcccacggtggagagtgagctgatcaagctgtccgttagaaaccgaagttcttccacccggcgaatggtcgattgaacgtaggaagacgaggagggcgagggacgggagggagaggagaaaggtgagggcgagtcacctaggatgagaggatcggcagagtggttgattggctgtgcaggtgtaggcggagactgaatgggagccagaaatgtttggtgaacagcgggactcgagaacccatccaaagttgagctcgagctggagaaatcatcgagaatagacgggcaaggatcagtgtatccggccaattttttggccagacttgaaaagtcgactgaacggtgatcgagtccgcccgcaaatcgtttccgttcatctttattatacgtgttccgctcagtgttcatcccctccctctgtctggctgatgcctcgatcttgagcgcgaaagctttcaaggcgctctcgagtacaaagctctgatcgtccttccgcaagagaggtaggaacgatgggggtaaaatgatttgagagaggagtgtagatagagaagaagaggcagagaagggagtggagctagcagagtccaaagaagatgaggaggacgagattggagagcaagggggagaagtgggttcatgaaaagggtacatgctgtcgccaaaggagtctcggggagccatgtgttcttgattgtcaattccgtttttactgtcagttcctagattgaattcgtccaaaagaaaagatgtcggatagtccgatatacatggatcaaacgcgccataggcgagctcatcacctaggctctgaccttgaactgggagagaactaggatcgagatcgaacggatccgcgaggtccaagtcgagttgagctgataggcgagcgggcgtgtaggtatcaaagagtggttgtgagataaaggatgaggtgttgatttctggtcaagaacttactgtccaatctatctatcatgaagtcaacactccgatcgactacgtgttcgtcatcatcaccaccactgtcgtggtcaccctcgcgtccatcgctaccatatcgtccatcggcatcactctcttgatcatctatgtcgagtccaaactcgtcgaccaacgtccttgcggttctcccgctgtgggtcgggtcgagactggaggatatctcgtggtcaagggagatcataatcactgatggcgatgagtccgaagcagaatccggatggtccggacgagaccgagcgagccgaggatgcgaccggggttttcggaactggccgggctggcccatcttgatgtttgaagcttggttgtctgaggaatcgatcaagtctgattgccagacgtgagaacgaatgggatgttgatgtaaccaaatcggagtgcgatgggaggaaaaagtaaccatacgtttacgccagcgcacgtgacgtaagtgcattgttgcgcagcagctatgcttgtttcgatcgctgccggattaactgagagcgaataaacagagggatgagtgagttgaaacctcggaaggggccgcggagtaaggagcagtcgagtgattgtctgaggatcccttgtgttctggaacagtcagccatcaaatggcgagtagaccctcagcctccgctattcctgttcctgttcctcactcacaatttacattgtcagtttcaggtctgctttccgggcctgggaaccggagcttgagaccacacagtcatcgacctggctccaaaggagacaatcagacgagagctagggatgagagggtgttgagaagaataacaaataatcagagacccgggattcatcccgcgttgattgcccgtgtgagataggatacacagccgcactttgatacatctcttagcctactccgtggctgagccgtctcgatcgactctattctttctgttactctttgtgtctctctttccatccgaagcggcaccatcttcccctcttttttgcccgttcccaccgcttctctgcccgtcctcacttacatttccctctcctttcattcccgtttgctcgcttttttgttgtctttgattgactcgatgaagactaatctcggtacagaaagagagagctgcgaaggatatacacactgatggatcgcagctatagcccattcacacagcctactcgacggcttattcgctaatgaccattctgtgttcgtctccgattaaaattcggtcgctctctcggggtttactcgcactcactcactcactcacattctgttctgttctatccaccgctccttcacacgtgggacacgtaaggcagacagagggatcgacaaaacgggagagacacactcccgacacccgtaatctaatgttcttactcttcgccccttttgccctttgctctcttagtccttgccctttgctcatctgagtcttcaacagactgtgcatacatcatcttttcaattcatatcggagtgtgtgtacactctggactgtgtgaatatgtactccctctaagcaaaggcagctcttctctttttcttcttcgtcccacagcttccttcctatcttcttctttcctttcttttctctctcgcctcttagttctcttggaagaagcagaaagacggcaacatacatacacacacagcacacacagcatactcactcattcactcggtcgctcacttgtagacacacatacacatacacatacttactcacttacacactcacatccacaccaggatctcttgtgccttaaatcaaccctacccagttctaaacctcacgatcccgttcttccgtggaaggttgtctcgcctatcctctcagctgatcatgcatccgtccaatcacccgaccaccgttgtggacaacactcttgcaccagaaatcacccgcacactctctttctcctctttcgactcgatttcgtcttgtgaggccacacagagtaccactcagaattcaatgtgctcttggtcggcccgtcgaccatttagctcaagagaacgctataccaattcaacttctacgccgacctctaagccgatctcgttccagaacacaaactccagaagggtggacgaatcgacaaaaccactctcagacacccattccgttccttcgccgacagagctcgtctctacggccacagacacggaccagaccgacgggtttactcaacagggtcgagctggtagcgagcacaactcgaatcaggacgggcaacccgaccgagagctatcgaccactggtcagttctatcttgcttccctttctgatttgaatggcaatagtcatgaatcttttgcatggaatgccagcacatacttgcatgccctcccgcctacatcaatgaaagtgctttccaaatgacgtatgatcacgcggttgactgttttctaccttttttttgctccttttgatgtttggaaacatgtacatcccttgtttatagtatcttcagcatcaacagtacacacctttagaacatcctctgtctcacctgtctcgactcatttgacaccttcgttctcatctccatctccatcatctcatgagcccttgatctgcacgacatcaacccctcgagcggagaacgatctgtttcccctcggacaaccaactctcaaaattcggttcagctcggaagagagagaccatgatgttcctccttgcttttacgttcgttcaattcactcatccgtccgactatctaatcatgtttctaaagctttctgaccaaaattgtgatgtgcttcttcgtggcacctcttctatctcatctatagcctggtcaaagtattccgacaatgttggcgttcgagcttccccgacatacttccctccctcacgcactcaacccacgcctgtcaatgaatctcattggtacatggagaggtccttcgatggacagtttatctgaaaatgacagcgagattgaagagagaatgctcgttaacatgggcgtcagcttggacaaaggacttgacctttggaagaaggacgccggattaggtatgtttcttcctccagatctgtcttgatccttgaggaccatctcgaattaatattcctttcttgcagcctggaaccagatgagcgaacagaaaagaagaggtcgacagaaccctcgcatcggactacctggcggaaagtatacccttccgttgacggttcaggtgcctgtcaactcaaaattcccagcaacgttcaacctaccatacgcctcgtttcaagtatcctatcatctagaagccaccctgacgattgataccccaaaaaacccgtttccactgtcagatccttctatcgcccagcctgtcggacgagttacccttgtcaaagccctcatcgggttcactctccttccagacactctgcctaccgttgaaccttgtcttccgccgatcgaggcatttgttcctgcttcgtccatgtcttccatcacaaaccagaacagagatatagaatattcatccgttagatctgcttcggaattgttgaaggacagattctgtcacgcactgggaccgaaaaaagttggcctcggggatagatccgaaggcgatctgaaggcatcatcggtagaggacgcgtggtcggttgatgttcgggccccgaccacaacattctcccctacatctatcgtgcctatcgatctagtactaagccagcagagcctgacgggatactctgctaccaattcatctaccagacccatccgaccaacgggtgaaattattgtaaaagcgattgtgtctagacgagaagctttccttcagtcacatagcatccccactatggaagaggtcgacatgtcgggcatcgtgggggaggaggagatcatcgcttcgtggggtcgtttcgatctggcgtttctgtcttgttcggaggatggcaagcagttgatgctacctagattgaatatcccgcttggatatgatcataatcatccatcttcctcctcgccgacaggttggacacatggtttcaccacctcgctcactgtatctgccgcacaagacgactcggatatgtctttcgcgcccatctacacccactgttcctctaggttttacgtctctctccacatcgcctactcccctaccccgacatcttccactcgggcgcctccaaacatgttccggacattaagtcctctgtcgagaacgcacatcccatcccaattcttgtccagatcactcgtcttccctatcaccatcggttctgtaggcgaacctcaaggagcgagacaccagagaacatggagagaactttacatcgaccgcaccgaatctgatggccagagtgacgaaagaccgagaatggttcgtggctccgctatcgacgaagacggttcatggatcgtccctccgcctccttatcaggtcgccaaaaaccaagagatctacgtcatttagacaactaaagtttcattcaaactctacttttggttcctcctcttttgtgagcacgacgaaaggaaaaaccaattaaatcttcacaacgttcgattccttcactccactctcgaaaaatatcgtctcattcagattgatcgctcgattatctgtaatcaaatacgtcccccgtcagccccgatatgatgcctatgagctctcaacaatcctcttttggcttatttaatttcttgtacttcactaggcttcatacatcactattttggatgttcatgccctttcgacttgctgtaccaactaggttcgatcgttttgccttgcttcttacctttgtttctgttttgcttttcctcctcattgcttccgttctgcttctatctctttttgtgcttggatcttgcttcctatcttcccccttttcctctgctttccctctgctttccctactcctgcttaacttgctttcccaatttgctttactccaattcatcttgtccatcctttatatccccacttctttcaaatgatatcatgaggttttcaaattcacacacgcacatacacagatatatacacgtatgtgttacttgtacacaagaaacttgagaggagagagaaagaagggaaggaaagtgataaacgacatgttcatttttttttgatagaaacgttcgagccgtggaaataattaagattgagcaagtgggaaagccatgaacggtgaacattgaacaaggacaaagttagggaaggtggaaagtgggagagtcaagacgctggagtccgtgactacggccgtgaccacaaaaagaagaaagaagaaaataaaggacagaaaaaaaaagaatataaaggaaaaaacagaaacagttcgtctatagatcaaggggatcatacaggacaagagacagcaatggtgacgatagagaaaaagggtcagaaagatgaagcagaggagagaaggagaagggaggagaggaagagggaaagatacattcttcggatgaggaacacgatcggtgagccgataaatgaataaacacagtaaaacagaacggaaagatggatataatgtgtggtataagtaggagagcaagtaattgaacgaggaaaaaagaatgtgaatgacaagataaggaggattcaatgcgtgtgtatgggtgtgcgtgggacatgaggatctatgagtcgagagcgtacacaaagaagaacaatcagtaccagttgaagaggttttagacctcatacacgatgtgaataacaagtagtataagaaaagagaggaggaaactatactaacacaatgtcccaaagatcatcatgataagcaggacaagatgtcgatgggatttgagatatatgcatgactgagcaccaagacaagaagaggacgagtacacaattgaaggaaaggaaagagaagatccgtttttggggatcgattttgttcaagcctctgcatttttttaatatcttgaggaatttgcggcgtgtaagaaaagattgtgatcggaatttagagggtatgtatatgacagaaatgtatgttttgatcgattgcaagtaaagcagagcgaacgtgggaagatctagattcaactagggatatgttgagtctttttctgttcgtgtgactcccacttagatttctagtcgctcaggtgcatcaacaggttcgcgaggcatcgcttcgtggccatatcaccctgtgataggcccgaaatcaaaagagtggtcaaacggtgtattacgctgcagaaagtaagaacagaacgcaccttgagaagagcagaaaagctagcatcccgaagaggttccggcaaacacgcacgtagcgcttctcgagctctgcagatgtgtcaaaaatgttttacatgaaccgttaggttgaatgataagacgcgtaaggtttaaaaaaacactcataaaaggggaagaaacaacgtacctcgggttatcactcagcctcaaataacatctcacaacatgtttcaatagtctcacagcctggctttctaccaactggtttaccatgttactaagtactgtcccgaccgcgtaaaatcgctcatatgtctgacagatataagccaacccgaggtcgtctaaaagaatcttctgaacaatgaagattgcgaccgtcttggaaagttcggagccggtctccataattcgaagacagagagggataatttcagtcgagaggaggaagttgatcacatccgagttatcattttgctagataattcgaagaaagcagaggagaaagacacaggataggaatgttcagtttgcctaggtcactgcagcgtaccgggcaacacgtacaaaaaacacaacataccttgaccagggctcctatgactcctaaacttgtcaatcgaaggtactcgaacggtcgagtcttactagtcgtattaagaaaagggtagagaaaaagcggaatgtgggctaacatggttggaagaaccaagatagagtgagtcagtacacgttctcaaaacctttcccaaaagaaaaaaagattaaatcaatcaactgctgtctcaccattgaggaaaagggatctagtctctgcatgcgaggccacgcattgtaagagagcgagggcattgcatacgcggttggacgcgtgggcggagagcgtggcaggaagaaggtaaggatagacttgagtgatctcctgaagaagggccgacatgatacctacatgcggaagtgttgagaggagaggcatagaaaatcagcaaggtaatcttcgtcaattaaaccacgcgatagacctaacatctatgaaagtgtatggaaccaaaaaagaggtgaaaaaggcctagaaacttaccaaacgagtgccaaaggacaagagcgagatcgtcatacatttcccgtttcttactcaactcctggagggccccttctctcatcttcgagtctagtaactctttgatgagctccataatctcaccctcctcgttccctgctccagcttgcaaaagaaacaacttgtgttggctttggcttccgctccctccaccttggctggttaaagcactcggtgaaggtagtaggttgttggatgacatgccattgttcacattgacgagactgttaccagctgggttgaggatggatgtagggatgagagcttgttggtttgaagactgggacaaaggaggcatggacgaccatgcggagcgattcatgcctaattgttgttgttgttgctgctgctgctgctgatgttgctgttgctgttgaggttgttgctgctggtgctgctgttggtgttgttgttgctgacgctgctgatgatgttgctggtgttgctgttgctgttgtcgatgaaggatctccatctgaggatcgggattaagcggcgatggaagaggcacggatcgatcggttcacgcaccaggtctgctagctatacgtattaatcgacaggcgttgttggaagaagtctcgagtgattgagaagaaggaaagtatatgtagcaaggttggaaattcttaaaggaagaggatcgtctacgaggggttaaaaggaggaagagaggagagagacgaaataactaagagtaagaaaggaccaaagccggagcgacctgaatatttgaatatttgagtattttatctaagtgcaactgaatacgtatgtgcgtacagcatggtgccacttgtgtgtacaccttctccacccagcgacctgcttttatcagatttggctagatgaatgagtgcgcttgcattgtccttgcttagaaaagcttgagatgaagctttatcatgagacgtatagttgtgtggtaagaatcgcgttgaggtctgtggactatgatcactccatcagtgtaaatctccggcaggcagtcggaccctaccggcattaaacggatagatgctactaaactctaaaacgtcctaagcttgaaacccgatggtggaagcatactggtcctcaactttctatatttgttttcttgccaactcaacaatcaacgttcggtcatcttgagaccagcacattaagaactcgagtgcagccaaatcatttcagcccttgtgtaaactatctcggtttcaatctgcctgaacgcagtccatacttctccctctttttgtataccaatcagatcctcagcttgaataatcaccctcggctcggacaaccaccttcagcacataggatccggctttgtatcggacaatcagacaacaatactgttggttagctcttttgtttgttctacttggttgttatcgctttccgagagagagatgtatacagatgggcgccatccgaggagaatagggaagagactccgtttgttgaccgaaagggtattcaacacataagacacttcggatcggtcaacacttatcctatccataagaactgaccaaactcatctgtattctctcctgatctctgtactgacttccgaatatgcctctcttttcgaatagcttcttctacttggattatactcttttcgaccagccctgtctcatacatcggtcgcccgacatatatacctctgcttcacttagaatatgaccacacgctcctcccctgcatcagctccgatcatcatcaaatcgatacctatcttacaaccgtcacgatttacatcctcatatgttcctcctcaatctcctcctaggagtggagaatccagtacaactagctcagagtctcctggagtagattcagaagacccgaggatgcatagggccggaaacaggttcgggaaccacatacaatcgtcatctaggtcgtcgtcagttgattctgtgaacgacatatccaactttctttctcagtctccccgcggcaagaagtccatcttgccatccttccatgctggagttaaagactcgagttctcttcagaacagaacatcgcgtcatttttttggccagcctcaacgctctatgacaacgtccttcaaacacttatcagactcaatatattctggcttggctctgaaccccggattgatcaggaaactcttcaactctgccccattctggctggcagtatacttttgtttcaatttgagcttgacactgttcaacaagattgttctcgttcgctttccgtttccttatgtttgtatttgtccagtcttccttacgtgcctctacaaagacttgcacatccttgactgaatcgagagggtttccatcatcatcagactcttacaggtatacatgcgctcagctgttgtgtagggtgctacatcgctatagaacgacgagcattcgtgagctccttccttgaatatctgaatatacaaccttcacgttcactcacgttcccgaatgcattatctctatgattcctctgaaggtcccggcaaaaactactccttcagacaacctgatcctcatcgggttttccatcctatacaccatcaatatatctgtttcaaatttatctcttcaactcgtaaccgtgcctgtgagtatttctttactgcagtcttgaaactagcgcgcaccctcttagtcaatggctgtttctattctttcctatctttttgctcatctcgatagttccatcaagttgttcgggcggccacgccccttttcaccattatcatctctactttacttctcaaaacaacgtttagcaaatataagatttttagtttgcttcccgtaataatcggtgtaggcctcgcgtaagtttttttctttcgttctttagacgacaactttcaagaatttgatcgaagcatcttaaattggtaattgcggtattctgtagcacatatggagactaccagttagtctgctatctatcagtatctcacaaataaacagcctgattcgggtctcacctgatcttcttctcttctgataggttcacaatatggggtcttacactgaccttgctgggtacattgctcgctgccgtcaagacggtggtgacaaacttgatccaaacaggggtcggaggccggacaaaattacaccctctcgatcttctgatgagaatgagcccgctcgcgttcgttcaatgtgtcatctacggatggctgagtggagagttgggcatagtctggacattcggaacgactgagatgacaaagagtcaggcattagcgcttacggtaaacggaatggtcgctttcgggttgaacatcgtaagctttacggcaaacaagaagacgagcgcgttaacaagtacgtcatctttcacccaataaaatctcttctccaagctagattgtgttcttaccgtttgtcttgtccatgctctcagtgactgtcgccggtacttctctcctttttgttcttatttttatcttcttgtttgcttttgatgagcactacatactcacacaggccatcttctctcttgttttctcacagctaatgttaaacaagtcctcactattgtgctctccatcgtcatatttgatctctccatcaacgtaagttgtttctcggtcagttttatgttccacaaggctgtcatttttaatcatttatcgatataccaactcctgcagcccataaacggactagggattttcctaacactatgcggaggaggagcctatgcctagtgagtttcacactatctagatacatcatgcctcggacgtgtcgccgactttcttgttttgatgcttcgtgtattcttccaacagtattgaacaccaggaaaaagccaaagtcaagaggaagttgcgatttagatagtcataaagatatagacatgcacgtaatcaactagtatcagctagtatggttcactctcttgagaataaccttttcaactcattctcgtgctattgggactgttctcatgcttaccatgtatcacgaagtcttccagtttttgaactaatgatcattaaggttgcccggcttgacccatgaggttttgtcttgtgtccttatctggactggcctgaggaattatgttgggtcggacttgcttctgctcgacacaagcagatggatcaacatattttcctgtctcaatcaaatcatatgttttcagtcgtgacagcttctcctctctaactctggcctttcaaccgtcaccttcgtatcaaagaggaaagaacatgtccaccgtatattctgacaccttcgcttcgttctcttcaatcacccgaccatcgactgctcaatctagtcgacgaggatctacgccggcaaaaaactgggcgagagcatcagtatccaataaaatcgtcgttgacgacgatgagagtaggtgggtagtggctatcatcgaaggaaaaggcaagtctgtcttctcagggagttttttctacctgttcgcttattcggccatttcgatctgtcatgataaccatcaaactctctttgtgcattgtcataaaaataaaatgaaaacccaccaagtaggggtaggaagagaaatcggaatcgccggtacactacttttcttcttcaagacaggatacgatcagcaactgctaacttcgatattgggtttgcacctttctacatacggatatctttgtagcttatgaccagctgacaggaatgattgccctcactcaagtactctccatttttcaatcgttatatgcgcgcatatacctactcaactcattttcatattgactttgtcgttatttaaagatatctgattctctctcgtttgtcaagacatcccatcacctctcgcttcatgttcctaccgtcattttggtcaccgataccgcttatccgactcctgatcaattcatacctcgagggaagacgtcatcgaagaaacagccagctcagaccaccctgcttgttcaaacactgagagatcaatgggtagatactcaaatcgtacccttggcgagaaagtactggaatgacgaggtcggcaaagatttcatctcacgactcatcattgatgtacgtatctgttccggttatatgaatctcgaattctataatctgatgatcaagacccttaccaatgttatggaaaatgaacaacacaggacgaatctcgaccggcaatgcatgtagcaatggacggcaagtaggtttgatgatgtcttcaccgtccttaagcgcatatactggctcatcgaacttggttcgcttctctagatatcttgcgctatgtgcatcatctgctctgttcaagtttcttcagacctcgatgtctctcgaatttgctcctggaagtttaaaattcgaatggaaagcgtccgaaggtgagtcagatgttcgagcttacatacgatatagtgatcgctgtgtagcttacagtcagtcatatctcggtctgaatcataaggaacaatgtagtgcgtcaggctttatcaaagcaatgggtttcatactcctctcctgatccagattctctcatcgaccaacagtatcgatcctgaaacagcgcgcgatttagagctggtcaataacagagccagcacaaagtctcctatgagtctcttcggtgagcaaagaaagcgtatcctttatagtgactgtgtcaagaattattgatgtgctccttatgatattcaacatacaaggggtactgaatcggacgcatacacccatggcgtcaagactcctccgttcgaatattcttcagcctattcaggtggttaatatcctaaataaacggttggacgctgtcgaaggtatgcagcgattctgaagatagagctctcgaaaggtccctaaaatattctacaatttataactagaacttatttctgaccgagagcgttttgagcgagtcaagaaagctctaaaacctatgactaatgtacgtatttgaattaagtctcttggccatgtacaatcgtgtctaattgagaattatggcataaacagatcgatctcgacaagctcattgcagtcgtatgtaagctcacatacacaaatcccgaacgttcattgttattgacacgggctttctgttcagctcactcaccaagataacaagaccgatgtgcgcagttcagatttgacttgtaactctactaatcacataaacatgtgcaaatgcgaaagatcactgaaaatgctcggcctctaacgaacataggtaactcgagcagagaggcgtgtcactcagatcctcaccctaagggtcgctgtgcgctcacttatagcagtttgtgatgctgttaagggatgtagaagcgaccttctgagcaagattcatatggtatggatcttttcttggctgaacatacacagtcgttccgttgctgacagtgtgaatgaatccgctgtcaccagattctgtctgatgatagacttagggccattgaggctgtcatatctgacagactggaggatgattttggggtcgtggagcgtaagagaggaagtctttcgatgaggttggtattgtttcaaccttaatccaagttaatttgattatcgttacgctaaatgtgcctcgcgttcccttagaaatgccaaaatatatgcggtcaaggctaatcataataggcttctggacgtagctcgtgagacgtaagttcttattcctttgatgagaagttcagactatagtgccgaatatggacctaacaatatatatatcgcaatagctacaaagaggttaattgtctccattcataccagaagagattctcaacagaacatcattcatatagtctttgctacttccagaacgtacacgacattctagaacttgttcgagggtatcaaggttagtgtgtactcttcgagaaactgagcatcacgctgagttcgagatcgatattatgctactcagaggtgcatgatatgccctcacttacagttgctttccaagagagcggaatgaccatgtcattcgacgtggacgatgtaccgtcagacgggcttccaccaatttttaaaaatgtgaacaagaagaacaggaacaagttggtccagtctatttcctcgataattcaatttgaggctgcatatctgactataccttgacgttagattcatctgtaccaccttggaattggtgattggcccaatgtctagacatgatgctaaaccaaatcttgactgacatctttgatatattctcgttctggactcttaagaagaagcgccaacagcgtaagactaagacatccaattctttccttctccatctgttgaactgacaatttctgaagtattgtataattcgcaggttacactgatacactcaacgagatatttctgctgagtgacacgttcgtttatcccttttggagggtagagtcgctgactgataagctgacttcaaggcggtacatctttagcatcattcaggagctggttcaacaggtgctatccaatataggtttgtcgtccatgcgctcaggttttaatgaacgagagcagctaaaccaccgtaccttcccaaggcgcactctaccgctcttctgaagctgtaagccgacgccgcttttcttcacgaaaaaaaaaacaaagctgatgtttacattctgtttaagattgcgatgctcgacttgttctgggtgagtcaggtgtcttgtgaactcatgctcagatgtactgaaacagcctctgttatatgttttggtagagcttttcacatgttgcctcagcattgaactaccagaggcccgagttcaccaaaacaatggcaataaaagggggtcgacatccaatacttgacaaatttaccccttctggtccagttgtgtcaaatgatgtttatgctagcgatacctctaatttccaaattattcaaggacctaagtgagcattatcttttttttattaatcaacaatgcatgcttgaaaaattgaatggttctcctcatgaatatagcatgtcgggttcgtggagtttcaatcgattcaaatccgcgcttctagtctaatcatttccgatctaatggtttaggcaaaacaacgtacatctgttcgatcgggcttttggtaggatatctctctatcgatatagcgtatgatggatcaatctccttatatgccgtatgctcttcagactgttcaagctatgataggttcatacgtctcggcagagtatgtttctttcacactcaacgacgcactccttgctcgtctctcaaatgatgatgatatgtcagagtaagtctcttcattatgaccccttcctctctctttctgagctactttgacccattgtgaattgttaatggtattatatcgatttagatcactttcaacctttgctgtagagatggttagtagtgatacgtctgaccatcaggtcaagacaaacttactcatcttgattatacaatcagcgcacgactggcggaatcttatcactggcgaccagcaagagcttagtcttgatcgatgagctaggacgcgggtatgtattcagagaaattgctccttcgatagaaacttcttctaaatccttcatttattaacagaacatcaactgttgaaggaactgcaatatcacatagcatcgctgaagagctcatcaaatctaaagtcagtcgaataacgtgatgttccacccataaaatctaatttctttggtcaagccaatatctcttgctgatcaagactgtttcatccaggcatgtgtcttcttctcgactcacttcagagatcttagtatgttcaatttacacgttgtatgttaaggcatccgaaatcctccacgattccgattgaactcaagcgcgtcagtatacactatgtatccttcaattgtggcctaggtctcacactttcaggcttcccctctgttcagaagtgagtgttttatgaacgcgactgatacagccatgtgaactgacctgtgaacggcccgtatagtcttcatcttcaagcacaagttcgccctcttactgcttatcttttggttcctcagatatcaagcctctaataatacctgctggatctgcatcttcagatgcacaggaaagggcccttggcgatctctttcaattacagatgccttcaaggaacatcagaagaagaacattatggattgaacgttgctcatctagcatctttgcctgcagacgtattgaggttggtcctgaattctcacaataccccttagtaaatgtaccgccaatactgaaatatgttctgttgatatatgaaacagtgttgcgactggtagtagatctcaatctgttcgagcctcgtcgaacattgccacctgacatgaatgcctttgtatattgtttcaaactagacattgcttctaggctaggaagtatggaacaagaaggcagagctgcctctcgatctaacaaggtcaatattcgccggaaggccatcttttctatacgggaaaagataagacatgcagtcagtagtgagcttgatgtaaatgaacaagcagactacctcaaatttctccagatggaggccgttaatgagttgatgggcgcaaagtagtttcagttttacctagaaattcttctctgtttactctttttttcacagttctctacattttatgtctatcttcatgctcttcgcgtctctcgtagagaattttctagacagcatttatccagacgcgtgtgatagttaatctcattctaatgaaacagaaaaatataaacacacaaatgagtgcgaaagaaaatagaaatatgttcgtatacggaggcgtgaagtttctaggttccgggtaaacacgaatgctgtcagtgtctgtcaggcaattacatagagatgaaggaaaaaacccgactaactatttctcaaagtgaagggtccaagttgaaagaag

SEQ ID NO: 2386 - DNA, 2005 bp, Xanthophyllomyces dendrorhous
gttttctgttcataacctgattgggttggagtctaagaaagaaaagagaggggagggttatcacggacgcaagacaaggtcagaaaagtcacatgcaaggccaaacaggaaaagaaccaacccagtagacccgtaggtgaacggagaaaggaatccaaacattcccacaacagccaaactcaaaattcccaagaccaccgccgctctctttgttatcactgccctcaaccttggtcttaatctagtcgtagttcctgccaccgagactgggtaattgatcgtctcggtcaagatgaagttgaggatcgaaccagcaacgagggcagacgatagatgggcgggaaggtaatgatgtatgaagagttgacgggacatcatgtaaaaggggaagtaatggaacatccaagaaacgaggaaaaacccagtgttgttgtacagcctgtttcgaagatctatacatgacaaccaccatggcgagacttgatgagtacacggaacagaggaaaagagatgagaacagagaaacttacgatcctcgatcggttggatacctctcctcctagctagcgcatctgctcccacaatacccacaaagacgctcaagccaagcacgcaaatccaccaaccgagcaagtttccgatagcatacacctgttggttgtccacattatccgtccagaaactaattccggacaaatcgaatggccagtcaatgggttgagaagcatatggatgatcggccgttagaccggcattgtgttgaagcatgagcacttgaagctcaaagaacttcttgaagaagttcatcgggacgaccttcttcacctctttctcgcccgttcggttagcaactaagcctaattttttaaagtaccatccgataaacattgtcagattgctgtaagtcgatgaagggttggacgaagagaaagagggacaacgtactttcatctgaaatgatttcatccgcaaaccatgttgaacttctttcctgatgagccttgtttccgttgatctcctgctgcttgtacccccaatcaggtagagttcccaatccggtccacatcttgacacttgtcggaacgtgaaccaactgaaaccacccgctctttgttttccatggttctccctcgaagccctcgacaaggacaacttcaaacagggtgtcattatatctagaattgatgtcggccttaggccaagtcgtgaattcttgattggtcgtcgttaagggtgaagcgacgtcatgagtaagcaggtaagaatccgtcatggggtgatacaattgaataatgtccttgtgccgacagattcgaccgcggccgctgtcaggaatatcatgagtggggataatttgccaattgttgttggtatcattgaagggatacccagtaacctgttgacctgtcatggggagagatgtgatgaaaacaactttttacagatgagaacagctgaactcgggcaaccgaggaagcaaaatatatgatgacatgccttgactcgatattcgaccatcatcatatcgaagagggtaacggtcaacatgtgaatgaagaaacatgttggtttccttgtgtcggatagtgatcgtgtctaaatatctaagttctattttttccaatagagtacggccaagaaaaagaagtttgtaagaacagagggttgagtcaagacagatagcgttatgttgattagcgagacaatgtatttaccctgtgagttcatcaacaattcgtttcccatcaaagtctcttggaaagcggcactcatgaaggtatcaccggtaccagtacggttgagaattttgaagtgaagccagaagaaagataggtaaactccaaaggggaccacaataagacagatggttcgagccaagaagtgttttgagaaatgttcctttgagaagaaggaaaaaagattgtcggatcaaaatcatttctgaacattcagtcgtatatgggcataaacctaccatcgtaagaggatgtgatctcttgatatc

SEQ ID NO: 2387 - DNA, 5055 bp, Xanthophyllomyces dendrorhous
cagtccccataggtcccaaacgactgccgttccgatcgtgcagaatgtcaataatccaaccattttgcatccaagagtgcaagccaggaaaaatccagtggaagacagccaggcccaccaggctgttgagaaaggccggtagcgaagctggtggaacttgatgtaggaaagtagagagagtgacatgaacaaaatgagcgcgccgtccaaaaggatgagcctagtctcaacgacgtgtaagttgtctagggaaggaaacgtgcaagaaccagaattgagcctcaactgagaccattacattgcgatgaaagcgtcattaaagaaagcgtaccgaatagaatcaacccagctgaaaaagcagagatagcaaccgggtagccgctctccctcatgatccagtaaaccactcccacagtcaaacttccaaaaacggcgggcatgcttctcattcctttgaaaggaacgttaaggcctgctgccgggtcgacgtacttgtctccgatattttcgaaatcaaataggccgtcaaaccctgaaagataaccagctagaccgagcagcatcttggacaacggtgggtgaacatcaaagtagtattctcgaagtatataatacgaagcgaactaaaaagtcggaatgaggcaagtgtcagcgtttggtttgcaaggcagttgcgaagcgacctgtcatcatgcgagaaaacggtgttgcagacatacttttccaaaatgcacttcgtcgaatctacgaagcgagatgatggatgcatccccagtatatcgatcatgtatgttagcatagaggatcagtcttcgagaaatccgttccaggaatatgatagcaataatactcacacaacaccatcagggaagccaataccccagaaacgaacgatggcggccaacgcgaccagcagacctcccgttgtccaagaccagagtgtttccttctttttccaatatggctttctagcctcttcagaatctttcttgagtgcaagagcatcgtaagagctccttgaataatccacgtttgtctgaggaagagactatttgtttgccagatggttgatcagattggatggggaggacaagcaaattgaaaggtaaacgaactgtgttttgagaacgagaagaaactggatagagaggaatctgttcacaatcctccttgggattcacagccctccttcgaggagcctgggacatatgaacgatagaaagaacggggaaggggcaagagagagagctaggtgatggaacgagggagggacaagggcgagatcaatccatacgagaaaaagctagatcaggcggcgcgggcgaatcaaggcaaaagcttatcttgcaatgcgatataagatacaactcgtcattattgatttgtgtttatggctcttgttttgttcattcatccattcctgttcagctcaacaccatccaatcactctcatcatgtcgcagccataccgctcatccatggccaagccaaatcaaacaaattcaacccctcgtatacgtcatctcgcagccctcgttggatctctcaagactcttcagtattctcttgttgagacagaagaacagatggtcaagttgaagagactgactttggccatgcagactttgagtggtggacaggctgctcagtatgttctattgatctcagtctcttgatcaaggcttttcacagcatgatgaagatgatagatgaggctaataggtctctctgatgtctttggtctcctttctgaatggtgttttttgctgttactgcttctgtcgttatcatcatgggtgtgcgtagattcatggcaacctcccaggtagttggaaaagaactggacgatctcggaagaatggaagaacaaacttcacatcaccgcgagacatcttgttcaaccccagcagcatacccgacggaagtaggggatgatagtctggtttcaaatggtctatgaacccagttatcgagcatatagaggataatatctttgtctcgtagttcgatagttctttgttatttcatatgtataatataatgatcatttcttagtaatcttcttccattataagaataatttgatctgttcttcacaacttgatatcgttatgtttacttagaaagacagttcactaaatatgaataacgagtaccatctaagaaattgaagagagtgacatcgacaagaatgaaaaaaaagctcaagctctatctttcttcttcttcttcctttccctgttctctccatccccaccacgttgctttccttctcgtttggtcatcacccgctggagtgttcgcttggtctctccatcaggaaaaccgttgagatcgtagtactgaggcgcaaactcgaggagccattcaggtcggatctcggtgaccgttcggatgaactgtattaattcaaacaaattgtacaacccaaacgaaagcccattagctttgaatttttaactattgtcctcataaggaaaccgaaggcaagaaaatagaactcttacgttagcagtggttaatacaaattcgttgaaaacaacccactcaggggaagtctccaatccagaccccttgtgaagttggacaatctacacgaaaccaacagaaaactggtgaaccccaacgaccatttacatgtacgcacgaaatcaaactatgtataacttacttggttgtctttcaccgttagatactgtcctttgcttccctccttgtgggcgacctgcataaagaatccagcggtcaaagcctttcggatattgacgtaatagttcttgtcatcaaacggcacagacaccaagtcgagatcaaatcgctccatcgatcgtttcagctggtttcggacattgtcggcctgctgtaaagctcgctgggagaggaaattattccaagcccaattcttgtcgtgttcgttggatttgtaggcgtgatagacatttaagagggtaatatgatccccatctgggtgaacaaactgagccttggcagcatcagcctccctccgagcgtttagcggtcttaagaacacgttgggcactgtttttggaattaaaagagggatgtttgtttgaactcattgggatcaacaaaaagaaagaagaagatgactatgagagagcagagtagtggaacataccagaaagcatggctgttaaactgagcatctcattactgcacctcaactcgggagagacgatgagcatctttgccagttgtggatctaacgggaactcggccatgatagctcccagaggtgtcatatctccttcatcgtccaaagcgccaatgtagttgagcagctcgagagctcgcatgatcgtttccggagcgggagcatccatataatcgctggagaaatagagtagaacgacgtccaagtatgcatttagattttctatgcatacttcgaaacaaagaagatacacgtgaaacttacaagtgaaccaaatccttgatgccaagcttgacaagctccaagaccgtgtttgcgagattacttctaagaatctctgggtgagtctgctcctccagctcgttgataaagtccttctcagtgtacagtctgaagcactttcctggtctcgttcgacctgctcgtcccgctctctgttgagcacttgcctttgagattggagaaacgagcaaactctcgaccctaattctcggattgtatactttttgcttgaagaaaccagggtcgaccacatacacaattccgtcgattgtcaacgacgtctcggcgatgttggtcgagataacaacttttcgaccaggcgcgccaccaggcacagttgccggcggagccggatcgaaaattcgttgttgctgttgcggaggcaacgaagagtagaggggaacaacgagtattggaccgacagcacctccagatgatttcgccaactcatctccttctgacttgatttttcgacaagaatcctcgatttcctcctcaccagtcaagaagagtagaatatctcccgggtcttccgcctgatggatcatcaacaccgttcggatcgcagcttcgacgtagttcgtttccggctcttgagtgtagaatgtctcgacggggaaagttcgtccagaaactttgagcagtggcgccttgccagcgtcggttccgtctccgaagtacttctggaacttgagtgagtcaagggtggcagacatgatgatgatcttaagatcttttcgacgagtggcgatctatgatgcaggaggagagtgcggttgacatagaaaaggattggcatctggtatgagaacgggtgtatctgagagaagatatgacggcaaaactgacctctttaagcagacccatcagaatatcagtagagagcgtcctttcgtgagcctcgtccaaaatgatggtagagtatctcgacaaggtgttatcgttcatagcttccctaagaagcataccatcagtcatgtacttgagaaaagtattgggagatgtcatgtcttcaaatcggatagaatatccgacctcctggccaagtgaaactgcatagacaagaaaagttgttaggagaacgaaaggttaaccatagaagcgttgacggaaactgaccatccatctcgtccgccacacgctttgctacactcatagcagccactcgacgcggctgagtacaggccaccattttccccttcaactgaggaaggtcagagtaggcaacaaattggggaatcctgaaatcatattaacaatgaatgtaagaacaaggcggtcgggaacaacttaaactttactccgagcaaaattgtacactcactgagtagtctttcctgatccggtctctccaaccatgaccagaatctggttgttgttgaactgaattgatttgcacacccacaaattgatgatacagagacataagcacgtgtcgctaaatgtggaaagcgtttaactaagccttcagacataccagatcatagaactgctccatcttctcgtaaactggaagttttttcctggactccaagatcttttggtacgaggtcgagaaagatttcttggtaaaagggttgatttctccatcctggttg

SEQ ID NO: 2388 - DNA, 25498 bp, Xanthophyllomyces dendrorhous
tctccatcctggttgattgaaacaaccatgatgtgttcgattgaatcggactcgatcagcagcagactcgacgcgaacagatgcctaaccggctacaagttttacctaccatgagtcttcgagcgattttgacatcggtttttccaggaacgactccgttcaaggggtcgctagccccactctatcgctcaaacagatcagtacaagaaaagagtatcagcaaacctcttgtgaagatcggtggtgctaataaactttcgcacttgaggagcccattcgaactgagaatagagcgagaactcactaggtaaggattaaatgttccagacatatcaaacgagccgaaaaagaacacgtcctagtcaagcaaaagagagtgaaagagagaagaacagtcgaaagctcttcaaggatggatggacctcggaaggatgtgttctattgtggtgagcagaagtaaatcctgaaattcttatcgaaccgtggttaccgtgccatgaaatatatgtaaccaaaaatcatagaatgatgagctagtatcttgggaagcaaaaaacaacttaacacatattcgatcatgagaatttccataattgtcattgcagaaaagaacaatagtatatttatatcctgcgccatcaagtatgaaattgataggtctacgtgaagatggttccatggtttcctgggggaaaaacaagaaaaaaatacatttgacactcttgtttccttattctcatccctttttgaatctaatcgcatgatgatatttacagtgcccacttctcgagcactttttgctcaactccttcacccatccacttgtacatccctccagctagctccaagttctcagcttcctgtttgaagaacttattgaagtctcctgttggaggagctccacctgcagggagggcgcctgcaacttgggcgagatttacggtggatcggggatctacgatttgagccgacggatcgtggagtatgtaccggaaaagtccgttcaaacctataatgggatgtatgtttgtaagaatacaagaggtcaagataattgttagcagagattgagcagaagtgaaacttatgacagagtgatacgtaccaaaccaattgagaaaataccacgagagggcggaaacccatctgacatctacgatccatacatcacacgatcaagtcaatatataataacaaaactggtatcgacaaatagatagacaattacatacccatatcaggggcagcgatatctctttgaagcatggacttaaatccgtgtgtaagggggaagggcaatttgacttttggattaagaataaggaacatggtcctgtatgttaactctgtgcgagaaacgccgggaataaaagtatctgccatacgaatgaatactcactgagaagaaatccggagaagaaaaagttgatctaacaaacgacgaggcggcaaagaaaacgaattaagttgttatctttgaagctcaacgaaaattgatataataaaagtctaaactcacccatcccatgatcgcaaagttgggtaccatcattactgcctgcttcttcatgttctccatcatgccatccatcgcgccagggtcggtcaaggggttgggcggcgcgccggcggactggtcctcaatcacatttccgttctcgtcacgcttcaaaggagtcttgagaaaatctccgttctggaaaccttctgttaatcgagcggatagtgcctggaaagaggagggaggcaacggtgagaatgtcgaggtggtacgaagaatttgtgattgattcagagctcgtctaaatgagtacacacatgttagagagttagaagacttgattgatgaaatgtacgctgtagccgcagtgatatagaacatatgagagattgacgacgaactgttcgcgaaccgctgcttcgggttgctttttgggggatccatcaagaagttgtgtcacgtagattcggagaagtcctacaaggatctgtcaagtttgaaggcggaccttttcagtgtctgcacacgctgatgttgccgatgacttccggtatagaactgatcagaccaaacgactcaccatcctgaagatcacatcagggagtcaagcagtaccgagaagattggtaagtccaaatcctgacacgaccacgaagtatgggacgtaaacttacaccaaagtgattggaaacaaaacccaatcctttttcgtatattggatataacgtcagcagacgtatttgagggattctaagttaatttcaggactaactcttatctgaggatccaaatacaggttaggagcaggcatttttcagaatatgtctctctcagagagaagatgtttgtagatggttgagaggtcaactcggacgaactgcaacgcgggtgaatatgctaaggtggttacggtagaggattatcagcacggcgggatcacgtgagatgtgaactcaacccagctaattactctcttttctgctctccttttttcttcttttttttcctaagagattcgacgtttctccttcaatcaaacaccaaccgctcatctatacactcaagatggattcctatcaaactccccttagctcgtaagtgttccatcattttgattgaatgcgtttataatgatgcatgtcttaagaaggttgatgaaaattcttcgatggacgagtacagtcgatatgcctcggccgaaatgtcgagccttttctccaactctgtatgtcaaattattaatcaaatgtcatgtatatcatgtacttcttcggattttgatatctcaacccatctaaacgtctgttatgttaaataattccttgaacttcaacagacgcggtttggaacatggcgaaaggtttgtaccagaatatctgcctgacgcggctcacatgtcgacacgtttccctaatccaaacccgactctatgaaccttacgtatcgcaacgaatagctctggctcaacctagccattgctgagaaagagcttggactccctatctccgacgatgccattgagcagatgaagaacaaccttgtgagaaaacgattctgtagaactatctcggtttctctactttcgtcacggttttaatgactcgatatcaaacacgttctttctctgatcgtgtccaattcagacgcttgatgctgaacagttcaagcttgctgctgaggaagagaagaagaggaggcacgatgtcatgtatgttctttgaatctgctgttcaggaaagcatgtctctaatactccgcgatgcatatccagggcccacgtccacaccttcggtttggtcgctcccgccgccgctggtattatccagtaagtaaacgttcttgatactgctggtaaatccaactgaatggctgattcattctgcattgtctttagtcttggagctacctcttgctacgtcactgagtgagtatgccttcttctaaccgagattcaagccatgcgctcacgttttgatctgatgcttgtgcgcgctttgcctccacctacatttacagcaacgctgatcttatcttcctccgagatggactcactcttgttatcaacaagcttgccgtcgttatttcacgattggctgactttgccgagcagtacaaggctctgcctactcttggattcacccacttccagcctgctcagcttaccactgttggtaagcgagccaccctctggcttcaagtaagctttcatttttcctaatatcggtaggcgtcagctcgaacgtctatcttatatcgctttgttttgttctgccttgtttgcgtcaaatttttgtaggagcttctttgggatctccgaaacttgacccgagctcgagccgatctcggtttccgaggagtcaagggaactaccggaacccaagcttctttcttggccttgttcgatggagaccacgctaaggttgaggctcttgacaagcgagttaccgaactcctcggctttccttacgcctacccggttactggtcagacctactcgaggaagattgattgcgatgtgttgagccctatggccagtttcggatcgaccgcccataagatcgccactgacagtcagtatatcattccacggctgcctcaacgagttgtttttgctatatcaaacttcccatttatcaataccgttactcttctctgcgcttcccaaatcaagtccgacttcttgctaacttgaaggagattgaggagccttttgagaaggaccagattggaaggtgagattttgcatttctttattacgctggtggggtggaaactgatgctttcctctttcttttggcacgtatttaatagttccgctatggcttacaagcgagtgagttggcgagctttacagctattcaaactgttatattctcgctgaaatacgctttgttctgcgttttccttgttctcagaacccgatgcgatgcgagcgagtgtgctcccttgctcgacaccttatggttcttccccagaatgctctcatgaccaacagtgttcaatggtttgagcggactctcgatgacagtgccaacagacgtgtctccatccccgaagctttccttactaccgatatcgttctctccacccttcagaacatcatggagggtttggtcgtctaccccaaggttattggccgacgaatttctcaggagcttcctttcatgtatgtctctgtgctctttcgttatacgaatccttttatttgctctgaaatctgatcttgcttttgtgttgacttccagggctactgaaaacatcattatggccgtcgttaaggctggcggagatcgacaggaggttcacgagaagatccgagttctctctcaccaggctggtcgagtcgtcaaggaggagggaggagacaacgatttgatcgagcgaatcaagaaggacgatttcttcaagggtatcctgcctatcctcgatgagctgtacgtgaaaccggcatctctgttccatcatcttcggcttgatgccgagtttttgttcctagtgtgcgggtatgtttacaatcctgaccttgtaatggtttccaaactctgtcctctccagcttggacccgaagagtttcgtcgggcgagcgcccgagcaggtcgattctttcctcaaggaatgggtcacgcctgctttggcgcccttccaggatgccatcaagggagccaagggagtacagctttcggtttgagaagggaggaagagaagagcaagaggaatgaagatgattatgaggttttcggcacgtttgtagatgaaattgtgatacatagtttgccaaggcgatgcacatgccgtaggatatcgtgtggtcggagaagaatgcccgaagagatgttgtcgaagacggaacaaagtactgtgtttgagatgaatcgcagtgtaattagatgaaaggctcaaaatcattacgtcattttcacgtgtagatttcttggcgaaacagctagatgccgaactgccggacaagaatagaggccagtccggcaagttccgttctgtttttccgtgtatatcagccaaagccgatcctatcgccacttgatctttcgtccgcatcgatatcgaaatcacacaacctcatccaccttgatatcagcaacctcaaagaaaacagattaacaatgtctaacgctttcgattccaagcttgctacaaccgacatgaacacccatcttagagcaactcgcagctcaagcgaagatgaggctcaaagatttgtagctgatgattctcctcctcacggtggatcaagagcaaagcaggcggttattgttagttttgtccaattcttgacggctttgaatcgaccgatggtttgcctgatgcgcttgttcgttcttctcttgactcgttctcgttcgatcgtcctggatggttagcctccccagcaaggcttgattgtagttcagcctctgaagaaatgtgagtggtccggtttccagttgaggcctgtactctagtctcgatgattctctgatcacttcctgtcacttccgatttatcagccgagatgcaaccctcatatggtctgtggcttactccgcgtttagatcttctgaattggttctcaattttcaatttgtttctgcgcgatacacatccttgcatactatagctcaggacttgggagctgagaacatcagtcacggagtatatggatcgttcactcatggcttgggaatatgcatgggtttacttggttcgtgctagtcttctctatctgagctctgtcgggaaactatgctcaaagtttgtaaacgtccgttcctcattaggtgctatcccttgctgccctcttcctaatccctacaagagcgtgccccagggacaggtcggacttgtcagcgtgagtattgctctcaatcagttgattttcgcgaaagactaaatgctgagaatttctgccgcatgatattgttcatatagcgattcggatccttcttcaaagctgttgatcctggtttggtcaagtaagttatctggatcgctcatacttcttcctttggtgattggcgcttatacagtctatcttggtcttagtgtaaatgtctgtaccgaaagtatcaagactgttgacgtgcgaatccgaatggacgggatccctcgacagacggtcatgaccaaagagtatgtgtcccatattgagcgtcaaacctcttatacgttgtactgatttaactcacaatcaccccctcttcaagtaatgtttctgtgggactcgactcagtaatttgctggcacatcatctcgccttgttcgttccctcaacttctaccaccagacaccatccgagacttaccaattttcgacttgcatacttgcaacaatagaccaagctacttatggaatcgccgatgtaagggagaccctcatcgagcgagcgcaaactaccttgcgacacgttattggagctcgaactcttcaatccgtcgtcactgaaagagaggctatcgcgaatgagtgggtcctcgtttttggtatatcttctgcaacttccgcaacctagctgaatttttctctggttttcaatcttgtgcaggattgctgaaattgttgaggctgtatgtctttgtttctttgtaaccgtctcctattcacatatcccctctaacttgatgatcactttttcgtcttcatctagcctgctcgaaactggggtgtgactgtcgagtctatcctgatcaaggatattgtattctcccaagagctgcagcagtcgctttcttctgctgctcaggctaagagagtaggagagagtaaggtcattgctgctcgagccgaggttgatagtgctcgacttatgcgagaggtctgtgttctcctatctttgagattgttttattcaatgacctcgtttcaagatggttttattgactcatgctcatgttttcttgttgcgaactaggccgctgatattctcgcctcgccagccgctatgtcgatccgaacgcttgaggctcttcagaatatggcaaagacctccaattccaaggtcatctttggtaggtcttatcgttttttcttttatattttctagttcgaggcctaatttgatttgatttgaattgtgttttcttcctcgcgcacataattcaacagttcctatgaaccttcccaacatgggctcttccgctcctgggtctgcagcgggtaacgagaacttgaatactcagtctggaccttcattccaggctattgctgagcatgcagatgagggtcacgagtttatcggtgccagatcgtctgttggtcaggccggtttgctcaatactacttcacagatctaaactgcacagtcgatctggatcagccaggtgaatgcctaggctccgatatgtctgtttgggcttgttgtcctactttattccgttttaattcttcctggatgtcctttcagttaatggtctttctattcaattctaggttttgtctaagtgtgaatgtccttcaaagttttcgtttttgtccgtgtttgaactagtatcggttgttattggaattattatttttgttagcttttaatcgaatttgtaattttacagtttgtctgtacaaatggataaccaatatgacctcataatctcggtgttaggctcgcaatctacaatcctatttcaacaagactagcgcaaaacagaaagacccttttgttctacagtaacgacatccggtcaaagatacggaagggattatctcatacgaaagagagacagagaaagaggtctgaaggcggcgcaaggggaggaagaagaagagagacggttatctgatcatcggtctgtgccataaactaccctcgtccaatcacctaatacttctacccctccttttcttccaaaactacttttccattctgcctctgctttcacctcgtcataatcatcctcgtcctcactctcgatccgatcttcgtcacctctatctcttttcaacaaaccggcctctttccaaatctttcgacgtccttcccgaccctcatcccacttttctcttcctatttcccttttagcagaaattttcaaacagcctgtcagactaccgcctatccaagccaagagtgacggtgagaaatcgggtgatgagatcatatgttgcgctggggttgagtctagagcgaccgatgtttggagtatcgctgacgatgacgacgacgatgatgatactagacttgcgttgttaatgatagagatatgttgacgaagggagattaccgatgcatatggatgcattggcctacgaatatatgcatatgatccgggacgagagttcggttgagactcggtcagagatgaggggttgattgacggtggtggttcgagagcggcaagtagggtcgatcgtaaacgagggatgaaattcggaagcatgggtgttccacctgtgagaaggatggaagatgccatagggattcgaaggtctattggaagctgtaacaattaaatagccattgtcaaaatgtatgctcaaccgagacaccaagtcttagtatcattcgatgttgtaagactgagagattcaaaggaatggagggagggagaaggactaaccttcattagacactccaagatgacatccaccactcctctctcttcttctacctccccatgattttctcctgtctttctgtatgagaaaagctcctctaccacccgctctctaatccatcccgggattacgagcgtcccacttgctattccctctccgggaagtgttggaatgggcacgaataatgttttgacgttcgagctgtttgcatacctgttgtgtaacatccggagagacctgggcaagggcggaggagcatatccgttgtctgttttttgcccttcaggatcttcttgcggcaatagctcttgggtctctgtgatctcatcggtgtccatccgagaattctcggcctcttcatccaactgtgggtttctgacttcacggtccaaacggcctacaaaacatccctcgctcaatactcgctctagcaagccctttcgtctcagaatcgaaggggtcaatctcagtcttggggtccgaaccatccgggatgagcttccttggctgagagttgagataggtggaatgtattgaccgaaatgaagaagaagtagcgcgagtgttcgtcggatatgggctgaggctagagacgatgaacgcaggtgagtatataaagggcgggatagctgaatctgtcattgtaatcatcaggtttttcgaaatgtgatgggatggcaagtgaactcgcacagaattagttataggatgttgtaattcaaagtagtataggaagttgacgaacaggaagagcgactatctccaagttgcccacgtctattactaaaccagatgtacgtccaactgcgaggagcgctaacaagtgagggggtacgaaagatatcgaagggacctagaatttttattcggtcaaaagaccaatacacgaaaccaaacataagaaactgaatcagatcctaagaagaagaagaagaagagagagaattgacaacaaggggtgtgcgtgtatgcgtgtctgtctaagctttttctcacctggaagtcttcaaacaaacttcgggcgagcatttccttgattcgtgtaggtagaagtggattctccgcaatgatcattcttcgggacttgggatctgtcatcagatgactgaagatctttacaaacatcagtaaagctgaaacgacatctctagatgagaggcttagaaatgctttggaataagcatgatcttgaagaacgtactttgaaaacacttctctgagccggtcacctatccttctctccacaatactttctcccagctctcttaacccctcctcttgtctatttggtgcattatcctgatctcggatctgatgttccacgtcccagtcatcaacctctccaaagcgatccttctttcctacgctctcgaactctacttcccatatcgcctcggttgatgggacctcacccgtaggttgttgtccagaccaaaaacaggctctaggtctgtgttctgccgagaaacctactttccagatccgagagccaggatcaagcacaattcgatcatccgttccgtaaagtgagtgtcgtttgtgatctcggatgtggatttggtaactgggcgacggaacatgagacgttcggaccactatcgggcttgccacaggtgtactgggaccgggtgacattgaattgtacgccaaaatagcaagagatattgtagaaagggaagcccagtagcagcaccagcatcatcagcggcaacgccaacgctaatgtcaacatgtaccggtagtggcttctggatattctaccgttgccatggagaccaagaagaaggccgagggcgtaatgttcggtattcatacatcaacacgcaatgataccggagaagcaatttacattctaatcctatttattttctagcttcgagatgatttatatgctcttctttaggaaaagatctagagtcagtcagtttggctggtggttccaaagaagaagtacacaacccgagtgcgatgtttccataaatcttatacttgtaaaccaagtgagcactcgggcgttgtgctagacgtcatgatggaaaggtgaaggatggttaacgcgtataagccgcgtttgagccgttagggttattatcggctgtgtatcctatgtctcatctctttaggcgggtcgtcacttcatctttaacctatacacgtacaccaacgcatatctatacatcaccatggctaatgcagaatcttcctttcgctcccagctgtcaaactttcgatgggctaactcgatccaggatgatagccaggcggcagcagcacctacagcatcaacttccctctggggatctctcaccagtggtgtctcagcttatgtcccaattcatagtaacgaccgaacgaacgaggaagaagcctactttgcgctcagtcgttgggaacggtcagttccgtgtattatatcatcactcataaaagattttgatatgatggacgctgatcagttgtcaaccgatcatcgctcttagattcatcgcgtttctggcatgcatagccggtggcctgatttgtttcatggtcgcgttctttaccatccctctactcgtgttgaagcctcgaaagtttgccgttgcctttacattggggagttttctgttcatgatgggcttcaccatcctgatgggaccgatggcacatttgaagcatcttctctcaaccgaacgtctacctttcaccaccgcttactttggttccctcggcttgacgctcttctttgctgttggggtacgtctgctttcatctaacctacttcgtttgcgaacatcctctctgaccatctatttttcttttcctttttctcttggtttctctcacccgtactcctctctatcttcttctcgtctctccttatcttccaaacagatgaaatcgtactttggaaccatcatctctgccgtcgtccagctcgttgcacttctatcatacctcgcggcctattgttcgttcctctttttgttcccaccgctctcgtatctatctcttttagaccagatcctgcagagggtaccgtgtgatgcgagtctgacctcgttttgtctgcttatctcaatcggaatacagtcccaggaggtttgaccacccttcggttcggtggtcagatggctcttcgtggagctggcaatgttcttcctttctaagcctttctaagtcttccttttcttttccttctccctatcgtattctttattatcattatcataatccatagcttcttcagtcttcaaaaatgatataaagctctcagcttccattaccaaatacaaaagagacaaggagctccctctctttctataatcaggtcaataagaacaaaacattattcgataaacatgatgcatacgtctaatgtacatgttggcccctctttcccatcacacactcactcccacctctatcttttcctaatttattcagcaaacaagaaccacaaccccccaaagccaactgcgagcaagaccaagacaaccaacccaacgacggcaactccgaactttgcaagatagagctcgacgagctgttcgagatacttgaccattaccttgcctgacagtttagattcaccttccgatcggacgccgaatgagaagggaacttcggcaataccacgagatgggatctgtgctttgacgagtaggtcgagcgcgatcttgaagcctgacgagttaaggttctttgctttgaggaactatatttgtgtgtgtgtgtgcgtgtataagagagggaggcgaagtcagaggggaagcaagggcagcaagagtaataaataaccaagccagcatgatagagagatatagatgaaaataattaggacgtacttcttcttttcgaatcccaaagaacccagacattggatcactcgcgcttgttagaggtagcgccatcatccgcgctcctgaagagataacccgtctgtacatcggccaggaagcgtccatctctactcctttggcatatctcgttccaaggacgaatggctgagcggaagagagtgctgccagcatcgatggaacgtactctggtgggtgctgtaatggaaaggaaaggaaaggaaaggacgggcaaggaaaggtcgttcatatctacacacatatatctgcgtaaacaaaaaccaagaaaaggggacaagtcctgaacaaacctgaagatctgcatccatgcacaacatctttccaccctctgcctctctgaaacctctgacaacggcactgctcaaccctctctcatccgttcggaccaaaattctaacgttgtaaccctctgagcgaagtttatcgatcgtttcgactgagccatcgcgcgagttatcatctacgatcagcacctcagtcgtttcggcatggatcggagagtctggacgagagagcgcggcaaagattcgagtgacaagtggtcggagatttagattctctttgtaagctgggacgacgatggagtgcgtgataggaggttgggacgacatgttttctcaatttgggaagcctgttgcctgattctgtattgaaaacacgtcaaagaagaacagacggtcagcttattacatcaacagagacgatacagaacacatgaaaaaagctgatttcatccccctttgtcgtcttgtttggacccagcactttgctttctttcaatattcctttgcacagtcgcacagtatcaaggtcttttcgcttgcagcaatctctgcgtttccctcacccttgagatgatattccgcttctccggcacaaaccatcgattgttccttcccagaagataacggagaatataaaagtacccacagatatcagtaagacgagaaagaaaaactgcttaaagggggaaagggaacagaggtgggatggtcgaatgcaccaaacaccgattggaatttcgagatcaagagaacgattgaatagtcaccggttactaaccgccgtttcctagtccaaaacaacgcctcttgacaaaaaccaacaatttgcacccacatacataccatggatcaatcttctcatctgtctcaatcaaacacaagccttatcggctcaaccacgaggccggatccgacgaccctagagctagagtcgaccctgctcacgttgtttcagtcgttgacggagatgcaggtcgccgctagttcggtccagcctactaaagagggattggctgccggagctgcgtgcgtttgggtttctttatcttcaaaagataaattttcagctagtgtatagtgatgaaagatcgagatgcttagtatgtgctctgtgtgttcttgtcttgtttcgttggtctcagctcgagaacactcgatagtctcttccagttgtcagagatgaagcctcggatagaggcaaaagttcctatggaagttttggagtatgtttcactctggctcttcaaagtgccctgttcgttccggacaaacgactgatagagagagtgtatgtgaattatagtctaatcgatcaggacaaaaacccacatcagttcactcgaaacaaaattgaagaggctgttggatcgaaccagtattcgcatggtaaacttcaagcgatctcggtgcgtgtctttcgttcctatttcatccctctccttgatttgcttgactgtgattaaagataacaagcctaacgaagagacaatctcaatcgtgttaaaaccttatagtcttatcatagtttgctcgagaaatcgcttcttgaaaactttccggaacttttacaggatgagcaaccgacagccggtcttgccaatgatcatactgagatgaaggtcgaggaaccgatgcggtgacctggcgacgaattgctgtcgaagaaaagaaagaaaaacagggagagccgaaaggaacgtggaggaaagaaaaactcttagtattattgagagagcgacaaataccccaggaataaacgtgggtgactttctggtcccttctagtttcttccctcctgcgtttctttacctctgggtcgctttagaattcgttgggtaacaacatctttcagaataccgattccttatacatattggcgtccaaacttgttttcttgtcggaatcggaaggggaagagagaaggagatcagactggaggacgaggaaagagagagagaaagggggagacgaataaaaatcccatggggtgatcgaacgtgggggactttccggttggaaacgttctttctcgaggtcgtccgacttgccactggtcttttggggacggctgaactcgtgtgacctgatgttggggttttagtaggactgatacggctcccatctcgacttgtctctctctatcctttccccccatctgttttgattcctttcttttataaatctgaattttcgacctgacgattttcagccttcttcttccttgatctcttccttagctatcagcactatatccaacaaagttacagacataaacatacagccatcatacacacagccatgaacacacgatcagctcatctgccgacaccgtctccatctccaaatctctatcccgtggcgacctctcctgtccgcagacggtccacgtgctcacaatacggcaaatctaaccataaccttccacctccctcccctcccgctttatgcctttccaacccgtcgtctcatccatccgttcaatcatccgaccatcctgtcccttctgcgagacaaacctcggcaacatctaaaaagtcgacgagaactcaacgaaagatcaatcactcaatcattgagaagcgtagacgtgtccgaatcaatgactgtctcgaagctctcagatcgctcgtacccggatgggatgaactcaagtcgcttggcgccggcgccaaagagggcgaggacgaggatggctgggttggtgagggaaagggggctggaaaagaattcaagctcgaggtcttgatgaggttcgtgttcacgaatttcttgattgtctctcctgtcacgtgggatcatattgggccaacacgtttctatttatatgcgactcttatttcgactatccgttaggacagtgacatacgttaaacatcttcaggaaagcatcacaagacttgaaaccaagcgcttgagtcgtcaatctatagatcctaacgaaaccgaagaggaactgggtgatgaaaacgagaaggacgaggacgaggatgaggacgaagaggacgaggacgataatactgttgatgaggagaaggaaaagcctgttgtctctacacacatttcaacacccaccaatcctatacccatttcatcttcttttcttccatccattagctcgttgacctctgttccgcccatcaatcgctcagccctctcctacaactcttcagagcaactgccatctcaatctcagttcttcgtccctcctccacccatctcctcttcgttgtctcctccttacttcccgagacccaatgccgtctccctctctccccgatctcaaacccactggaactcgatacaccttccctcggtcaccagaatagaggacccgtccagttctcttccagccatgccgctccatcagcctgctcacatgaatccttgctcacccccaaacctgagtactgcatatggcctagcctccagcccgggcttagggttgtataccagcttggtcaagatcgaagattacgagagcaggggtatgaagcggaagagaatacaggtcgttgaggaggtcgaggccgcttcggcgctcttatcgttttcgaacgtacgcggcgcgtagagttggatctgttctgttttttctattcgctttccttctacacttttcttctctctcttgatcgtccatatctccggcgtttctgggttgctgcctgacttcgataatagactttatagacctctgctctgtgatacataccttttctctgaatcaatcctcctatatcttgccactttcgttgtattattatctttttgttttcactttctagacaacttatcggtctcattcatgttatatctatcattaattcttcggtcgatctacgccttgttcgcttatgtgaatttcatgtcgagcttttctcatctctttatcactgactcgagtataggagacaaagctcatcttgaatcatgttaagctgagagaaactatcattcgagcgaggtatatataaatatagatagacaaagttactatcggttatctggtacaagaatagtaccgggaatgtatgtagaccgtaaacgtatgaggatcgtaatcgtgcgacatgaaacgtagacaaaaatagatattgatgatgaggaagaaagacagaccagaaaaagagaggacacgtgaactacttctattttgagagatcgagacgcataccttccttgctcagttctcaagcattcccatgatgacactgttaacgacagatcgattcatgtacgatccgtttctcagacggtaaactcgtcatcctgctcgtcgtcaaagaatctaattggtgatacagtcgaatgatgtccaagtcaggattccctttactggcaggcaaaaagcgaaaggaaacaaaactggagcagagatatagcagaaagaagaagcttactgatttaaactatgtaaatcgccaaccaactgaccgagcgtcagctcttcggctatcgagcctccgtaggattccaatgagagctgagagccgttgattccaaacaacgtatttggttctgcaaacatactgaaatgcgcttgagactgaacattcccagagaccgtcagcgaaccgaaaaccgccaacatcgacgctctcgccaatctagattgttcctctgctttgggcacacaccacccggtctcgagcggtgtgccaaacacctctccggcaggatccgttagaccgtccatcaccgcgccgaaagtcatgctcattcgaatgacttgagcagcggcaggacctccttggacattgatgggttcagaaagtacctcgagagctgaggcagcaaactcggtgctgagcaaccggagaagcggcatcaaaagctccgctccataaatcgccaagggttccttcgcctctgaagattgaaacacgagcttgagaatcaacatcgttttctctcggatccaatctcgagagttcagacagagaccgagaaggacttcaatcactcggaaaccgttcgttggtaagaaatgttcacggagacacccaactgcttgacggaggaaatcgtctttggttcggaatcgattttttgaaaacgaggtcatgagtctttgaatgctgactttgccttcctgctcagctatcgcgctgatatcatccgccagaccaacaagtgaaggctcaagcgcatcctgatccattccatgaagacaccaaggaagaatggcggtgaatatatgcaaagtacgatcggctaggagagcaagtaggaaacgcgatgatatggcgttagatttgtacttctctcacagagttccataacagggcttaccatcaatatcaagcaagagaggacagtggaccttcgccaagcgagcaaggacgtcaaatgtcatttgatcagtgagagaggatcgaagaccaggaagaagaatagcttgtagcttgagatcatctcctggccagtcatccggttgattttgaagcaaaacgtctacattgtcgtcttcgcatagatccagcttttcaagtatcaagttgaggagttctaaggagaccaagaattcgctctccacggtagttgaaagacacgcagcaacgcaccagaacagctgagggaacgatagaagatcatctgtttccatcgaccggacgatttcggataagctaagaataatctctcgacagaacaagttattgtttggtaggacatcagctagagtgttggataatcgaccgagcatatcggctagcatttgagcagacacttccgggcttaagactcggaagatttggaaggaccggcatgctatatgtcgatcgggacaggcagtgccccaatctaccgccagcgcaccccacacatgccgaagttccggataatatggttctaacaccctcaagacccgctcgacaagtgtttccatccgttttggaacatgcaaagactcgttgtacacatcttcatcaccttgagtccagaacaactcggaccgttcgtcccagagacgaccgatcttatcccaagcgatggtccgaacgttctcatcctcgaggtggacagaatcgcatgtccaggcgtaaaggatctggaacagaagcgcttgagcttgttctctaacttgactagagtgatgatctacttgaacacaggtcgcatgtagaaggacagcaagtcgagggtcgagtgaagattccttgaaccgttcaagcatgacctctccgacaaagagtagagcgagttgaccggtagatagagcagggatggggacagatgtcggaaaaagagcattgaggtctggaacgaacaagttggatggaacaggccatgcctcgtctgcttccggaagagaaaccatcgctgccggctctatgaaacttgccaggtcctcgtagactgcttgagcaatcggagtttgagcaaggcaagcaacgattcgctgagcctgtacgaggaactcttgggttggtcttcgacctgattgctggaagagaaacttgatgatgcaactgctgttgtgaggcaacggaccacaggcaaggttgatccaaatgtcgcggacttcgcttggatggctgtctccaaatttcacagctaagaagagaagattggaaagaagtatgtaactcggaatgctctctggccgagatatcgtttcggacgcggacagatcgagatttttcaagaatggcggtagtatagctaagcatactggacgacgaagggaatctacccgagagaatcggtgagtgcattcgatgagcatgtgaggtgcctctgaaggatgacactcagcgaaagcttccgcaattcgtcgctgcgctcctagatatatgttgggagccgagctaccaactgatggctgaacccaagcaaactcgtgttcgtctttgtttccaagggtctccaccaggttgtaagctcgtcgacggatggccacatccggatgaccaagcttgataagggcaatacacgccttctgagagaaagacagagcaggcggacgagcaaacgataatgtttcgactaatacagagaagaaggattgatgaagtccaaattgatccccttcggagcaacactgatgaagaacctcagtcatgaaagacgaatgttcatggttatgtcgaatcagtgatcgaagtgcttttctgcctcagaggaaaaccccaaaagaatgttgttagataaaagctcgagtctggtagatgactgcttatgtcacttaccgtcctacttcgtgggttacggaagaaggtgtcgagaaaagacctcgtatccattgcaagatatcgttgggctcgagaggaatctccatattggtacgactagagtcggtaagatcagtcacaggaaacaatgatccttgctagaatcataaacaactcgtacaattaacaatcgtaacttgaggacgagaagatcaacgatagttcaactcacacatagggcagccatggctgtcgctgcagcactcgataacagctttgtttgattagacattgttgacaatattgctcctttatcacgatcgctgctagtcagggatccatgaatggctactaatactcttgactctcgagcctgcgcaatatcggcccttcgtcctagattacaccattcgtcacagatcttgaagacagcagcccgtagctcagatgggaagaaccgagatgaatcatccagggtcgccagtccatccgtaagattctcaaccactgcacagaagtatcgtcgaagagggtgaaggttccaattatcttctcgaactaacaggtatcggtgggtccggcggacaaactccaacatggctagcatgagtttcacatcacctaaacttcttgggtccttgatgagatgagagattcgagcaaagacatgagcgacagaagtatacgtccggctactgttttcactctcactggcgcgtcgagcaggagtggatcgaccgttgggctgtgcgttatcgtacacatggcgagtgacactctgaagacttcccagaagatcagccaaactaggctgaggaatatggcccagggcaataacggcagcatccctaaatcggtggctttcggatcctaagtaagagatgacttgttggaagagaaccttggaagaggctagacgttcagattcagcatccctgttcatcgtaccttctgccacagaaagagtaagggctgatgaagacccatcgccactgacggtggtagcgcaaaggatagtaaggaatatcttccattgctcagctagatgataatagtccgatacgccttttgttgttagaggaagatttgatcggaagccagagttaggagctgcagccaaacttgatttagcttggccgttaatcgtggagataattgacctccagttaagaaacacgcgtccaaccaacgtacgcaaaataaggagcgacgatggaacttgttcatagagatgtttaatgaggtgcgggtagtataaaaaccagaattgctgatccgtattgttgtcgctctctgcccacttaattaaaacatccggaggcgtagggtccttgaaagaggctagccgagcttggtccgaaggtgtcggaaaagaagaattcgacatggttgtagtgagaacatcgtgattttttccctccgtctcgaaaagatttatggctcgaataacagattgtccatcagacgatgagagatcctgtatctctgatatcctacgcaaagcagatatagaaagcactcgaagggaccgacatgtcgacgataggaagaacaaggctgagcattcgatctccgccaacacctgagaatcgacagcaacccgattctgctgaggagtaccatgaaggtcgctcacccaaaaggaaagtatgtccacccagagtcgaagcaaacgatcaatctgctgttcgtatgctctcgatccaatctgactggctcgaacaacattatcaccggtggtaaggtatctagaaagcgtaagcgcggcagtttctgctactcccttcgattgagcaatccttttaagagctccagtcgcagagaaggcaacaccaggatcgacatgagcaattcctctacataagatcttgagagctgtgtcggtcccaatgaagagatgactacaccgaggccaagcatcaaacgctgctcgcaagagttcgaatatcggcttaagtgatttcttatatgaaagcttgataaggccgtgctggacggtaaagctgtcgaagccctcagcggatttgaaccggaatgcgtgaaactggtcgtcgaataaagacatctttccgacctctccgtcggctaagagtgcgatgctcccaatcaagggggagagccgatcgaggaaggcagtcacttcgggtttggtcagaaccgtttcagagagagcttctcccgagaaatcatagtctttggagtaggcgaaagaggaaaagctacaagtagatgggaagaccggagttttgacatcatgctccaagcagtatagatggagaagaacagcgcgaatggcaattgccattctctcaggcatcaaaactccatctccaaccttagaagaggaaccaccgtccgacagtcgggattctgccaaaagctggaaaacaaaatcttgaccgtagtcgctctgacgaagaagagtgaaatgaaggatgcatatgaaaacgtcgataggaacctctgatggctggagagtgggctggtttgagggagggaagcagaacttgaacactgtatcgagggaagcagtgacgacggagctactttctcctgagcatcgattcagatagacccaaaggaggcgcattatgctgttgataatgattgggcgagctatgcgatcctacaaattcgataatatatgaagaaaaacgcgagttcacacagtgtcggagaacagagcaactctaagcgaagactaaccttcatctttccaacggcaatgttcagacaactttgccattgctccaagaatacttctcgggtagatacgcatagtgccgtcaccactagagggaagctgaccgtccaatacttatccttactagccatcctagccgcctgcgcgcgaatgatgttgatagccttggcccacgtcgggtgattgacttcggccgtagcgacctgataccatagaatgcagcataagaatgatcagaatggattgaaaaaaaaagaaaaaaccaccagatgcgagccctgagaaacttacattggctataggatgaatgagctcttgcagtgtttctgcgtacgctgttttcagaatcgctccatgtgtctgagagaagaacccggcaagatcacataaaaagtctgcacacatgtcgaaatcttgtggcggataaacctgtatatttgtaaaatgacaattacagtaagcacaaattatggagttgagacaagcagtgaccatcgactatccaccagccactactaataacaaagggaataatttcactaccttcaatttgaagcatttcattgctctcacgatcaactcgaattttccttcggcctctttttcaatttttgacgccgtgccaccaacggcacctgagcctacactcaatccctttcctagctcaactacgaagcgatctgttagagtaaggaaactggaatgtattcgcacagatgattacgtagttagcttttcgaacagtgtaaaagaaaaaatacaaaccaaccgaatgttagctaatgcgcccaacagttctaccaaaagcctttggtttgctaatttgtttggagaacgagacaaggattccctgaggttgaaaacacaatggtctaagcttcaacaagatacagagatggaagattattggaagtaagtcttacatatccttctcctttacaatccatctccaaagcatgtcttcgatcttggtgcccaatgcctcacccaaaacctccttgctaggtgtgtgtcggatgatagataaaagagcgcgaaggagaatatacattgttccgagctagatgtgactcccggagagctgcaagtcaattaaatgtcttagaaatgatagacggtcacgtgtactcacattgatccgttcgttgagcattgcagctgcatcggatactccagaggtcgacattccaggtctggtagcaggtttcacgttgcaaaaagacggatacaaccagatttagtattgaaaatagaagggaagggaatccttcttcatcttctctcgaagcgcagaaagaaagatcagatagaacacagttgaactaacagatgacttctcactgctcctctacccacttcatcttccaacacattgttcctccacttgatcagacaatcgagcgcaaccttagcgtctcctccaccccatgcggctcccattccacctggcccacctctgcctcttgatccactgctacctaaaactttacccaaaccactacccccatttccgctgatggcgaccgctatccccaaactttctagggccttgtctagctcggaatcctttccttttcccacgatttcttctattatcggcattggcttccccagaggccacctgtttgcattcaccaagccgtcgagatggctggtggtgacttcctgaaataatctcaataggaggtgcagagcaaattgaggaggtgtgctaggaggaggcaggctcatctgagatggtgggacgaaggagtttgttgttatcgataggctagagggcgtccttctgtgcttttggggtaatcttagagaagtagggagggggggcggcggtgtagaattcggagagtggttagcagagaacccagaagaggttgtcgacggtcgagattgatgaaagttgatggatgagctcgacagtgcaactgatccattgcgggctttccgtgttttattgacgttgtacgaagaggcaaatgagttaggcgacgttatgggattgttgttcatggtatgcatggtggtcgccgacgcggacgctgatctcgagaatggatttctcaggacaggatagtttgaacccgcgcttgagtccggaagagcagaagagttacccaaccctccaacggatggtgacttgtgcatccctagcgagcttgtggctgattctttctttcctccgaatgttgacctgagcgctccaaagctgctctttttgacgatctgtttcagcggtggaggtgggggcagagtatcggatccaaccgaattgctatgtttacggcttccaacagttggaggtccagccgttgctcgagcagaggaaattggtgattgagcagaaacagtagagtctttccgaacagaggatgagggttctgattggttcccacccatatagctggaaggaccaaatccaccactcccactgc

SEQ ID NO: 2389 - DNA, 24892 bp, Xanthophyllomyces dendrorhous
  misc_feature (23828)..(23897): n is a, c, g, or t
ccctccccctccgaacgggccgaagggtgacaagctgccagactggccaaaccgcggagcagggtaagagaacagctgctccgaatcatctgcatcatcgtctagagacggaagagcgatctggaaggatggctcggacgacatgtctcaggcgtttgtcgtttgacccgctttgtgatgacggagtaatgatgaattaagaagctgagcccaaagttaactgcacaacaatcaattagggcgggaaaaacctggtccgaaaagtaaacgtgtagtaatccgtgggctgtatctatatgtgttctgcctatcaggaatggagagatgcctatgcttgtattggtatatgtgcggggcgacggcaaaaaacgatgaatgtcgagagccgagatggtgttggccgaaaaacgtccaaagtcattcacgtccagacttaacttgttctcttccgccggtactcatccgcgtactcttcaatcatgtccgttcctcctctttcggttaattcggacgacctagtcaccgtgagtactggtaaagttgaagccaaaagagtgcttagcgttcagagtcatgtctgttcgggttatgttggttcgtttctcatattctgctggtcgattcttatcagctgttggagatgccttgtcttgttctactctttggatcacttctttgactgtgttctaccttgggctcggtggtacgttcaataggaaacaaggccgctacttttcctcttcaactgctaggctggaatgtggatgtcgtcaatactgttcagttttcgaatcatacgggtcagtcgattttatatttcgtcttattcagccttccgatgatacatcgtaatcatactatcatagtcatgtttatcgctatgttttctatctaatcagggtatggacacacggctggaactcgaacgactgctgccgacttgaaatccatctttggtggtttgaaatctaacggtctactgaaagctggcagattgctcacaggtgagtatgttgtctggctcttgcatgatatcttctaaacaatgcattttttcggatctgaaaatctttacgcgtacatttctatcgactgggatgtccttgaatacatcttaaggatatatccccggaggagaggctgttcaggtcgtcgggaagctagctcagctcataattcaagagagggatgcatccagcaaagatcgtttgatctatgtgttagatcgtaagtttgagtcatcttttggatctgctcttcttgccttgtaactgacaacaactttgtgtctcctctcataaagcggtcatgggtgaccacggcacactctatgtggctgaaagtgttattccgatataccgatctctcctccatttggcaactattgttacacctaaccaatttgaagccgagtatgttgtgctcattctctcactcgaatcttctgatgaagatgtctttctgatgagttgtttgcgcttgggttgctccttctctatctaccaaaagaacactggcctctcaacagatcaccactcctcaaagtcttcaagagctcttacaatctcttcacaagacgtaccggatcccgcatatcatcatctcttcattcacccttgccacccccttcccagcctccttactccctgggcctcccgtgcgatacatacaaaaactctcttcgcttcctataaaagaagagcagttgtgggagtcgtatccattactatactctgtggcttctacttgggacgtcgaacgcgaagagcttgttgagacagttgtattccaatttcctcaaatcaaaggatacttctctggtgttggcgatctgttttctgctctcacattagcgcattacaacccagacacggatgctactgtcgctcgagcggcgtcaaaagcgttattctcaacccaacaagttttactctctacccatctcagtttagccgagaaccgggaggaggaagagaatgagggaagcgacgaagagaaggatggcgaagacagaagtcgaagagtgaaacgaatgagaaggagagaacttagagtagtcgatcttgaatcaagaggagatcttactgatggggagggttggaatggacaaaaggtagatctatcaagtctgtaatgtgcagactgatcagattatcctctagatgagcaatatgatagacaatggataggcgcaacccttccttgcaggggattcttttcctagttgtaggatacaaagtgatatctccatattccagtttaatttctgatggacattagagtcgttttattgatagtagccgagccatccagtgtttgtttaccagaatgagaacagaacacaaagagggggaaaagaatctaaattaattacagaattagagcaccttgcatgcccacccgctctcaacagcctcaaaccttcttgcccatgccctccaagtaagactcaaacccaacagcctcgagcttctctgccttggccataacctcggcctccaattcatccatatagtcttgcatgtcctggatgagatggggaacagaagcagagatgatcctgacggcgagcaaaccggcgttggtcgagttgttgatggcaaccgtggcgacagggatccctcgctaaggagaaaagaaagaaagaaagttcagagacaagtggaagacgtcagctgcagtcagcgtttcgagttgatgatgatttgacatggacgacatacaggcatctggacgatcgaatgaagcgagtccacgccgtccaacacgctacccttgaccggcaccccgacgactggcaaaggcgtcaacgcagcgaccattcccggcagatgagccgcgcctccagctccagcgatcaaacatcggagtcctctagcaggcgcatctctggcataggtaaccatcctatcgggtgttcgatgggccgagacgatggtcaactcgaacggaaccttgaactttcgaaggatctgagcagcggcggccatgacaggcaagtcggaatcagatcccataatgattcccaccaacgggtttggtgaagagactgcctggggagtgatcgggcaatatttctccggcaaggtggactgcacagggagagaaagcttgaggattggtccgactttagcgaggagttcttcgtcgctatcggcaacgacggtgatgtgacccatcttccttcccttccggcattcggtcttgccatacatatgaacggaggcaccagtcgtggcaagagcttgagagatacatgcgtcgatagagtcaagcgtggaagaaagaccgatgagattgatcatcgccgtcgacggaaccttgagggcggtggatccgaggggtaacccggtgatggcacgcaagtgattctcgaactgagatgtgtgcgaggcttcaatagtgtggtgaccagagttgtgaggacgaggagcaatctcattgatgagcagagatcctaggggaactcaggtgatgccgaacaaaagaaagtggtttgtagatttgtcagtaggaggcaatacaagagaatgataagaagtgttgaaaccatgcgcgcttcactcaccgtcaggcatcaaaaacatctcgacaccaaagataccggctccagacaaacaagcgaccgccttctccgccaactgcttcgctttcttgttaacctctcgcccaccattagctcgtaatgggcagagcgttaacctgagtacgctgtcttcgtggacggtctcgactggatcgtaactcttgacttccccatttgtcgtccgaacaaccatgacggcaatctctctatcaaatggagcccacttttcggcataaagtggtcggtctcccaaaaagtcgagagcagccttgatggcggaggaggaaagctccttaagaacgtaatttcctctaccatcgtaagcaagggttcgggccttcaacatgagaggcagtccaagacgctgaacggcctccgagatagacttttccaccactgatgtatctttctcatctcgctcaacgccgacgaactctgcgacgtcgaccccgccgttcttgacgagatatttcttttgttcaaacttgtcttgaatgaccttgattgtctttgagctggggtggacctcgaccttgccctctgcctcaatctcagccaacacatcagcgttgacatgttcaatctctaccgtaagaatatcaaccttggaggccaactccttgatatgaggagacgagttgaaaggaccatcgatgtgagtgtcgtgtccaacaggaggaagaatgacttgtttggcaggtgtttgcgatccggcatcgagaatcagaagcgggatggatagaagagaagctggatgtgcaagcattcttccgagctgacctccacctgagtagagtttgaaatggtcagcagagtaaagaaaaaacaaaagttgacgaacagatcatcggttagcttctgcaacattgacatttctgaatcgcttttgaaacaggctacgacggatctagctgtcaaaaaaaagccaaaagagtaagtgaccacgcaccgaggattccaacagtcttttgagaggagctcatgatcagttctatgtatcttggtagctcttagaatgcaggctggagtagatggtagtataggataatcggttgcttctagtctcaatcgttcagatacgcaaaagagaaaactggttgaaaaaataaccctaacctatttgaatgcttagtcatcagactaactcaccgttgacctcatgaatgactataaaagaccaaattcttcctattagattgacgttctacttgacggtgtagacggctccatctttatttgtcacaatcagagtgacgaggaagaatgaactgtcattgataacatgaaatcgattgaacaaacaaacagataaaattgtccagatagttccgagttatccaaaaagactctcgacatttgtagaccgctgttgaagcgcttcgtacgtatatagttcatgtctcggacgggacgactggttgtttgatttggaaggttttttttccaaaggtgaacatgcggatctgactacattcaagatgtttgtctttaattgttataaagagactcaatctctcccgttattttctcttctgctcttaatatcatatcaactcctattgggttgatgaacgcatcataatgaatgtttgacgacatatcgaacaggaaaggttagataagaagtacaggtgaaaataaatcaaaaaaactccaggctcacacttaatatgttgtagctctttttatcccatccgattcaaagtgtactttatttttaccctgccaagaactccattgcctaaaaaaaaattgttggaaacagaaccggcttataatcttacggtatgcactccatccatctatccatccatctacccattcatccgtcagaggtactcagactagagagaccaatcaaggcttctctggtctcagttttgtctgacttgaagtcattgtttttaaaacttctttcttcgcctctatctttatccctttctcggcctttcccccttatattttcatcccttcgcgtttgcccgtgatggttgaagcaattcaggtggcatcaatacaacatgggacgaaagaagatcgagatcaagcgtcttagcgatgaccgaaatcgaaacgttacgtttctcaaacgaaagggtatgtttggaattcatctctcgtacaagatgtttttaccttggcttgtcgtatttatacttatctctcgttttttttctatctctgtttctcctatgctgatctagctggattaatgaagaaagtaagttcgctcatctaatccaatctttctttgttggcttccatccagatgttcatcgttcattctgtctgttctccgtctatcttcaaggcatgggaactcagtgtactttgttcggcagacgtaggtaccactttgtggtcttgccgggcttgatctctatttatatccttgcgatgcctaattagggatcacgattccacctctggtcattcctttctcttcctccttcgtaggtggctgtcatcgtgttcggtcataacgggaagcttttcgagttcagcagtcgaaacatcgaggatctccttctcaaatatacagaggtctgttcttcctgttttttgaatctctctttctcttctattccgcgccatcgcctttcgccgatcgtttagtctagagattctctatagtcgtgaactatagacctctctttctctcaatatgtgtcgggccagacactatagattcataacatatactccatgagttttttgatggaacagttgcactgatttttttatttctctcttattctcattactcgcttggttcggtgtacagtacaacggaacgattgatcacaagtcaccctcggagtttgccgcagctgcagttacagatgactttgcccaaagtgacgaagatgaggaagaagcgatcgccaaaccaaagccgacagtgacaacgacctccggatcatcatcatcatctgccaaaacgagaaagatcgccgaggctctcaacagggttcgtcctccgactctttgactctgtatattttgatagtattatatttcacatcgagctgatcatggatgttggtcgatcggggaccgtgtcttatctatcatgctatgtcttactagcgcgggtcaactcattcggattcttctcgactagagcccgctcaatcaacttcgcctcaagtatcccgttcgttactgtcatccgtcatcaacccctctgctcaagtcaactcgaaccaaggatctagtctacatgcacctcagtcgcaacaacaacaacaacaacaacaacaacagcaacagcaacgggactaccactacggacttcacggttcattacttcagaattggtcggccgatcagtttggtaagccgagtcacgatggcagtttgaacggaaatgaccgagccagtatcaacggacttcgagactggaagaatgggcagggtcaaggaggaggagctagcggtaatgggggtggtggaggcaatgatgagggtaacagatcaggcggttctagttccgtcgtcggtgctggaggagatggtccaaacatgaattatctgtcgctcctgaggtcatccttcccgaacgccaatctctctgatgggttcgcaaagtcgccagggatgcttcaaccgccggtaccgatgagcctgtacgatccttctggtctatctccttcgtcccagctatcgttctttatgggtcagccaaacccctacggggcggtctcgacccctacagctgcttcacaagggatgtttccgaatccaaacgacccgttgtattctgcgatgggtctctttggaggattgtcgggtagtgggggtattcccagttctgctaccggtttgtctggtcaagcaccgatcggatcgacaaacgacgcaggtggtggcgcggtaggtaacccgtatatgctctcccaacaacagagcacgaccccttatcatcagtcgaaccagtatcgatcgttgctcgtcccaaatgcactcggcccaccaccgacgacgatgggagggcatcaacagcaacaacagcaacaacagcaatatcgacagcagcatccattgtatagtcatccaatgttgttggccgccgccgcggcggcggcggctggccaaatgaatccaaaccagcagccatcaaattacaaccaacaacagcagcagcagccgccacaaacaaattacccttcgggtctcagctggccggtaacttcacaacctggcggtaatacaggcagtgcggcaggaaccggaatgggagtaaacactaatggaggttctggagctggagttctttccgatcggcgtgggagcgagagcgtgagttcggagaatgaggaagacgatgaccgagaactaggagaggacgaagaagatgaggaagaatctgacagtcgaacgacaggtcggaaaaggttggatcgggagtcggacgacgctcacacattaggcgggaagaaggggcgcttacattaattcaccgggacggtttggactttacatatctctttttcacttcttctttttcatctggtggtacaatctacatctgttcatctctctctctgtgttgcccttgtttgtgacatgtttgcaattgtaaaccaagacctacgatctcctttgaacgatatatgttatgacgacaggcaaatgggcttccgtgtcctttcctcgttgaaaattactatgtaatcgaagaaatgaaaactctgaagaactcggggaagtatcattatatagtttcagccccgcttcatcttcgacgtcttttttaatacgctgaaagattccctttcattattccagagtctagatgatgatctcttggagtagacacatcattgtcggagagtaaagtgggatgcatttaaggtttggcgaccgtccatcatttaatgagaggccgaccaattggagctcggtcatcggtccaaccgcaatctattcaggctggctagatcaatgaaccgacctggatttcactcctcttgttttcatttctctcctctttttctccgctatctcattaccctcgtcttaaacctcgtactttggccctgcccaagttttcccaacggtctttcaactccgactgtttagagttggcagggttctgtctatcttttcatatgttttcatttgcttactccttcggactggcgcctcttttaatttgacacaaatgaactgacgagactgtcggtaattctgctgctgctgcccttccatggactgacctgacccgtctgtcgtcatttctgacttgaccaaatgccgcttacctctgtccttttgtctcctcctctgctcctttctttcatctgatcacccattcgtgtacgtgcgttcagtctgcagtctgacgctcacctgcatcgatcagctagcacgactagataaccttcattcgcccctaatcagatcatcattcattctgtctatttgtctcatgcatcggtcccatcaccccttttccctttgacagggcggacgatgtgcaccgttgaaaaattgtaattgggacaacccacctcatcgacccctgcgatattctctgcctcacacgttcgactctgcctcattagctcgcttgggccattcatcaggtcctgtcctgcgtgccttgtgtaaggcacatacatgtcggtcgaattgtttgactttaatctctgtcgatcggtcgctcctcggcggaagatgttgtcaactatctatattaactatatgcgctgctttcctttgcttcctacggctcctctccactcacccattgacccttttgtcaaaggcagatagatggcttgctatctgagcacttggtctgattactatatgaatgctcgttggattgtctcttccgttctcttttgttctttccttcctttctttcttctttccttgctttctcactcactcactttctttctttctttcactcacaccattctccctttctttcctcttcatcctcctctgtccctcctttctctccggatccatcttccgggtcgtccttgcatcgattcttcttcttcttcttcttctgcttctcttcgcatccagccgtcctcctccgcattcgcttgcattcccctgcatcatattcttcacaacgcattctctcactggctgctaaactcatacaccctgccagacatttttccttgcatctgcatcttgtcattctaccccatcttacctccaccaattatccagcatggaagcagttctctccgctaacaggatacgcaataagaacgttaagaacctcagcctggttcattcaaaagaatccgatgccgtccttcactcggtccctgtcgatttccctccgttgttctccccatggaccccaagcttcaacgctgcactcgctgacactactcctccaacggccgacagcctggacgaatcgtctccgtcaggctcgtcacccgaatcgtcatcctcgagtactactggcccttcgttggacatttggataaaccgggcgtcacccgctcgagatctacagagtttgctcgagagcgaggctatccggagaggtctgtcgtcggtaagtttaatcgatcggtttccttgaacttcattcttctgaaatttcagccatcaaattcccgaatctgattcctattctccgtcaatttatcttgtgtggctgaaaaagggtcccagcccgacatacatcacagatccttccagaaggtcttccgattctgacgcgggaagctcaccggggcaactggtttttccttctttctccagtgcgtcccttccgtggccacctaatgccaaggcagcgcagtttcgacgtcacacgctcgcccattcagtcgatgaccagcaaaacgacagatcttcaggtgccaaacaaaaatgcccgacctttctccctgccgtacaagaggcgcccgggtttccctcaaaccagttcccaccttcaacaggaatatctccagagctacctactcctacggcttctatctctgcgcccgtccccaaaatagacccgacgatgccgaaacggtcgtctgccaaagttttcaaagtgccggccgacccaaacactaaaacgtctggttccaagaaagattccaagtcttctggtcctcctaaaattccgaggccaccgaactcgtggatcttgtaccgatcagaaatgatcaaagcaatcaagtctgctaaggaaagcggccgagagtttgagatgccgaagggtgcactggccaaggcaacggcgctgggcatcgaaaagagcttattcaaacaaggagacgacagccttccatgcgcccaggcagacgtatcaaaactgatctcactcttatggaaaaatgagacatcggcaatcaaaaagatgtacgatgatcttagcgcggtgaagaaacaggaggtccgttctacatcggttctacctttgactcttctctgtgtcgtttacttatccgccctgttttatgaacgcagcatgcaatcatgtaccccgagtatcgcttccacccagtcaaaaaagtctccaaaggcaatcctatcgaagaaacccgacccccttcgccatcgtcccctccgcctttgacaaaatccacatctgtttcgagcagaggtccacgaaagaagaaaacgactgtcaatacacgcgactctgccaaaaagcctaaagggccatccaagactcgatatactccgatagggcgaaactcaaccgaccaatcagtcaagcagtctcagtcgtccggcgcggcttctccagaacgtagaacagagaacgacccgcctcaagaaccttattgggtcaacccaggtgaacagctccggtttggaggttgggtggtgccccacccgacccaactgcccacaggaccgtctccgacgttgaaatcagcctcaaccgactctcggtcgaacgcctcaatggttggtttcgtattcatcgattctagtctgccgatcccatgctgatcctgttacctgtgcgcttgctatagaatgaacacttggttcgatcccggatttctttaagaaattaccccgagccggctgcgccccagtctttctcgagcgtgaacctggaaccttacccggcacctactccgttcgcttcaggtttctcaaagattcagccaccggcttactcgacccatccttctccccagtcatctgttggatcgactttccaatactcatccttcccagtctatcctcaatccagttgccactcacccaccgtcttgcctgatgttgacatgaatcaattcatgtttgattcttcgacctattccgtccgaccaacagacattcagccggatgtctctccatttaggagagattcttccgtatccgaacagagtcccggtcacttggggggaactcaagagcatgacctggcaaatctatggactctgttggaaaaccagccatcgagcttgcctgcagagcgcaaactcgaatcctattgtggatcccctacttcatggcaggctcccaaaggaatttgggaattcgatgaacattccccagagtccaaatctaatgggtctagctatatgtgagctatcgtctaaaccaagtatctcgcttgccagatcaaggcgatcaatttatccctgttctgttctacatacttttcttcattcatctcctctttgttctcgttattattctatactcttcgaccatctatcatctttctttgccatttcacctctttttcgacactatttcttgtcacgtaatcttctaacttctatagactccactatctttcacgagccgttttttcatctcgcttttgcatctcgcttgatctgtgtctgtgtctcttacgtcttggtttgtcttcctcggctcaccttatctctctctgattgttctcacgtttcctttctcttggtctatactgttggtcttttgccttgtagtttatcatccctttgattctttattttggtcgttcacacatccctacaatgtagataacttattggggtttgattcactcctcttctatcccatctctttcacccagtgacttcctccgttctctgccttcatcagacggacttatgcttaccctcgacgtttacactactatatgcgcctccttccttgcgtctttcctcttccttactgttcgttctggatttggttctggttttccattggtttcgtcgttttgtattgtgctgtctttgtaagcttcttttcttcaatgagtcgccctatctgcttttttttattttttttaaaataaatcgtttcttcatcttctcctcttttcctttgttttgtggtcggatcgtcaggtattcgaccctgtaaatcgtcaaagatccctccgtttcgcgtcttggaacctcgcatcttgtattctgcatctcggaatcatggaatctcggaatctgactaggatgtatgagatatttttgatcgaagaggaacaccgtcaacttcaggacatatctatagcctttggctctttctttttgatattttagtctcaatccgatcgattgatttataaactatgctacaaatcgcattctaggaaaaataaagaaaggaggaaaccatgcctctcccacctcctgtccacagttcatccgacaactttccttttcaaatctgttgcaccgtcctcgtcaccatcaacatcgatcggcttccccgacccgaatgtggaaccagccaccgtgctctctgtcgatagacctatgatcgaatgatccctcgttgacgagtttaattctttccctgtcaaatctaccggtattgtgaagtttgaaggccggcgcaagcctcggtcgtcgatcactgatgaaaagttcggttcatccgctcggctgcctttctcgtcgtgatgaatgggcccggttccatccaagccggaaggcgggttgtccaaggggatctcgggagcagatcggccggcccatcgttcaccccatcggatgatggcacatacaaaaagaaatccaatgatcgtcagtcctgccgcccaggtgtctgcccaacctacaccaatcttgttgatcagaggaaggattccggctgttcctgcagcggaaaagacgctttagtaagaaaacagataaagacgaacgccgtcagttcaggggtggttttgaagtaaaaaaagatgaagccccgtgttgagagaaaggatgttggtactcactatcgcatacaattgttgatcgctgaatgaatcaatgaacgaacaaaggggtaagacgtcagaagagacaaaagaagagaaagtctcaagtatcatgaaggaaagaactgaccgataacttcggccgaacgactttgaagacagtccacacaacttacgagccagaaacatacaggagggatagtcacgtcagccagtcaggatgagtaacgtgccggaaggatacgggaacataacgcactatgtgttcgcgcttgaaaagaccagcataagaccaaatccagaagaaactaggtattcctcaaccaacatcttagattagcacataccactccatagtctgacaagtcgaaagattgaacgaacacataaaaacacaaggcggggcgagcccgcctgcacctgtctggatggtccaacctgctccgatgagcgagacgggaaggatgatccctctgtatgtgtgtttgtatgcacacagaagatcaaacctagtcagtacaaaagacaaggacaagacaaggttaaagagaaagaatctttgtacaaaccctcctaataatgtagagtacaatctgtcttccggccgacctgtcgtttccgaggatacgaagatgatatgtaaacatgctcagattgtttgatacggaaaccccacgaatcaaacaagagaaaaatgctcacggtatcctctcttgtcgatatacttccgaaccaccttgtctgcatacagtcctccgatccgactaccaatgatgttacctactccttgaggaagatagagtaaaccgacgatggcggcatttgtgattccatatcgaggttgctacgttcaagtaattcagtgcttcatttagcaatctacacaacaaactgtcgaatatcggtgtatgaaagtgaatgatggaagtaccatagtagatgttatcggcacgacaagcacataggttgtcaacaagactagcgaactgttcaagctctgcattcagaataagagtaagaacaagttctcggagaaaccaaggtgaagaaaggggaggctaatcgagccaaggactcacgatgaacagaatgtttgtgaaacgcaaaagaccgacactccgtactggattgaaccagtacattacaaacttcttaccggtacgttgtttggcaagcatgtggggagtcgggccgtgccaagtctcaggactgaaagaagaattgtattggtccaggaggcgatgacgacaaagagcaggtcagaatgacgggaggcatttgtagaaaaacgggtcgaggcgtacaggaagaagaatatgagaaccaatgcggctccaccagcgcctgctaagaggtattgagtacttctccatccaggggcggtgtactgttgcaaaagactgaacacaggaaccagaaaggaagaagaaaacgaaaagatgtgacacaacacgttaaaaatagtaataaaaacaacctatagttagagaggagagaaagttgaacaaagtttcctcaccctgcaaatagtggtgctaacgctggacccactggaaaggtcaaggatcaatcgaattcagggcagtcgttctagtcagtgtctgatagaatgatagtctcctataaatctgctcaaaacttactgactgctccaaggtagaacaagcccatggcgcctgctctctcgatgggcgaatagatatcgccgatcgtgcctgctccaacactcagcacggctgagccacctgtaaaagatgcatagagaacaaggattagaagatcgagcgaactaggagatagtttgaccacgaaagagaataggaaaggaatgaccaatggcctgtaaacatctggtggctatcaagctacccagagtgttggagaacgagcatccgatactgccaccgatgaatataggaagcgacgctagatagacgttccgtctgccatagaatccagatagaggagcccagataagcggagctgaaccaagaaacaagagctattcgagtagacagaacaaaacacaacgatgagtacagagttctcaagcgataaggggaccaaactcttcacccgatgatcggtgacgtacaaagatagcgacggtgtagttgatgacttctttcgttgtattgacggactcggccacgtctggaatactaggaaagaacgacgctgaggcgagtgctgtacacgtttaaccagaagaggcaggtcaggacgcttgcacagttagaattgataggtatgcacacttgtagggtaaaccaaaaacgaacgagataggaacgcggcgaaagataccagacaagtgatcgctttcttgcgccgcgctgtacaaagtgcaaaggacgccaagtcaaaacaagtttaattcatccacttttggactgatagcaaacaacagaacgtcgagcagggcaagaacgaacgagagaacttgaggtaaacctcgtacggatcgaccggtttgtgagtcatgtctgcatgcggacctggcaggtctaatgacttctcggcgtctgactccaactctcggactaggtcgagtggaacagatccctccgatggtgaggagttctcagttgccataaatgggatgctttcagttaatgggatttatgtatctttgtctgagcttgtcctgaaggtatggcctgtgtttttgtcgaactagataggagaagatgagtgtaccgaagagaaagataggagcaggtcatcaaaatactttgaacgagtcaagttttcgaggaaactctcttcgtcgggtatggccgatgtaagcgaaggtacgtccgaaattaactcgtcggctggactgaggcctattaaaaccctcggttactacctcctccggacttagccgggctcggtgcccaagttttccgttccttcgttcaacatacgatcatcagctcacggaccatccgtacaacgtttgtcatttgtttctcatgccactagatgtaaacagtggatgcgtggaggactcggaggaggaagactttatgtcagatgcctttctagctaaaatccttcctccggctacaacatccaaacgatcgacccagtcaacgtcttacaatgataaacgaaaacaagcccaacgtgcgtcagaagctcggaacaaggccaatgctccgaaaagcttcagacagcttcgtgaggatgaagaggaaaggaggaaggaaggtttgaagaaaagtctgttcgaaaaggaacaagaggccggtcaaggacccagtaaggctttgaagatgatgatgaacatgggattttcagtcggtgatgtcagtcatctgttctacccttgttctcttcctttgatttctttcattcagagacacaactgatttgatagctttcaaacggtttgtttcgtgtagagtctaggaaaacaatcatcaggacagtcaaacaatgctatcagctcgactcccgcggaccgaaaagaagctttgaacaaagctgagaatacaagagaacatactcatgacagcgaagaagaagaggggattagtgagataggctgttcgaagcgacgaaagatagagagccaggtcggatcagaccctgaacctgaacctactgttatgtccacttcaaaggccaagatagaacctctaggaatcaaactctgggcaggtttgtctagacttcctaatcctcttttttttttctctctttttttctctctttttttcccttctttacctcacgcttcctcagtaacaacctttttgtgtccctgtgtgcttatgtgaaatcaggtcggaaaggtttaggtgctcagccgaaagcttcactctctccgtcaaagccaagagcatcggacacggtctcacctgttgttccacttgatgcgtatgcttacaggtctcgtcaacaaattgaggtgcgttcgcccgtcccttctaaaggagatacactgcgctctggtggtagaaacagatcattcaaccatgtcctgtctccttcttttctttccaatcgaattagtacgaggaacgaaaggcagaaagccaacttcgaagcgctcgtaaaacagtcatcgagctggatgaacgctccaaccgaggcgtgagtttttttcctctactcctctactcttttactctcttctttcctatctttttcgattggagggtcgatcctacactaaccgtgtctgtcccgctctcttgacctcgggtcgagaaagttttcaattcttcacctggacccgtcttatctgccatccttcccacctccgttgcttgaatacctcactgctcctctttccgccgacgaaaccgaatcgggtagtgtccatcgtgatgctgaagatgaaactgtacaggctgtgcccggttttgagcctggaaccgagtctgatttggaccgcatccgggcagagaggttgaaaaaacagatggaggccgattctctaggtcctctgaaaagacttgactggaccgacgatgatggcgaagacgacaaacccatccgggtcggtaagagtgcagatcccgaacgcaacgacaaggaggagaacaaggacggtgaagacggggagggagagaactgggcggtcttggctggggaagctaagaaatgggttgttctacctgtacgccttgtcttgttgttcgctttccgcaagtctatcaatcatgcggcccatgattaacattctacccttatcgtcactatgatttcctcttcttttcccttctacaaatccgttcaaaggctcttcaacgactgctgctcacacacgactacctccgttcagaattctcatactgcattttctgcggattcgcatacgactcttccgaacagatggatcgagaatgcccagggttaactgaagaagatcatgattgagtgtatgtttgtgtacatatgtgtgtgtgtttcgcacccacaatccgccaccaaagggtcaagcgggtaggaagccaagacataatagaattatgagatttgatgactacagggcgattccttcccttaggctgctcggatggtttccatgagcagatcgtgaccaggcccatacatgacagagtcggccacgcgtcgggtttgataccgagcttggggaaaagcttaaactatgctttaaaccgaacggcatatttcgtatttagcctttggcgtttcgacatggcgtccggcgcatgagcctatgacctgcgcattcgggtatatcccccttgtcctttaatcatcatcggtagtcgagcctgccggagagagagagaaagtgagagacgtagcaagaaagagttctttcccgagtgtgagttgggattgtttctttttccagagggctcaaagagataagtttgtttcgagcggctcgttaagcggatatgtatgtttacaataactttgaagccaagcggagaaatatatgttaaaaaaacaaaggtcagtcagtcagcccatcaggcttgacgtctggtgaaggaatagatgatctctttcagcattgcaaaccagttttgcttctttcatcgcgtctcaactatcagaccgtttgaaacgacagaggacatgtaaattagagagacagaagatcgacaaatgatctggaagcagaagactaatcaagaaacctgtacacggttgacgataattgaccgagtgtccaacagacaggcgagcaagtgaataaacgttgaaacttgggaaaggacggggacagggtgatggacttgacttggctcggttgatcagggagtatctattctaccggatggtgtcgtttcaaatgcttgttagaacggggagaaaagatcagttcgttgagtgtcttacggaagccgaagacatacacgcctctgtagtgaaacataaacaaatgacgattggacgaaatagaagttggattgatggatctgcggcgataaacatccgttgatcaaacagcttcaagcggtagttcggccgtgagagatgtggaaggtacccagaacagcctcatgggcccgacactttcttcatcctgtagtaaagtttaatgaggaagagtcgagacaacaagaaaaggggtggactaaacagtaggtaaagaggtgaggaagaagtgtaaattgctgatgaaagaaacctcgggggagaccgagggtgagcgcatgcgcatgcgcaagcgacaagaacaatctgtatcctcaaccggggatttcgcagctttccgaaaccaagggagggtatggtgagacgaaggaggaagcaaccaccctcaagtcaaatctctctgcaggggtttttttctgagggagtcaaagaagaaaggaaaagggaggactgtaggaagctaatagaatggtattgcaacgaattcttcttgatgtctctctgctgaactttcgccgaccaagtgcctcctcccaaggatttcctgttcgactgacaccggcttggacataggttcagggatcggctcatgattgatcacagacgcttcataccttggagaaatagaccaggagatcatcagaagggatcgatcattgaatgcctggggctttccttcctcactcaacagagttaagatagcagctgggctagcagaccgcgcttgttcgcggaacgatgattcgcagatagtccgttcgtccatcaagccacctagtaagtctcatcaaaccgtgtgatacaaaggaagaatacactgacatgatgttcctctcttagaaatattgatcgcccacagagcgatcgcgcgacgtggagcgtgatttcgtttgaatggacactgactcgatgtttcgtgtaacagtgattcccgccgttggagaatggcgagcaacggatatgatcaaggaagcatccccaatgacaaaacggggtgggaagatcaatacatgataggtctctgatcgagttcatcctcgtcgaccgatctggctacgaacagccgacccttccgcgcgtcctctctctttgctttctttggtcagctctgaacactagttgcgagcgatgagtgatgtcagacgtgagacggacgagagcgaaaaagattggggtcggacagagaacgatcctggcaaacatggagactagaagctggagtgatatatacgttccgcccagtcacgtcggacgccgttgcgatcaacattgattagataagaacgtcaatcatcgtctgtctttgttttcccgtttgcttcgatctctcgctttcctcgaatcgatctctgtttctttattagttctgtatctcgtttgttttcgtgaaagagatccgaatcgaaggacgtcgaatgtatatgatcatggtagaagattacgataatatcgagctcaaagattaacaagagataaggaatatagagatagagagaaagatacgatcacataaaaaaggcacctaaggataaccaagacctcaaggaagatgcacagacgagacgagatgagtaaaagagattctatccgttgcattgatgcgcttccaagcacatcaggtcaaaacgacggaagaagagaaagcatagaggacgacgaagccaagcgctcagacggacggctgtacgggtcgactcctgacaaacaacgttttccacggttttccttctcgcttttctttccggaccggtgttttttttgcaagggccactgacttttgctgctgctgctgctgttggcgtcgccgtctgcggggaggctcggccagaggtgcgagagaaggaagatgggtcgagcgtagatgaggtctgaccggagcgttgagcctagctttcagatacgccgttccacagtagcaaagctcgtcctcttctgggcctttgctttgctctttggcttgcccgtgatgattcaccccactcttttcctcctgtttcgcctctctggcggcaaccgggttgggtccggccttggtagtaggttgagaaagctctgtggaattaaggagaggtgtctttggcggctggagcgcgttctcggtctttgcgcgagcgacaaacgtcgtctgaaatggaagacgatcgtcgatcgaccgtctggttgtttgacgacctgtcgaggaggaagaggaagagcagagggaggagggtgaagaggatttcttggctgcgggttcggcttctgcttgagattcagaaggaatcgccggtagacgtttttcttcgacgacgataggagctcccaacatgtcggccattccctcgacctgggcttcctctcggttcttttccggcccggcttcgacgtgagcaatcttgagttggcctccccaagagacgttctttctcctgaaagacgaggccgaggcccaagcgcggttacttccgggtctactgctggatcctgtgtaaaggccggcgagatcgtcggttgtggaactcttatttagaaagatggccagtcggtcgaacgatcggtgttcgcccttcggtcgtcccagcaccggcagactcgagcgttgtccagaagaaggaccggcagaagaacgaagagaggggagagaggcggtggatgtcatcggttggatgactcggttggttcccaattctgtcggtcgctcggtcgatgctgcagccgccaacggagctctggtcgaaaggctggagggaggggtcgaccgatgacggatcgcgtttgatagatacccgatctctccgtcgtccgtgactcgttccgggcggagttcatcacctggacagactcgatcggtctgactgactgtgggctctactatttcgagttgagtgggcgccgatcggatatagatatccttccaaccagaagactttcggaagtcgaagttctgtctggtggagatagtggtggcgacggtgggggtcaaaaccgggacgggaaaagagagctcgaagtcgtcggagtagtcatcatccgagtcgcagtcgtcagaaaatgcctgaatgagtctcggtggtgaaagggaggaggaggaggaagaagaagaggaagaagaagaggaagaggaagaggcaacgacgacggcagcggctgatgcacgtcggagggctcgggtgaaaggggaggtctgcccggagagttgttgatgaggggagaaaagcaactggggaagacctttgacttgggctttgtcgacctcttggtcagattccaacggggcgccgacgtttgggtcgtcgatgtcgtgcgcctcgaacgagaacgtcagcgagatactcctcgttcggcctgctcttctgaaaggaaacgtaggtgaggaagaggggctggattcggcgtctgaaggggagctcgagtcgaggtactcagagtaggatgaaaccgacgaggccgagtccacggtcgatggtgaccatgaggatggcttgggaggaggggaacggaggagaaccggggtgagtaagaaggtacgaactttgggccgagagaatagatggacgaatggatggctgaatgcattgaagatttacagaaagacaaggacctacaggcagtggattgagagaatgttgggtgtcggaccaagatccaactctggaggtgacgtctgctctgatgagcacgaggctatctcgtttgttgagttgaccgagatagttcaaccgtctctcccgttctcgttctccgatgctgtctgtgctgggccgtttgctcagtctggcatctcgcctggtgtgctttcgagcagaggccgaggccgagaccgaggctggcgtgatgggagagccggtgagactggatggtcgggatgcattgggcagggagaatgaagagagagtgctagggcccgagatggtctgagagagatgaagagttgactgaaagcatcctccgccggcggaggataggggagagaagggagggaaggccaacgatctgttgtctggttgagagagtaaagtgtctaagtcgggaatagacagtctgaaaccgagaccggacgcgggaagccaagggtcgaggaggacaggagggaggctggaaggaagaagaatggatgagatgagtgtttgagactgggtgtatctttcagagcgcaagaatgagtgagagacggtgaaagaaatggggaaggtcttaccagggagactcgtcaagagcaaacctgttggtggacatttctacaagttgggctgaagggagggggggggnnnnnnnnnnnnnnnnnnnnnnnnnnnnnnnnnnnnnnnnnnnnnnnnnnnnnnnnnnnnnnnnnnnnnnttgaaggaggaaaaaatgaacaggaaagcaaggagacgatcaacgtctttggaagggtgaaataaagggataggagagactcgaccggcgagtgtgggtgtggatgtagtacgtagaacgtagggagggggagatgaagaagagaagaaggaaggaggggagactttaaagtgaacaagagaagtagaaatcattcaacatggccgaaatctcggctacgtcaggtgtaacgtaggggtaaccggacgaagatggatccagcgtcttcaaggtctatcggcactttcctttcgctcgccttgcctctggacgagcgcttcgtactcttgccttcgctgtagggaacgctcctgtttgtgagtcttcatgcgttcccggtaggactctttgtcggccgggccaaagagaccgtactctgccgacttttcgtatgcgtatgccatgagcagggaactagcgacaggaggggagggggggaagagcaagttggcgacagagagagagagaatttcagcatgatgtgcgtgcgtgtgtgctgaaggtgttgtggggggttatgatactctctatgtttgtctgcttgcttggttgtacggaagagcaaagacatgtgcatatgtgtgtacgacgggcatgaagaagagaaagacagacaaacccaaagacgacggcgaacgctctgtttgcggtcttttgatttcttggtccgaccggtttcttttcgttcggtagatcgaacagagccggcttgtcggatggaggtgctggtggcaaggtggatgctgagctgggttgaggttggactgggacgacctttgggtagatgtgctttctcggttgggggtagatctttatgcgagggattggttcgtctggtcggtttgagaacgacatggccaacgtcggtggcctgaggtgagtgtgacggggtaggatgcggagcatgggaggcgagctttgctttagggaaggatgtagatagaaggggggacgac

SEQ ID NO: 2390 - DNA, 421 bp, Xanthophyllomyces dendrorhous
acaaacacacacactcacacccacaaatacaaacacacccacttcacacccctcaccacaagtcggaacgtccggccctgggtaaggcagcgaggaaggaaagaaaaaagaatagagaagaaaagagagagagaagaaagtccaacaagtgttgaacaaatctatagaacaagggcttagcctcagcagatcgtagtaacaagactactctactgcttacagcaccccgttcccattcaagtcgtctgcaaaggattcacccccgcgcatattgaaatttcgattcacggaagaccgccccggcatttccgccaggacgggcaggaccgtcaggtatggttcacgagcttcgctctattttgacacatctaacatgtgcgggaccaacatcatcgtttctagcacggattctgacttagag

SEQ ID NO: 2391 - DNA, 4479 bp, Xanthophyllomyces dendrorhous
ctcttgagttgacgacctcccctctcgacgtttttacgcgtgtgtttcttccatcttgtccatccctcttggctcgcacatatgtgttgttgttgtttctttctaccctcaaagatggaccattcagggtatcactctttctttgttagtcacttttcccttccgttctgccctctaagaacacggcttgaggcgaggcccggatcaaagacacagtcagtcaggaacagacaatcaatcatgtctcttctgaagaccaacaaggcgtgcccagaccgagaagaggcaagggagagataccaaagatgatgaactttcttattctgacaagacagatgtagcaagaaaacaagagaccattcaaattgagagcagaacagcaaggtagaattaaaattagatcagaaaaccccaaaagagagaaggagaaagacaggatgatgcaggttatgtcgtagaacgtcgtgcagattcgtgaaagaggatcggggaaagaacttgagacagaaaataaaaggaggggtgttaattcctcgagaggagctgaaagacaaggaagaaacaagggaagaaatagcgagagagggacagtgaatttggattccttatggactataagaataaggtcaagatatagacagatgagatgggggttttttttaagaaaatttagctagattaatggtttgcccagtattcagcatgaacctctttcagttttcggaacgcatcctgtttgggtggacaagcattcgaaacgatgtcgattcatcaaggattcaataagtgaagaacgaaatcgggcttcaactcatgagatgaatgaaatgcaaggatggaaaaaacgagcccggaagcttacctcggcggtggcggtaggcttgcttctaacaaaagtgacgagttgttccaaaacgttgaacgaaatcgaagtacactccggggggagcatgtccatcttgttgacgggaggcgcagatgagttggtggccagggtgcctgccggatatgaagtgaaaaaagaaaaccataagaaggaaagcaagacggtaagcccatcatgtcgtcacctttaaaccctggagaggggaagagggagaagagaactttggaagaaaagaatgacccacgtttccaaggcttcaaaaagtcatgctcaatcaactctccgatcgtcggcctcatcttttcatcccgcatatgacacgctttcatcacctcgatcgccagcggatccaccgggctagcaagcgtcttcgtatctatcgaggcagaatttgacccagacgcattaggtccgagaacggacgttgtcgacgacgacggcatcctcggaaccgagatggttggatatggaatttgatgtcgaggattacaaatagcggcaatcttggccggatggttggtaaaatcgctgaagggaagatggccatagatcatttgatagagaatgcatcccaaggcccaaacatccgttggtttaccaagctagtgcaatcccgatgctcagagtcagttaactgagaaatccgaaaacgaggagcggaaaagacatacaacaatccttggctctccattagatttctgaacggactctggagacatgtaattgactgttccgatctatgatgcatcgtttttgatacaaaaagccctattggtaagtctctgtcgatgacgacttgtcgaccagcatacagcgactcacttggttgtctcggcgaacgtgaacagtgtccccttcgatcttgtgagagattccgaaatcgatgatcttaagacaccctctgacaagcacaaagttagcaggtttcagatcggtatggatgatcccatggtcatgaacgatctgaacgcattcaagcatctgatagattgaggatgatttatcagcctttatgcaagcagggatagacaaaagaggtgtaagatgagaaaaaatgacatacttggagccagaaaaagccaacaaagttcatgtttagtcgttttcctttttgctcttcaaggagttttgaaaagtccgcttccccaaactccatgacctgaagattcacaggaacggatcgatcgatcgatcaatcaatcgatatcacccattggtaataactggtcttgcgcaatgtaaaagtaaacaaggcactcacaacaaagattgcttttggcttgccgctcccgctcctcgtcgtctcctcgtcgtcaagtctgatgactttctcatgtcctctcaacttcttgagcaagtcaatttcgttttggtagttccgaattgcttcagcgtccagtcgatcgagcgccactttcttgatggccaccacatcttttttctcattgagcgctttgaacactttggaagaacctcctcggccgatttgacagagtttttgatatgaccggccgttgacctaaagatgtgatgatgggaagagagggtcaaaaagggggtttttccaacggttagatcaaagaaagatcaagtcatgacgaaagacaagaggaggaacaaagaagcaaacaaatagaaactcgaaaggacatacttcgagatatctttctttcttctcaccaggaagcggcatcatgccctgccttgtgcctcctggctgcatcaacgtgggcggccccatctgaccatattgttgctgttgagaatgctgcatgacggtgtttgttcctccgttctgcatgatagttgaagtggaacctccaggaatgggcattgaagtatcgtagtagccttgagaggcaatcccactgtttgctcggccgtgcagcatcatgtttgaaggcggggctgatgcttgcggctgatgcgagtgagggtgttgatgttgcggatgagagtacgcatgaggagtatgtgtatgggttggttgctgctgttgatggaggtgatgctgatgagaagctccaggtggagcggtagctgccctttgcggattgttatccgaaggatacaacgctctgtttgagtcgtcttctggccctcctatcgggatctgataagtctggcccagtccagaagcatatctacccatctgtccattacctccaggtggcgcgttattacgaagatttgtttgagggggaatatcgatttctatgagggatgtcgaaactttcggaggagtgggtgcttgatagtgatccgagatggaccgagtgtttcgcttgttgctgggattgtcttgaggagcgctcgatatcgaggaggctccaagtagatcgagatgattctctttgttttcggaagatgagtgaaagggtggtatcggaggagagtataactgcctgcccggtaagcttacaggtgtatagttgggttgtgcttgtcgataagggttaggattagattcagaggaggaagagtgagccatatcggcggtggaatgagcatctgatgagggttgtattgacgtgcttgttagttggggagaggatgatttgagacgattgagctcttccccagaggaacgatacagatgattctgtttggaggtggtggaagtcgatcggtgggaagcagaagcagcggcagaaggggagtcgtcggtatttgactggatgtcaccagaagataaaacctggtaatccgttggttggctgtacgaaggattcaatccggacggaggagtggacgaagacatagctgaggatgatgtgagacggaaggagagtgagctagctgacgataatggagagggagcgttgtgatgatttgttgaagcagtcgaagaagaagatagaggagtgattcggttcttatctggctctcctgagagttgagggggcgtacgtgtgtacatcgagggaacagtcatctgggagggtaaagtcgatgatttcgacagtccagaagtcctttctctttctcgaagatcgaggtctttagcgaatctcaaaggttttcgttcgcgatctgggtctgttgaggtagaggccgttgagaagctttgtcggtcgatgtcggctatcgactgtccttcatcctcttcttgtactccacctaaatcacctctagatgggtcgcgctccctctctgaagcctcacgctctctctctagccgttcctcctcttcttctttctccgccttttctcgctgaagcttggcctcctcataggtcagccgaatgggcggtccaagtaggcgagctcgtctagtagactcgctggcagaagagaggagagaacgagaagtgagggagggagtctgaaggggacggtcctcatgagaagatgtgtgagcaggaggaggacggaaagagggtttggcagagggggttcggtgaggcattcgcggcggaggagataaatttctgggaagtgttgacggaggagagaccgagctcgctttcgggtacggctataatttgtgaaagaaaggagaagaaaaacatccaaggcacaacgaggagtttcatgaggcgataagtcacagagtttagcgatgagaagaacgaaaaaaaaaaaaaaaaaaa

SEQ ID NO: 2392 - DNA, 440 bp, Xanthophyllomyces dendrorhous
gaggtgaaggggatgatgttgagccatctgcggccgaggaacgtcgcgttttcagccagtgagtcctgttgatgctgtgagagctgagaaaggagaatgctcagcttgtgttcgaccatgctgtttgttctagccctttgggacattggctggacgtccgacatgtcaaagccgccgaggatgggtgcgatgatggtgtctgctgcctcgtttgcggcctgataggcgagtggggcgacgtcggcgaacgagagcacaccgaggccgccgaaccgggtggggagctggatgatggctctgtcggtgtcgagtcgacggggagagttccggatgaggagaaccgcctcggtgagtgcgtcgtctagtgcagtccatgggtgatcgagatctgacgtgtctagtgttcgttggaggtgccgcaggttcatctggacgcatcg

SEQ ID NO: 2393 - DNA, 740 bp, Xanthophyllomyces dendrorhous
tagcgagctgagtacctccgtccccgatcgggcgtacaagagtacgcctgtgacgggagtcatcggagggagaggctcagaaagcagctttctctaagcctctgtacagattcctccctcggaggtctcgaggaaagggctttttttatggcttagtgaaccaactagcgttgacactaacccacaaaggggaagagacttttgtctctgcagactctctgcgtctctctgattctactttgtagagagacgtttcgtctgcagtagcgcacgcactgtatgcgtgcttcatttaagcagctagagctgctctttagtcacaccactatgtgtagtagtggtgtgagtgtggagagcttctctagcgagaacctctatagggtgttaccctcttttatggagcatcatcaggctatgtcttcttcctctcctttagctcctctctcctttggaggttcggagtgtatatctctttaaaatttgttggtgtagtggttgcatgaagatttaaaataccttcggtataggttcgattcctttacatttttatgggaagtgtttatgctagttgttttcctttcttgactcttcgagtctatcattataaatgattttgttgcctccgagcctcctaggctaatcgtaattgatcctaggaggcttgttcttttgttccttactttcgctcatcgtcggctgatttcggttgtcagctagctgcactaggcttccgccctgcc

SEQ ID NO: 2394 - DNA, 613 bp, Xanthophyllomyces dendrorhous
ttctttctttcttgccgatcgatcgtgtctgtcgatcttatctgccatctctgtcggctggctgtgtatcttatcatgcatcttatcttgcgatggcttctctcggtctgtccatcgtggccgtgtgctgagggcaaaaagacgtcatggtcaccgccaggatcgaactggcgacctattgcgcaccgggtgagatgtgaagcaagcgtcataccactagaccaggcgaccgatcgacacggccttttctccgccgggctccgtactccggggctcgacgtccgacgtccgacgtccgatatccgatgggcgatcggacggatcggccggacgcccaccgcctcggataaccctagcagagccaacgcccacacatccacttggccatacatccacacaaccagacgaaagctaaaggcaaagatggtggaacggtcgtcatggccggctgccagcttgtatgcatcaggaaatcgcgggttcgaaccccgtcttggtctagtggtcccaccacccattcgctctggccgagtggcccagcggtaaggcgtctgactacgaggatctttgccttcttttgttttggtctttctgttgtgttgacactgtgttg

SEQ ID NO: 2395 - DNA, 410 bp, Xanthophyllomyces dendrorhous; identical to SEQ ID NO: 928

SEQ ID NO: 2396 - DNA, 431 bp, Xanthophyllomyces dendrorhous
ggaactgtgatgagcttccgcttctgatcgttttgtccaagcttcgtcgaagacgacgtctcgggagtagatgatttttcgaagggtctgcttgtcaactaagcggtaagccttctttccaaatgtgtcttctgatggggcaaggaacaaacaagaaactgactttgactcgtgttttctatgtttcgggttgtgcgcatatgcagtacagccaaaaacacgaagtcggtcaaaggtaggtggttttccaaaccactcttcatatcttgtccgcccgctcgccttgcgaacggtgcgggcaagtatgtagatagcatagacaagagcttctgcccagaaagaacctggcaaaccggactcgacaagaagagcagtgatcttttcttcgatcgttctgtttgctctctctgcttttccgttctgttggggag

SEQ ID NO: 2397 - DNA, 455 bp, Xanthophyllomyces dendrorhous
caacggtatcgtccgttgctacccttctttcctttagggctcccttagccctgttcccgacagtatcgcctgtcgtctcacctcttctcacacggaggttctctacctccccagaaggcagagcccacaggctcccaaatttcctctgcctacagctaggctccagcctacctagcctcctataccaacccaagggtataggccaaaattttcaggcttccatgcctctagagtcctttcctttacacctcatgggggagggaccacacccaaatagagaggggccgggcccaagctctgggagtcttcgagagggagtttttcctatatcaaatcacgttgatccgaaggagtgaacgtgaaaaaatctcccccctcgcgaccagctcccaggttattgcgccctggtggccccacactatttgtaaagacgtccctcaccccaatagggttcc

SEQ ID NO: 2398 - DNA, 432 bp, Xanthophyllomyces dendrorhous; identical to SEQ ID NO: 930

SEQ ID NO: 2399 - DNA, 424 bp, Xanthophyllomyces dendrorhous
ttcggattcccttctctctcaggagaggctcagccagttctctgatagagctgaaccactctgtgggccaatctgggccacagataatattcgagcaaagtgttacggtagcacccccgctttacacgcgggtagctagggttcgactccctgtgctcgaatagcagtataaattatctgtgtcttgattgtccgagtggttcaggaactggcttgtgagccagggaagcggggttcgattccccgacaaggcgcctgtccccattcgtaaagccttgggctttacttggggccagggacaatcttcctagaagaagttccttagccgatggctaattccttcttcaggaagatttgaaaaactctccgagtttttcccccttgcgagggaatctctttcccaaagatcctccggaactcgggg

SEQ ID NO: 2400 - DNA, 494 bp, Xanthophyllomyces dendrorhous
ttcggattcccttctctctcggaaaggtaacattatgttatctttccatagcgcctcttcgcttagtggtaaagcgagtagtctctggactactcactcgggttcgattcccgaagaggcttaatgatcaagataacataatggaagtgtgtgggcttcatgcgccctcggtcacggttcgactccgtgtcttgataccctgcggctaccaagccactcaggcgccccgtgaaactcggtaagccacctgggggccccctcaacacgagggcgtcgtgcgcagggcactcaccgctcctcggtgtaggagagcccccaaggcttgcctctcaggcgcatggtgaggagttctcgatcgagagtcgactccgtcatcccgctcactgcgttcggggaatcgtcgtcgcctctcttcttcaaaaagaaaatcggagacctaactctacgagctagtattttctttttgaagccgagagctcctcaatgctccgggg

SEQ ID NO: 2401 - DNA, 407 bp, Xanthophyllomyces dendrorhous
gatcagcttcaggcgggactcgaccatctggtcgaccatcgcctcgatgtcctccttcttgacagacagccgttcggcccggctggacatccgcccaaagaccatgatctccgcgccaatgaactcgacggtggcatcggtgcacgccagagcgtcgtagacagatcgcttgttgagctcggtctcttctcgtgtgggcaggtcatcaaccctggctgtgagttcggccaaggaggtacgcacggacaggagatcggtcaacagatccgagggctgaacgagggatgaccgcgtgtatacacaggctgacgctgctagagggtagtcgagttcgattgggacaggttgaaagcacaaactttggccgcatgagtgaacagcatgaatagcaaggaatggcaaaaaga

SEQ ID NO: 2402 - DNA, 346 bp, Xanthophyllomyces dendrorhous
aagagaaaagagaagaagggaagaaaaggagaaacagaacaaaaaagaaaagaaaagaaaagagacaaaaaaagaaaagagacaagaaagaaaagaaaaagacagcaagaggttaaagacaaagacataccttcgatcgactcgacaggctcggacgttgacggcagtctcggacttggtgtaggctcgaccgtcgctatctctgtttccagcttgtcttcactgataagaactatatcagcgacaagcggccgtcgagggaagaaagaaaagaggacaaggaaagaaaagtgagcaaacaaagagaaaaagagcaaaagaaagatacctcttggtcagacttacc

SEQ ID NO: 2403 - DNA, 364 bp, Xanthophyllomyces dendrorhous
ttcaagacgggtcgtttaaagccattatgccagcatccctaagcgcgttcgtgtccggagaccgaccccgtaaagagggcgcgctgcgttcctcagtcccacgcgatgcatccaaacgggggctataacacatccggagatgccaccttcccccgcccgttttccaccgcccgaaactgatgctgacctgcggcacccggaaatagactgggacgaacccagctgagtccgagcacgcatgactgacttcaatcgtttccctttcaacaatttcacgtactgtttaactctctttccaaagtgcttttcatctttccctcacggtacttgttcgctatcggtctctcgccaatatttagcctta

SEQ ID NO: 2404 - DNA, 428 bp, Xanthophyllomyces dendrorhous
tcttttcctccgcttattgatatgcttaagttcagcgggtagtcctacctgatttgaggcccgatcagaagtgtgcgcatgcagtccgcaaagaccacacacacagtatcgttagaagcagttcgcatgcgtcgtttagttgtactagctagtctgcgtgtccccgaggaaacccacacactcacacagacagcgacactcgacgacaatttcttatcatgtcaaggcaccgcccgcgcttcgccagcacagacgcacacacccactgatcgttttaagacgagccgacccccgaaccaaatcagggccagcagaaccgtccaagtccaagccaggcgcctctcaacaaagaaaggacacccggttgagagtgtttcatgacactcaaacaggcatgctcctcggaataccaaggagcgcaaggtgcg

SEQ ID NO: 2405 - DNA, 788 bp, Xanthophyllomyces dendrorhous
atggttgagatgatctgtgatcaaagctggtggcctaacgggcagtcatcgtcaaccgaacgatcgacccgctccgacacgtaactagagaggctggccatgtcgccttctccggaacgcgacggcagatgacgcggttgatttctctatccgctcaacatccttaccacgcttgaacgacactcatccttcccgcttccacttctgctttcgtctgcttcccgtccagaccacatagaccttggccgactggcacatctggtgtcgttcatcttgcaccgacgacgacggacttaccgattgatccactttcttctacctcgcctgccttggctctactctgtttacacgcgtttatactggttcgcactcgaccacagccgtccacgattgtcccagcaccaacacatctatcaaccgactgccatgtcaccgacctctatcgagctgcatggattgaagcgggtggacgtccagaagctatgcaaggtccgtctctgctctgtctgtctctttttctctgtctcgctgtcgtactcatcatatgcttctttccctacttctggatcatctctttcttgtctctcatcacacagacactcggtatcaaaggagcaaaccagaagacagaggctcttatcggccttatccttcagcactacgcaaacagccagtcaaccacgagcgagggcgaacaagcaccgcctgcagaactctcttctgtggagagcggttcgtctggtgctgtaggagaaggcattgcctcagcgttcgtaccaacccctccc

SEQ ID NO: 2406 - DNA, 903 bp, Xanthophyllomyces dendrorhous
aatatgacggtgggatgccagtaggtgcgttgttcaggcgtcggctgtggttgcattcttgtgaatgcttgccggtctcagtgcgatggtctgtcacacgttttctcagctgctgcaaagtggcttttgcgccatcagcgtgtatgagaatcactcgaaggacctcgagcaacaagctggtctcacgatatgtgcgtcaacgctgatcccaaacaccattgtgtacatgcccggcacgaaggctcgtttagacaaggaccacgtgccctcagtgtcaatgcacttgcgaagctcagtgaacgctgtcatgttgccgtgcgacacgcgcaattcttgcctttagcaagctctgacgatctgagctggagaaatctgcacacgacggggacgaacgacagacacaggcaagaagcctcatcggatatctacattcagctttacgccctcaccgactacaagcctgatgccagtcgcagcgtggcacagcttgtaatctgtcgcgatgagcatgctctgagcgtgcataactacgaccctgatgagtagcatgctactactttgtgaaggaccaacacagtcacgtatcagagcgctaagcatgagtcgccacgcttttgcatacgacattgatgtcgatagcatgagacatgccatttacggctctcggtacccgccattacgtgatgtgcatgtgcaattgtgctgcagaacatcgtcgatctgatgagcataagccaggaggaaataagtgaacaacgtcagacaaagaaatatgaacgcgagtgtacgatgcggtctgctaagtaggaggatgagagcgaactccactgcgcacggcattgagaggaggaaggggacatccagaccagcttgcaacgatctctcacagatgcatcagcctcc

SEQ ID NO: 2407 - DNA, 405 bp, Xanthophyllomyces dendrorhous
gagagaatcaggggatcagaatcagaatcagtttgagggaatcaggtgttttgatacaattagaatcggaattaggcaatcagaagatatataacaaagagctccctaattcatcacgtagtcgttggcaggatggttcggagggtgagggttctcaaagttagcaaacgacgactcggacagcttggtgtatagcggcacactcgacggctctgcatcagtgggctcggctggcttgacatcggaaggcatctctgtagcagtagagttagtcagaatctgaatctgacagcaaatacggtttcgtattgctgtagatgagaaatataaaacaataccaaactcagcgacacagaaacggttctggtaaatgctgaggaaggagaaaaagaaaagaaaagaaaa

SEQ ID NO: 2408 - DNA, 408 bp, Xanthophyllomyces dendrorhous
agacagcacagacagcacagacagcacagacagcacagacagcacagacagcacagacagcacagacagcacagacagcacagacagcactcactccagaggccagtccccaagccacacatgcacatccgtgtggcacaccccagagtacacgatccgcacaagcacctctcccggcttgaggtccttctgctgggtcaccggccagtcctctcggagcgtcagggggccgttggcctcctcgaacacccacgccttctgggtctctgcacagagcagcacaagacagcgcatgacggcagatgcgatcacaggagagcagagacagtcgtcagtcaccgatcgctagcaaacatgtccgctcaggcatagacaggtatataggcatataggcatataggcatatag

SEQ ID NO: 2409 - DNA, 497 bp, Xanthophyllomyces dendrorhous
aacacaagctgagcattctcctttctcagctctcacagcatcaacaggactcactggctgaaaacgcgacgttcctcggccgcagatggctcaacatcatccccttcacctcctcgctctccctcagagacgtccacatcgccgccggtctccacttcctcaccttctgccccggccggtccgacctctgcaacagctgccaccaccagaaccactacggacacgacgaggtctgccacggccgcaacccagacaccctcgctagacacggcaacatcaagcggttagtacacaagtcgctcgctgcgaacagcatgttcaacgtagagaacgaaccacttgtccctggcacctccatgcggaccgatctccggatcacttcgcccgacggtgtcgtcgagatcgacgtcgctgtagtctcgatcgcatccgacgccgcacgagagatcgccagacggacccatctgtacccacaggccgccaaacaaaacagatca

SEQ ID NO: 2410 - DNA, 376 bp, Xanthophyllomyces dendrorhous
gtcttcgtcttcgtcttcgtcttcgtcttcgtcttcgtcttcgtcttcgtcttcgtcttcgtcttcgtcttcgtcttcgtcttcgtcttcggtacggcgtcccctctgttgtgtcttctctgttgtgtcctctctatgatgtcctcttctgtgagaagacaaggagaatggcacagtctgcacggtacatgaccagcggcgtataaggcaagcgggcgagctacagactcctcatagtagatcgacccagccatctagagagacaacgactggcttgggagagagtgagtgtctcgcagaaagtgtaggtgtctcgcagatagagtgaggctacatcaacggacgcgcgatgagcggcagagagaacgaaaggacc

SEQ ID NO: 2411 - DNA, 356 bp, Xanthophyllomyces dendrorhous
ccggccgccctgccagcgttcctcctgtcttctttcttttccctcatcctctctggccttttggcttagatcatgtgtagtatctgttcttataagtttaaccacttatatgggtccaccggacccatctggtttacttctttttgccttgcccgtccggccatcctctgcttgcacgacggccggacacgatgaccttgccactgcactgccggcttgtgttgtcagggacctcctctaccttcttcccatttgtgtcgaccggctgctttccactttttcttggattcagtcggtcgacgagatggcagtcttgatgatgtgtgtgtactgtgctgttgtcgttgatgctggtg

SEQ ID NO: 2412 - DNA, 1285 bp, Xanthophyllomyces dendrorhous
accactgcgtgccgtgctcagccagaccgccgttgtccagagacatgtcgagccctcctgcggtcgtcgagagcagcgtccgacgacctgtgtccagccccacgacctcgtcctctggccgcaaaccctacggaagatactctgctcggtgacggtccttgtcttcgccctcccatctccatccgtagtcgtcgatgccagatggaggcgatgtcggtctcagcattccggcagacacgccgattccgtccgtactgagcgacatgtcgaaatgtcgctttctggtcttgactttggatacataaaacgactgcctccatcaagcgtcagaggcagctcggcggagcatgttcacgatgtcatgattctggcgagccgtgagccaggatatggctttgtcgttggttatgttgcccagatatctacgatggcggtaagtaggtcaattcatgcccacagccagctacactgtagggaaatggatcattgccattgccaaagagatccttcattttgagtctgtgaactgttgttcagcagagaagaaagcgctttggaggatgttgagcacttgactccgtgtcaccgctccttagtgcagatcacctgcttgcctgccgatagtgacggcctggacatacaggcgcatcattgaggagaggtctggagtgggagcttcaccgaaccagagtgtcaagacgtgtggtttcagaaggtaaggcgcgtcagatgttgtacaacccagtcaggcgacgaccgactcgatcgggcccgcagggggttcagaggcgagtaaggagccaaagccgaccttcaccgttcacgacaccagaaggactgctgcagcagcgcggattaatactccgtagcgtgagccatagagaaggcatgggcaatccaatcgccttggatggccaacctaatgataggctgagcatctgtcagtggtagtagtatcagctgcaaggtaaccctaaccgggttctaatccgttcccttgcgctttatgtcgaacacaaggggagcgacaccctttgagccgactgatgagtgttctaacgtgaagaagtaatctaatgtggaagagtgtcctcatcccccgacttctttctgtctcatatgcggtcgacatcgatgcctccttccttgtaggagaccccctctgatcggttcgactggccgtcggtcgcgatgaacaacgtcgtgaagaccatcggtgccggctctaccgtttacagacggagacatgaacatacagagagacgaagcaacaaatagacacata

SEQ ID NO: 2413 - DNA, 302 bp, Xanthophyllomyces dendrorhous
tccctatacttgatcgacatcaagtgcagctctcgccctttctctttcagcatcacattggccgaatccgcctctgactttgcgtctgctgcccccaaaaagtcacatatctctcgcaactgcctctcttcgaccctccatcccttctcctcgtccagcagctgcttgatctctacacaagctaccagcctggtcagtcgttgtccctctgtccatcttccatccaactcatctgacgtcatatggtttctccatacactccatctcactccacagtctcttccgctccaatgtctcctgct

SEQ ID NO: 2414 - DNA, 381 bp, Xanthophyllomyces dendrorhous
tgcctgccactacaaaatcatcaacataaagcatgagcatgacccttgttctgtatcgttcgccaataaagatacagttatcagctaagggcacatacggtttcgtattgctgagaaattaagataaagtaatctaatgacaatcgttctgtaagcatatttgtatggaaagcgttaacaacataaagacagaagaaaaccaacctcagcaccaacgaaacagttatggtaattgctgaggaaggagaaaaagaaaaagaaaaagagaaggaaagagaagaaaagaggtatgccagctggcagagtgcgctagctaaggcttaggtacatagatgataataataagattaagagttctgtcgagagagaatacagaacgaa

SEQ ID NO: 2415 - DNA, 452 bp, Xanthophyllomyces dendrorhous
catgcccatgagaagacgacgagaaggcgccgtcgccgaaggccaggaaggtgcgtggacgtcctgctgacagacggagcgccacctggtggtacgcttgctcgcggctgatgtgtgcgccccagcgaagacgtctccaccgtcgagcagcgaagaacgtcgcgagcgaagagtaggactgagagtgtatgacgagagcagcgcgaagatcatcaacactgtcagatatgaacgaaggaagatctggagaaagacatcggagaaagaagccgaatcaagacaccgatatgggcaaggcagtctgcaaggtcagtaaggctgtctatacagtcagcttgaacgtgagtgtgaacgtgagaggcactcaccacggagagtggttgacactttcggatggttcttcatccacagccgctgtttccgagcgtctcggtccatccccgcaaggtgct

SEQ ID NO: 2416 - DNA, 5879 bp, Xanthophyllomyces dendrorhous
  misc_feature (3682)..(3691): n is a, c, g, or t
  misc_feature (3985)..(3994): n is a, c, g, or t
  misc_feature (4487)..(4496): n is a, c, g, or t
  misc_feature (5712)..(5721): n is a, c, g, or t
tagctctctcgaacggagcccttattgaaggtgttcttggcaccatcttctcgaatcaattctgtcatcttgtttcttacacttgctttctttcatactcgatttatcctgtctcagtcgacaaattggcatacatcttcttccgtcgtgactgtttctctctatatgtttttttatatattttttttcgattttctcttttggtttttctcttcattgtttttttattctttctctcatcatcgtacttgtgttctgcttcgtgtttgtgatcgtctatcggcgttctcatccatatgcgttttatcatctcttttcttttcttttcttctttttttcctttacttttcctcagcttgtacatcaactccttgtgtgctgagactggtttttatctgttccttttttgttctcttttttcctcgtatcccgtgcttatcgatagctgacttgctctgttctgcataaagaacaggaaattttgtaatctataaattaaaccggcgacttatatataatctcttttttttatgttgttttcaactttcaactctatatacgctccaacccgtttcgttcttcaatctttgcatgaagcacaacaaagaatgagagtactgtgcttataagttggacgcaatccgtactcccaattacctcatttttgcttttattgacgttcctgtcgtgacagttttttttttttttgtcaatcactaattttattctactactttgccttgaacgttccaacgtggcattttgctttgacgcctgaattatgacacacatcactgactccatactgtttcaaagatgagcatatctctacttcgaataaataaggcctgctcttatgtcgtgacgttgaacgttggttttcacacgcggtgataaccatgaatagaatctcattacctcgtcacctgataacggttcttccttttcagtatacaagattcatacattctcaacattttagatacattgaaagcttaaaagcccttagctttctcaattgcataaatgacagtctattgcagtaaaagtatttttgaattcgtcctaattcgtagttcttcgcccacgtcttttgtaagtcaaattccttttgctcccgtcatcatggtacttgaagcttcgtactctcgttgacttgcctgtttgcattccatcaacaaatgataaggatacaattcttccatatacattcactatcgactttcttgtgaataacaatgttcacgatcgtcagagattttatatttccaacaagtcaacaacacaagtacagtttgacctgataaatctattcatgaatcgtacgatatccatcatcactcaaactttggttgcaaccaaaatttcaataatcatcattcctcgaatacatgatttaatgaaaataacgcaatgtctatagcttgatgtgaaacttctcgaagaacattggtcgtgcagttgagtagaaaacgttaaagatttgcgatcagctttatacctagaaagtatatgaagttcatttctcgataaggatagtaatcttcataactagttgtgagcaggaatcagtaactatcgtgctgactgtagttgtttttcacttaatgtcaatgttcgatcgaagacaaactgtcaaccataaaatgtggtcaatttcacaatgttattaatgacgaatcacgagagcggcgctcaaacatgtttcattttacaatgccgaatggttcaacaaaaacgatatgtcgtaacaaatgacatttcaacgcaagagtaaagttcagatacctcagagacaagttccacgatggatataagtttatgttgtcatttcattctctcaatttttgacttcgagctaagaccggacgtacgtcaaaatgaagccttgctttagaccaggagtcgctgaggtcagacgatttttatctttactcgaaagaacattgtcttgattggagaatatagccgtatcgtcactcatacgtcacgaggctatcatcgcaacaataccaaccttcttcaatcagagtgacatgcaaagctatatatttcttgacacttttccgagaggttgaaacgtaaatcatgacaatcttgtttattcatgacgtaaatgaaacaaatccagtgtttgtatgaaattgagaacgatagagattcttatttgtagcagaacatcgtaaacaaagagcatgatattcatactaatgagtttcgcatcaaaactcgtatagatcacgaacatatcaaaattgctgatttatagcggtcaagagaaaatgctgttcagttacaaaacttgtcaatgggcaatacctcgctgaacttttcaatactattctcgtacagaattgctagccagaagatgacttattaaggattgtatataggggaccagaagtacgtatatagacgagagcatgttcattttctgataatagaatgaaaatcctgcgttatatcaattgagttcgaacaagttgtgatcaaagtttttaaaataaaattgaagaagaaaaatagtatgacagagctgaatatatatgattcgtgaggccaaacattggaatgtcaactatattcactcaatataaccgtttgtcaatcttttaattgagattatgtctgaccctcgtcaaggttatcaaaccataatcatcctaggttttcgcaaaataatttttttttcacaactgatatgtggcgttatgaaatgatggttgttgataggtcatcgaaaatctgaagcgccaaagttcggtcatgtatcgccatcacgggaagttctgttttttagacctcataccgatttatttttttgcgctttatctgaattgagctaattattagcaatacttttctgataaactttgagtaaatgaaatgagtaagatgttgtgacaacaaatatttagtaatatgattcgatgatagtcagcacaaaacatatactcaatatatatgatgtgagccactcctgatcaaacaccctttcaaactgtttgtgatgatctgacctggtttgatctgcgcagggtgaccttgcacaatgtagaccgattcttacaacagcctcttggtactgcttaactcgctcttggtacatcttaactctctcttggttatatcttgattcttccttgatatctctcagctcctccttggtatctcttcgctcttgcttgtggttgcttgtgtttccttgtgttcgcttgtgttcgcttgtgtttccttggtctaacatctcgaatgacatatataccatatagtcgttagctatctccccttttctcccccaagcttggaacctcgttaaatcctcatagttcccttcaataacctcttcatatccctctgcaatattgcatgatctcttccctcttgagagctcaagcgcactgagtaccgtccccactcagcctccttgcctgcgcccctaatatcttccaagcttccagcttgaggctctcctcccttctcctctcgcttgactaaacttccggtcaaggagacggcatctgctcttggtcgaactccgcggctgcaagaattctcactctctcgttctggaccaaactctgtccgaagaaccactctccgaagatccactctctgaagaaccactcttccgtatcttccatcacatccacctctattgtcggaaacatcattcccaaannnnnnnnnnttctcctctcgcttgactaaacttccggtcaaggagacggcatctgctcttggtcgaactccgcggctgcaagaattctcactctctcgttctggaccaaactctgtccgaagaaccactctccgaagatccactctctgaagaaccactcttccgtatcttccatcacatccacctctattgtcggaaacatcattcccaaatctcatcctgcccaaggacccatccatcatcggacatctccattcacctccaattctcctcctggctccccggatcctcccactttctccnnnnnnnnnnaaccgctgaacaccctttgttcacctggcattgctcgcgcaatccttccgtcctcctatcttttcccctctgcaccaacgaacttgaaccaaacaaaaccaaaacataaccagaacaaaacaaacataataatcaaacaaaacaaaataaaataaagtatattaaaatcagaacaaaaagaatcaaaaagaaacataataacacaaaaaataaaaaatgaaaaaaaaaccaaaagaataaaacaacacccaaaagagtcaaaataccagacccaagaaactctgtagtataaaccaacccaagaaggatcccaaagagccaaggaatacccaaataaaagaataaaataaataaaaagaatcaagagaaccaaaagaatcaaaagaacaaaaaaatagaaaaaaaaaataataatcaaaagaataaaaaaataaaaagaataaaaagaatcctagagggatcaaaagaactcaaatcatacttcagtagctcnnnnnnnnnnatccatcatcggacatctccattcacctccaattctcctcctggctccccggatcctcccactttctccgcccttgtagaccctcaccggaaccgctgaacaccctttgttcacctggcattgctcgcgcaatccttccgtcctcctatcttttcccctctgcaccaacgaacttgaaccaaacaaaaccaaaacataaccagaacaaaacaaacataataatcaaacaaaacaaaataaaataaagtatattaaaatcagaacaaaaagaatcaaaaagaaacataataacacaaaaaataaaaaatgaaaaaaaaaccaaaagaataaaacaacacccaaaagagtcaaaataccagacccaagaaactctgtagtataaaccaacccaagaaggatcccaaagagccaaggaatacccaaacaaaagaataaaataaataaaaagaatcaagagaaccaaaagaatcaaaagaacaaaaaaatagaaaaaaaaaataataatcaaaagaataaaaaaataaaaagaataaaaagaatcctagagggatcaaaagaactcaaatcatacttcagtagctccactccctctaacctgagggtcttcaccataggacctcctcctctcttcgtctcgtgcgctttgtgatcattgtagtctgcttgtgtgtgtccaattgtaaattctgtggtggttgtaacttcgttctcggcttatctccagacgcgtcctctccctcttgttttgtaatttccctcttgtcgtcgttcttccttctttcttccttctcctaccttcttctctctcccatctcgttctatctttgtaccaccccttgcgttatgcccgacgagcaagaggcctcttcctctagcgttgagattgctgatcaacccatgcctgatcttcctgttgatgacgagaaccaatggcatcagtttgtagctcagagccaggctcgtattctggcgctcgaacaacaactggctcatacccaggcgttggctctggcgccttctgttgacatcacagactcttcccgcttctttgagccctcggtagtgcctcctgagacgttcgatggctcccgacgatccgactgccgtcgattcctcgctcaaagcaggatcactttccagtcgcgaccgggcatagtaaagacttttttgccatcagttctcttcgtggtggtctgtttgactatgttgacacctnnnnnnnnnncttctttcttccttctcctaccttcttctctctcccatctcgttctatctttgtaccaccccttgcgttatgcccgacgagcaagaggcctcttcctctagcgttgagattgctgatcaacccatgcctgatcttcctgttgatgacgagaaccaatg

SEQ ID NO: 2417 - DNA, 3419 bp, Xanthophyllomyces dendrorhous
gagaaacgaaaactccgtgagctattttccggagtgaataggtgcctcgatgcattcaagctcatactctccgagcacattgcttgcagctctcgggctagcaatctcactcctctagaagtgagtaaaactcgtataagacgatgaacgtatattctcttgtcgcaagataactactctctgtagtagcagttgtgctatggagactagggcatagggcttccctatgctatcttctcattgattaagctgagaatgagctaaaatctgtggacaagctatggtcgcgtagcattgttctcctgagacctctagagagggactcagttcattaaactagacatgaaacttcagcgcacggagaccctctgggtagtacggttagtcgttgtccaataaacctttcagtgaaagctttaaggccaactagttttacgagctttatcgtagctcggtactaaggcgatgcctatagtcaacacatgcgtgacctccatcgggcaaactattgagctgtgctctttcctatgccctcgcgaggtccctttgcgagaatgacagctcaggagagtctgttccctctagacagtgagctagaggggatagcctgagctatcatcctatggtagccttgtgctacctaagggaaggatgggtggaagccctcatcctcgctagagaagtcacttctctgcgctattgcgcctgcagtgtagagacttggtcaatgtccgcgaggatgaaccagctataggctgaacaagagcgaagcagattcgctgttcagatctagcttctatttagagctagggacacaggcgtgtccaaattccgtgccagcagacgcggtaagacggtaacgcctagtctagtacttattgcctaggcgtacagggtgcgtaagcggtgcttcaagcactagagtcgtcgatagcaggctctagactatgatagcggtgaaatgctatcatcatagtctatgatcctacagcgaaagctgcctgcttgaagctgactgacgctgtagcacgaacggggaatgacccgacggagattagagacctcccgaggcccgcctgtcaacgatgcatacctgcaatctctcttgcgtctcagagctacgccaactagctctgattccgtagagatctcgcagatcgagaagaagagtatgtcgcctggagggtacgttcgcaagacggacgaccaaacgatatgacggctaagaagcacacgttgcggcccatgatgtttaatgtgatagtccgcaaggaatcttacccgtactggtaagggggtcgtcttctgggcgatctcctccaggggttgcaaggctgtcgccagtccgtggtctcagacctaaggtttaatcctacaacgggcgttgttctcgacacggctttgctgtgtatcggtacagtggaaaagagtgtcctttccacctctcgactctggagagcaaagactagtcgatttggcccttatgtacggggcaacagtcgtggagaccacgttctctgagtggagaatagtgaagacgagggcatttgcacctggaactcggtgcaatcaactcgtagtaacgaataatcttgggcacctcatcaaggtgaaggatgctttcttagtgcacataccgctcatcaaaggctgatagtctatcgctggcggagctctatagcgattcagcataggtaatcagccttaagttgcaacacggtcgtgccaggggaacctggtgcgggcttgtcgtggctcgggccattgcccacacccatttacccctgtaagagaggacttaggtcttggacgaggggagcagttgaaaagacgaagcttctagcaacctaaagctagtgcgcattagcgtgagagagagacgtctctctgagtggattgtacctagtatgctactaggactctgtcggttccgaaaggaggagtcttagtatcgaaaagaaaaggcataagtacaggagtttggctctatgcctatcctttcggcgttagagctggaagtgttctggttcccagctagaacatggaagcgctctagcgctgcgagggcggggacggtagtcgtcccttcttgcggaaaggtacgaaaaaagagatattgcacggggtctagttacccgtgaggcttagcttcatggatacataggccataaaggccgtttgcttattagggatatctaaagggttgtgaccttgagctcacgcatcgacgaaatgtaggagatctcatgaagaactagtccaaagactataaccagtcctccttcggatgcctgtaaaagggtgttcaaggaccgcataagggtgtgaaagccttcttgcttagatgccgggagcagctgtagagctgtgcgttgaagagtgagagaacttgtgtaagggactgcacaaaggttaaggatacgggcgattgcgcagcccctgaggagattagattatccgtctagtctctccgggggaccaactgggtaacggtgggtcccgtcaagacttagtcggagtgtagagaagagaaggattggttatgcgaagggagacagtggtcttggtacaggagcaatccgtgtcgagaaaggctatccattagcgaaagtaggtacccgaaacgaattgcgaaactagccttaatagagaggctaggcgtgggtgagactctagggatagagtgtcaaccggagacggaggcttttgaaagagaattgctaaaccgcagaggattcatgtgtggttaaaaacagtcataataggctgtgcctatggcccgtggaacaggggacagtatccttagtattccgtgagggtaaggaactagaagaacatcagcattgtctgtatacactagcctttattggccaggagtgtgtatacagtatgcttctgtataggggcgggaggacaccgctctaagggatccagagcactagcaagacacaatgtgccactctcgacaaacctcagtaagctcttcccaagcgtggagttggtgctggaggagagagctggttacagtcgagcgacaccttgaagacgaattagagggcacaagccaagaacccttatacaggagaagaagagaatgcagctgaaagctctgctagccgacaaaaacgatggagcaacaccttgggtagggtgccaagatagtcggtgttgtggagaactaggtgacagttgtctgggaaattattgatcacaggaatggagcatgagagtgtttggatcgctaacaagcgagacactagagggtcgttgtaagataccgtaggagagtccagggatgtctacgtgagcaatacaactgggggccgctagccaaaaatgtggaagaggtactagggatcgcctaaacagagagagaagataggtgtggctcattaagcgcatggaagctggtagaacag

SEQ ID NO: 2418 - DNA, 846 bp, Xanthophyllomyces dendrorhous
catggaagctggtagaacaggggaagtgtggaatagggacgtaatcaattgctctgggttagagagttatgctcaaaaggaaaccttgtaaagggtagacttttggagtctagagggtgagtaagccctcgaggactggacctgatagcggtgtaagccgctagaagtagcacgcaggaaacaatagataactcagaaatctacggaccagtgtctacctgaagatttcttcgggagtgcatagacatgggctttagatccttgaactcatgaccggtagttgtggttgccattagtgcatcggaactacgggtcatgagggaacggggatttagagctgggatcgtaggtgggaaatgccacaacagcacccgctgttgtacacctcttcgtgaggggtcttggtactatgtttagccgcctttggccgctatggatcatggtatcatagtgggctgagactgtagaggtgtatctacagccacagctctcccctattgaagagtggcaagtcccacctacggctggtccttaggctagtggctcgtgagagagctagctgtagacggtatactgagcgttaagcaacaaagttgtaagcgtagatcagtgtctcgaaacgtgcctaacactcgggagtgctagcggagctatttcttcgacaacgtctcaatagaaaggaacgaacgtcgtttgatagtgacgtgaaggacctctctggaaaaaaggacttctgagtgtaagaggggataagggatccccgattaggaaggaaagagaaatttgggaggctagtagagcctctgttagggatgaacagatagaaagctagagaacccttggaag

SEQ ID NO: 2419 - DNA, 343 bp, Xanthophyllomyces dendrorhous
  misc_feature (176)..(185): n is a, c, g, or t
tcctcgtgaggaacagaacgctgagtctttggttaccctagacttgagttgctccctaaggctgacagatggtgtatttcagagatatgggaaagtgatccctgctgtcttgactgaggtggtgtgagacaattgcctctcgaggatgggcctccaagtctgttggtcgctttcgnnnnnnnnnnccgtcctttgttctcatagtaaatgtcgagcgtgtatcctgtgtactcctgatggatctgtttccacagttccaccctatcgtcgtcgaagccaatcctgcgtctagtgtagctggtcaagccaggaaggagaggaggccacgagaaatgatgtgagg

SEQ ID NO: 2420 - DNA, 502 bp, Xanthophyllomyces dendrorhous
gtgggtgggtgagtgagcgtcttgatcagtcggtccagaccgacggctagctccgaccagcatcccgctacgtcctcacatcacgatcagatagacacagagaccatacagactaggctcgctcgtctccaccttgagcagttcatccctcagcttgttttgtatctctggccgagtcgacaacgagtggagcatccaggtcagagcagtcgaagatgtcctaagatgcaagagaagtaaagagatccaccagcgagtgtaccggtatgggcgtgtaggtgtgagcgtatgtacttgaccatgagaacgagatatcacaagacaccagcataggacgtactcaaacccagctaggaggagcgtagagatctgcgcgagcacttcctcatcacccagtcggttctgctcagccagatcggtagccatgttcgcccgtactacaggtgccagcgacagaaaggaaagccgagcagaaagaagacacaaggaagacacaaggaag

SEQ ID NO: 2421 - DNA, 473 bp, Xanthophyllomyces dendrorhous
cggacgtcaaagcaaatacatggatggagataattaaactcatataaaaatttggaccacgcctgtcaatctcatgaggcatgacaaaaatttgctgaagcaaaccatatgactttgagccgcagtgatgctcgacagatcagttgtatctagctgtgagacaagtcaaattcaacaactccaagcccttgttttatgaggaaatctgacggactgtttttatcaactatgatatcagtttcccataacaaggatgtatgaactttgaccgttacatatgtaccttttccacgcctacttttccacgtacgtaaaatgataaagcacaacaaaaaaagtcgttgcggaacttcatgctattcataggtgcgtgtccagcctgctacaagactgtctaaatgtgagtagttgctttgtcttcataacgaacacgtcatgctactgctttggtttgtcgactcagtttttcagag

SEQ ID NO: 2422 - DNA, 1650 bp, Xanthophyllomyces dendrorhous
aaacgagatggtagcaaagacagcggaagacattctatatatgtttcgtcggtcgatcccgacagcaaagaaagaaagaaagaaagaaagaaagaaagaaagaagagaaaatcacagccagccgaccagagagcgaacgagcgaacgagccagaaaagccagcttgagaagacaaagaaggaaggaggcaaacgaagaaaggaggcaaacaaacgaaggaggacgacgaaggaagaagagctaggtcgatatgtcatgtagagaaggacgatagtatacaacttggccacagtgctagttcacatttttcagatatcaacgaaaggaaaggaaaggaaaggagaagatagagagagcgcagggtagacgcccaaacagacgcccagacagacgcctcgattggaggccagtcaggaggccaaacaagaggccagacaagaggctagccaggaaacaggtggagaacaaagaaggcagcggggaagcaagacagaaggacagaaggcggccaccctagttgttccaccacctggcaaaccagttcgagttcttgttggccagagcctccaaagcctcgttctcggcctcgttctcgtcgatctcccggatcccagacaccaggtcgacctcggccggcgggatgatcttggtcttgtacacgagcttgtagccaaagtaggcgatcgcaaacacaggcagaccgatgtagttcgtcacgaacgagatcggctggaacttggggaagaacgagtcgtagcccttgaagatgacgatgaagccggtgaagaagagcgcgatccacgcgccgtacggttggaacggtgccttgtacggcaggtcgtcccgggacatgccctgggcggcgagcgccttcatgaaccggatgtgcgaccacaggatgcacatccacgtgagcgcaccaaacatcgagatgagcgacacaaagtacttgaacaccgtcagcgcagatgtcgccaccgagcagtacgacagtccacagaacgccgtgcagagcagaagcgcgttgaacgggatcccccgtcggctgaccttggcaaagatgctgggcgcctggccctcgacggcaagcgcgaagagcgtccgggagccgatgtagagatcagagttcgcagcagagaacacgaagagcaggatcgcagcgttgatgatcgacggaagcgtcttgatccccgagatcgtgatcgcgacgacaaacggcgatgcgttcgcgttcgccgacgacttgatcgcacccgccagcagcttgctgttcgacggcacaagcagaccgaccaccgtgatccctccgatgtagaacacaaggatccgccagaacgtccgccggatcgccttcggaatctcccgtcgcgggttcttgctctctccgaccgtcacaccgacaagctcggtaccgatcagcgcaaagagcgcattcgggaacgcatagaagatcccgaggaacacaccggccggagtgttgtatccgtagtgggagaacggcccgggttccttccagtatcggaaaccgatccggtcgtgcgacggccctccgccgagatcgaggacgataccgaggatgatcaggccggtgagcacggtgaccttgatggcactcatccagaactcgaactcgctgtgtggggtgtgagg

SEQ ID NO: 2423 - DNA, 1625 bp, Xanthophyllomyces dendrorhous
tacgtacgtgatgttgttgggcgtgacgatgaggtacttgaacaggtagttgtatccgagagagaagccaagctgggcacaggcacacacacaggcacaggcacaggtacaggcacacagatgcgttcgtcagtcgacacatcagaccggtccgatcgacatcaggcacactcacagcagggtcaaagaaccgggaagagtatccagcaaagccttgcttgtgcggcaagaacgtcgcctgctctcccagactgatcatcaccatgtagcagacaagacccatgatcgagtagcccatctgagcgacagtcagagaagcacgacaaaacaccagacgcaacaccagacgaaacaggaggatgagcatgactggaaggcgatcacagcagaagacgagccaacagcagaggagcagagctcggtgcagtagaacccagcagaacacgtaccagcagcccgacaggtcccgactttgacagagcagaaccagaaccgatgatcagacccgttccgacagcctagaagcaaccgacaggatgcagagagagcacaagcgccaaggcgttagcagatggcacgcaaagacagagcacaaccgccgtcacaggacgacacaagatggaagagacctactcctccgatggcaatcatactgatctggatgggtcgcaaggcgcgcgcagcagatctcggtcagaacgacagacacagtccgcgaagagagcgacaagacaaacggagaaaagggaaggaaacaggaaaaagaagaaggaaaaaaaaagaagaaaaaagggaaaagaaaagaaggaagaacaaaagagaagcatggacggtacggacatgtctggccttgagccctcggtgggtcgtcgtgttttcgatctggccgtacttgtcgtcgacgtcttctgcagcaggcacggtcgcatggaaggcgcctccgtccttctcaaagtctttcgatccgtactcctcgtctacgcggtcgtccatcgtgggaagagagcaagagagaggggtgaggggtgagggtgagagtgagggtgagggtgagggtgagggtaagagtggtagaggacacaggagtccagcgagtccagcgagtccagcaagaaagaagaaaaaaaggcgcggacgggtggagaggacacgagcgcaagagagaggaaagagagagaagaaggatggaaaggatggggaagaagaaagtcgaaaggggaaagccggacggatggcgacgattcaagtagtcctcgcgtgcttcccatttttctgtccttatccgtttgcccgctctctttgtcgtcttgtctctcggacgctcagcctgtcgacctatctctgggacgatgtcgcctgtggcctgtgaccttggtgtggccttggtgtggcacggtggggacggtcagtccagacggggctcatcgatctgtttgaaggaggacagcgcaaattggctatcgtccatccttatcagctgatggctatctctgccgccttctgcctcgcgagatctgggtccgattcggggtgggtgtgcctgtgtgtgcctgtgtgtgcctgtggacgtgcctgtggacgtgcctgtggacgtgcctgtggacgtgcctgtggacgtgcctgtg

SEQ ID NO: 2424 - DNA, 24782 bp, Xanthophyllomyces dendrorhous
gtctgtatatctttgtgcgtctgcgtctgcgtctgtggactgtagattgtagagccttcaccaggccgttcatcatgaccggcagccagtcgaaccgatccaacggcttatcttgcagccaaacagatgtcagcatcgtcaccatcgtcaccatcgtcaccatcgtcagcctcgtcagcctacaagacacagagaagtcggaatgacgagaacaatcatccgcgttgaacactcatcagcggtgctagtgttcgccaatgctactgccgctttagccgcccaggctgacgctcgtccttttgctgaggctgacactgtttccaccaacggacgcaagctgaacacgtgacccatggaattccgggggttcaagatccgaggacgtccattctcggaaggattacgtattgatcaccttcggttgcggctaccttctattgaccaaatccatactactgattccgtatacatcgaccttgttcccgtcatctttgctacacatatcgagagcgaacgacacactagggcatatagcaaatctgggtgtaaataatggccaagcagcatgtctcttcacctcctcggtcagaaggttctcctcaatacgcgtcagagcctgatcagatgcacccagtagaaaccaaatcaaagttgaaatctgtcgttcaggagtatctgaacgacatcaagccgctgttgatcaagaagaacttcaagaagttgactagatgtttggttgccacgtttgcggctctgattcttctggtcgacgaaaaatcattgaaggttatgggtcaggcaggtacgtccttcaccttgatataccctctctctcttcctcgtatgtaagagtagaaggtagagaggagtccgtcaacgcctcccatgcttagggaaacattcgtcgacacctcctgtctgattgttgtctttccttttcaacacaccgatcttccattactgatgtcatcctcttggtcccttgcttgattgatgtcaaaacgttcaattcgcttcattcgttcattcggttggtttgaaacgatgtaggattcttttgtgcaatggtatctgtcatggttcctcctagtctacccgtcagcctttttttcatggcatgctctgtaagtctcgtcatgaaccatctctcttctcatcgttgttatgtaaaactgagggagtgatcatatcatctgattttgggtttgatcatttggcatcatgaccagacgattttgatgggtatgctttttggctgggcttggggttgtgcagctatggcggctagtcttcaggctcgaagtaaaactctgttggcctcgacttatgagcgggtcacagtcgggtgagtactcatcctctatcctgtgcatctccttgtttccgctagccttctcacggtgtgattggaactaggttgaacaacaatccagatgctacatttagtagtagtatctttgccggcgacttccttgacccccgatcatctaccgtattcggaatctttctattttttggatgctgtacgtctatttctataatcttgattgttcgaccgcaaggtttgataagatttcggtttgctgcatcaagtcgctctgggtgcattgagagcgcatatcccaaaactcactctgatgagcgtatttggatccagtatgtccatctttatctctctctctctcttcactcagactaaaactctcgaactgaggaccttacaaccggcattgttcaacagttgtattggatgtgatgtgctcatatgggcctctgtttccctctcagcaatatacgcttgccgtaagtaattaattcatcgcccccctccttcatcaaacaactcatcacattcttcttcgcgtgccctttgtgtttgctttagacgatatttctgatccctacctcaagctacgtcgcaattggccttgtatgcactgtactcatcttcccagagtccctggcgcacgtctggttagacggaatgatcaacggatttttgaaggtgagcccctacgcttcgcacatgggaatcaaccatcacaaagaaacgttccggattgacacttcactatctccttcttcccaattgttctcataacaatccacacagatttcgctccagttggtggagctccaggaagtcaccttgtctcctaaatttcctttgagctcatcagagttgaagcttaacgttgagaaaggtcgagggttgagaggaaaaatgattgcaggaacgcaagccgtgaagggttccactgggttcgtttacattctcttctgtgaaaacaaacgatcgatctccaagagggtttctcatctctatgtgagggttgtgagatcagtatgctcgatttggaaccgacatatggacgacttggaccgggcgatctgaaaaagtttgatagcaagatgtctttcttgatgaccaaagtgctgtacgtcattcttcctttcctctgtctagaacgattctagccaagttttgactctatgtttctacctgggatccctaatccactcgctgtggctccttctcattgtagttctctccagacgttcgctccgatcgtctatgattctgttgtccggaccgagcaagatgagatactcctcagtcagatttactcctcctctggtatcaccagcaacaaacctcactctcacaagcacgtccagaaccttcgacatttgaagcttcgcacgcagatctctgaaaaggaacgtgcgaacggacacgatcttcaagcgcttttaccgatccttcggtcctcatctagtgaacttcgacagtcattgatcgacgcattaaaaagcttgattagttggctcgagatggctaatagtactcggtggtccaagttcttcaagaaaaatgataaaaacactcaagcccaggagatcgagcaaaagctggagatggagagaaagttggaggcacttcgacaggcgttggtcaagttcaaagagatcgagagaaggaacttggtggaaggcccgttcggcggatacttcaaggaattggaaaagaataaaaaaacgatcgaccgtttgaaccatgaagggttttctgcgaaaagtctctttgtctgtttcgtcttcacgtacatcttttgattctcgtcctgtcttgacttcctcatatgtgacaactacgtctgactacttgcgatgttttgtgggatatcataggacgacactcgaatcatatgccgaggccttcatctccttttttgaatttgccattcaacttcgaggtaaaaggccggcttctcgcctctggtggcctaccggatttggcaagctctggcgcaagatcacagcggatgacggtacccggtcgggcgagatcgattctcctctgatcagtgttgcaagtgatattggaaggccaaggacaagtgacgacaccttgaatcaagacgatctagcggaggaggaggcagatggagatgaagatgaagggcgcaagaagtttgcaggagggatagattacgatgagaaggaaccaaacttgggtaaactcaggataagctgtattattgacttatatatcgactgaccggacttcactctttttttcctttcaaatccctcattgatgataataagcccgagaccccgatgctaatcctcctaggaccggatttcagagaacaagtgtcaagattggggtctttttcggatggctcagatccagcaaaggccttttctctctacgttacgctctcgtctccgtttgcttatggggtgggtcttccatgttcttctctcgtctgaatggcaacgatcgagtctacacacgtgctaaatttgtccatcacacctcctccattcaaagtcattgctgtccatcccaagaccgcccaattcaattaccaaagtcagtctttcctacacctcgctcccactttctactggtttttgctcataatctatcgaatttccttcgaaaagatcgaggactctgggcgttgatcatgtcccagaccggacttgctgtattcgcaggagaacagatcgcaacattcattttacgaatgagtgggacggtagttggttgtgtgctcgggatggtagcttggtatatgggatcaggtcatgggaacggaaatccttacggcgttgtcagtatcgtctcaccatctttcggttttcttcctacggatcacccacccattcattctctacatttccatctgtgctgtcacatgccatccagattgcagctactgtaagtcatgaaagacatgtatgattagatgctcaatccatctgatggtctctcttgatattttctcatcgattctgggatcagctggttcttttgactccgtggatctttatgagaattgctttgcctcaacaaaaatccatgttttacctgatgagcggtaagctgaccagatgttctaaatccgagaggtgcctccttcaatggacttgttccttcatgctcatactttctccctacaggcatgatgatcgtcttcattgttggatactcatgggtcgacacgcatttgaccgtcacagtcaactctggcaaaggatacgagctcttttggaaacgagtcgtccttgtcacgatcggtttcactgctggtcagttcagaacagttttcatgatctgtagtttgcgtctgcgattaaaacacaactgaagaatgttatgcctcgatcatcgtgtaggattcatcatcatgtgttttcccaagattacctcggctcgaaccaccgtccgaaggacggcttgtatcatcaagtgagcttcctcggttacattctgagatctttaagccttctcaattgacttttcttcttcacttgtgaaatagtgagaagattgctggagtattcgaggatgagatcgagatcttcctccttgaagctcgacatgatgcacatactacagtgaatcaggctgaaatagacagatcgaagtctagcaaggagcgtcgaatgaagagcttatcgaaaaatctattggaaacagccgtaagccgtgtttcccaccaattgctccaagttctaaaagagatttgctaaaacctacagatgatgcagatgatcatgcaaatgatcaaaccgtcagtcactgtagcaaagtttgagcctcaagtccgagggccatggcgtgagtattgccgccttcggttgatttgtacgatgagcggatccatgagactcaccctcaactcatttataaaatagcgaaagagacatacgaacggctcttagatgctcagtatgtacctctcgtctggttgctggatttagtttttatcaactgactgcctgctatactttgcggttatagatggaagcttctggtcaacactgctctactctctggagcgctcaccgcgttgaatcctcattggtgctcggtacttgtccatcaggttcgtctttcttcttttcaagattcctcttcatgtcttctttcattcgcctgacttgttcactattgtatatcagactccattccttaacccggagttgataacagatatatttggaatcctgtcactgatcacccaatgcctctacaacggacatcctcttcctccgacgctgcattctcttcgagatcgattggtctaccatgatcggtcccgttcagccttctcgtcctcacgaaaagtttctccagacgagagagatgaggatgacgattcgacaggtacaaacgtagatggagactctttggatccatccactgagaagattgatggcgtctcgatgggtgtgaagaacataggactcgacactctgaccgtatgtccctttttcggctgtcttcctcagttctcctcctttctctcaggttctgatttcctccaaatctctcttctcttctctcacaactgaacgcatggatctcggcaggaccctcaattcccgattcacgccacagcagttgtctccataagtctttgtttgactcagatcgataccatcaccgatatcgttcgagagttgtgtggtgagacgggcacattccgagggtttgatcattggaggtttttgaacgtgaaagatgaggaggagggttacaggtctggtttgaatggacgcagaaagaaactcgattgatcggttcaatagcttccctgttcttctctcgggtctgggatactttttgtgtgttgtctaattgtaattcaaaatagtttgtgactcatgcaatcgttcgagattcatcactctatccatgtatgtatgcttccgttcgatgatccgtgtttccttcatctttggattcgtgagtttattttcctttcgtccttgaagagagtcttgtgaaactaagctccgagaacaatctttcggaacgtcgagtctgccaactccagagcttcagagatcttggagacttcggatccaactccttggaatgattcaggctttcctcctcccttttttcatttcatttgaaaagacaaccgacaaggcattatcaacgaagagttaacacaggaacagagaaggggcacaatatagaagaaagcacacaagaaaatagataggtaggaaagacaaacctttccgttcaacagatcgctcaaaggagcggcccaggtctttccgtcgatcgccttgatctccttgggcacgtagttgacgtacgtcaccttggatgggacttctgggtctacgttgatgatcgtcaccggcttgttgagcttcttcaagttaaggacgaccgtctagaaatcgaaacacaaaggacgaaacaatgagtccgaatgattcgaagttttgaaacaaaagagcaccaagtaaatgaaaagaaagaagagaacgaaaagacgcaccttgagactggcaccggatatcgagaagggtgagataaagagctcggcattcgggttttccttaaagtgagaggtgatcttctcggtaacctagatgacccgtcgtgtgatgcgatcagctgccgttcttcaacctttccggtcaaagacacaaaccgatcagaggatagtagaaagatgaactgacctccttggactcctgagcgcttcgcgccttggcctcctcagtgaacgccttctggatcttagtgtacctctccatgaggtcggccttggtcacgtatgatacatccgacgacgcgagttcctgctcgacaaagaagatacgaagtatacatcgtataggtatatcaatcattagcataaggataggctgaaaaaaaaaagagaaacaacctagaaaggaaggagagaaagtaactatgaaagaaactcacagtagggaaagccttgatggcaacctcagcatcttttcccttgagagcctccaaagcattggtccgcttggaccattcctcccccagccgggcggtctcatgagcctcaagtccggtaacggcgaccagtcgcctgactcctttagcaataccgtcagactcgacgatggcgaaaccctggatctcggatgtcttcttgacgtggctatttattacaagagagatgttaatcgaccaatctcagttccgagagccgataaagcaaacagaacagactcacgttccaccgcagaactcgacactggtctgcctccatttggggttctccacatccttcgagatctcctccacgctgtactccagcgtgacgacccggacgggatccgggtaggcctctccgaacacagctcgcaagccggggatcttgaaaccttgctctagggaaagctcgctggagaatacctcgacgtccttcttgatccattcggcgcagttagcctcgatagccttgagctcggtctgggagatgggacccttgtgagagaaatcgaaccggagcttggtgggcgcgacaagagatcccttctggtcgatatggtcccccaatacctctcgcagggcgtagttaagcacgtgagtaccggtgtggttctttcgaagcggcgctcgtcgagcctatcgaaaaaaaaaagatacgtcaagcggagtcgatgtgtttcaatatggcaaaaaaaaagatatacctcgtcgtaggtgcagacaacttcgtctccaaccttgatctcaccctcagtgacgactccgatgtggagaacgtaaccgctgaagacctgagtgtcggtaacgaggaattctgcctttccatcgatgatgatcgaaccggtatctccctcttgtcctccagactcggcgtagaagtttgttcgatcgaggagaagtcccaagggcgtagtgatggacccagtcgaatcatggaaggtcgaggactgatagattccctggatcttggaggtaatggaagcggtacctaagtttgggatttcaacagaacgcaagccagtcgacgcgtcaagtgagaaagaggagagcaagcaacaaaatgtaagaaggaaaagcaaaaaggaggaaggtgctcaccaaacttggcagagtcctcggtcttggaaacgattccttcggcatccaacttgccgaggtcgtggacatccaacttgacgacgtcttcaccggccttcttaccgactcctcgactagcctctttggcgtccttggcggcttgctcgagaccagcctcgtcgattcccaactcgagctcaccagccatgagtctagtgagatcgacggggaaaccgtaggtgtcatacaacctccagacatcctttccagcaagctccttcttgccagcatcgattgcctgggacgagtactgagcgaagagcttctctcctcggtcgagcgttcgggcgaaggagacctcctcctcattcaagatcgaaaagagggctttggtgtcggtcttgagctcggggaagaattcacccatctgctcgatgacggtcggcgcaagtctggagaagaacgtgccgatctcgacctggaagtactttcggacgaatcgggcacctcgtcgaaggattcgtcgaagaacatatcctcggccgacggcgtcggggacacctccatcgacgatggcaatggtcagagttcggacgtgatcggcgacgactcggtaggcagtgtcgactccatcagtgtcctccttgccgagcttaccggcgtagggtctagctccggtgagctcttgaatcttggcaaagatcgggaggaagacatcggtgtcgtagtttgatcgtttgtcctgaaggacagagactagtcgctcgaaacccataccggtgtcgatgtgcttgttagggagcgatcggagggagccatcggtctctcggttgtactgcatgaacacattgttccagatctcgagaacatccgggtcgtccatgttgacgaggtgggcggcgtttcgacctccgattcgatcgtagtgaatttcacttttggagaatgatgagtgcgaaaaaagaaaaagaaagagtcaaatccggcgtgagatgttgtgaaagagcttccacaatagcaattcatacctgcaaggtccacaaggtccggttgcgcccatctcccagaagttgtccttagcgtttccggtgagaatgtggtcatcagcaacaccaaccttcttccagatatctctggcctcactgtcggcttccagtccttgagcggcgtcaccttcaaagtaggttacgtaaagtctgtccttggggataccgtatacctaatatgttcaatacgccagaaaagatcaagtttggttgagcgaacgtgtaaaacggcgataaggattagtagacgagataaagattgcacgtacctcggtcagaagcttccaagcccaggtgatggcctcgtccttgaagtagtcaccgaatgaccagtttccaagcatttcgaacatggagctgtaagaagaaaaaaaaaacaagaatatgcgcgttgaagcgaactcagagtgagacgtcgaagagagagagagagagagagagaaaagatgaggtgaccacgtactgatgataggtatcaagtccgacgtcctccaaatctgggaggattttggtttcagtagagtaatgtcacgagaatgaggagcgttagcattgtatgcgccctggacggcaataactagaaaggtgtcgtccgacgtaccgttgtgctttcctccagctcggatacacttctgagagttgacagctcgagtaagcttaccgagagccgacgaggtatcagcggtgccgaggaagattgacttgtactgattcatcccggcgttgacgaagaggagggtggctgtaggaaaggcatgatgaacgagcgagttgtgcatgagtacccgtcgtaggaagcaagtatagaaaacgaagaaagaaaagcagtcgaatggcagaagattgagcaaagagacagcagactcacggtcctcgaacgggatgacactggcactcttccaaaaggtgtggtcatggtccttttcaaagaactggatgaaggtatccctgaccttcttcgcaggccaggcgtctgggtctgggaaggcaactttggttgagggcacggtggacatggttcttgttccgactgttcggattgaaaattgagagatgatatgtggtctagaagtaagtttgtatagcagatgcctgattcccatcaaccgagtgggaacttgaagacacagcgagggtgggatggagatgagagataagagatgaacgatgaggagacggaagggattccagacgaggcagcataaaaaaaatgactgactggcaccggacacaggcgtattagaaggtgtattaggaagtgtattggatgttgtattggaatgtatattagaacgtgtattaggaattgtattagaacgtgtattaggaattttatcgggagttgtatcagcaggtgtaataacaattgtattagaaagtgcaaacatcaaatgtattaggaaacgcactaacaaatgtatcaggcttcgtattacaacccgcaagtggaaacgtattaggaaacccatcaggcaacgcattagaacactcactatacatctattggacggagcattggcaagatcgtcgagagacatccggcgcacacactgtactaaacactcgagagacacctttgtatgatctttgtgagaaatatacagggattggcagatcgatatcgtgtgtatgtgttccatgtaaagatggtgtggtctattgttgctcgtcatcgtcggcgatgctgttgtcagagctaggctgccaccaagcgttgtctcctgcttctgctcctgtccgttgtgatatcctttctcgatctgtacaactcgctctctctctttcccttttctcatccttgtcatatagtgctatgattcatgtctgttagactctgtcgtttcattctaatgacgcccagtgcatacacgctatcatacccttcctcctatcttcgtgcgccgtccacacgccgaaccggatcgctctctactcatcatcttgcctgcctacatcccttcctacctcatgacgtcctctccagttctccctactaccctacacagtctcctctgcctctcctgcgctctccttggccaggtcgtaaccatgtccgccggtaacggtcatggttacgatgattacataagcaagcaatgtctcactaggcgcttttcgttcttccgttctttttctttttcgccttctttccatttcctcaccttccacccatccatcgtcccttccgtcggctgtcgtcgctctcctctcgctcgatttctcttgcctggtctcgacagagtccgtgccaaaggatcattcgcacccgcagacaaattttcgtcgctttgcaggcctttagacagaaagaccaccacaatctatcccgtcgcgttgtctccccttctccccacccagctgaacgcaatcagcatcaccaacatcgagacttccgttccctcgcacacgtctcatagttctctgcaaacactcgtcacttctggaagagaacgagctcccagtcatcctcgcagacgaagagtcgatccgtctccctcaccctcccctgctctcaatccaaacgccacctcacgcttagcttctcgtcgaaggactccaaccccatcgtcaaacagtaccagtcggacgtcttcacaggctccacctcctgccactgtcacgtccaacgtctcggtcacaaactcgtcctttccttcctcgctcccgtctccgtcctcgtcttcgtctgtatcctaccatctggatcgaccgagcagtcgcttccaactcgaccacgcccagtccccattccatgccaacagcacctcttcagctctcgtcccccaatctcatcagccccttccttaccattcagcctcaaactattcgaaccacccttctacctctgcctctacctctatcaccaccacttccctcggtcccatgtactttcatcaccaacagcaaccgacaaacacaccgtctccctccttggtatcccacaagctacagcagcaacaacagcaacagcagcagcatgatgggtggggcagacatcccggaatgttcagtcaacccgctgtctcatcaatccctccctatgctcagtacgcccctcctccccaggtaagtgtctgtgttttgtctttcttcttctgcctagcaaagtggccgcgtgtacaccaggctcctcgtgggatcatcagtggagcggacgtggattcctattgggcgatagatgaacaacggcgcccttttgtcatcaagttctgactctgactctgactctttcctatgtacacgcttctttcctccttctctcgtgctcttccttctccctgtccgttgtttctctcaatgtttccaatctcagcatcatcacccccatcaccctcaacatcaccatcaccaacagtcattctcacagtcccataatcaagcccatcagtcgcctgccccgatgcatcagcaggtcaacggtctccttgtctctaaccttggagcagcaggaagtatcggaaatggtgcccattcgagcccaccgcctcagagggcaggcacggaggacacggtccattggcaacagcaattggtgaagctctcggtacgttcctttgcctttgtttcatacttgcagcgaacattcctgattattgtcttcccctggctaaccattcgccgtcgccatcatgtctgcgttattctctcccaggcgtgtcgacaagcttcggctcctcatcaccgagctcgggcagcagcaatcacgggcagaatgaacaacaacaaatccgcaatttccattcaggaccctaaccgaccaggatcgactaaaccacccggtcacccacttcacaagaaagaatcttccctttcagtcttggctgacgatagcgatggtgatatgacatctccgagaccctcatctgcccgacctgggtcggcagctggtcatccctctagccttctcggtccatcaactcctcctcaccgattcgctgtagagaacagttcggtggccgcgaacagtgctgtcgtttcgcctgcctggaacggtctcgaccttggtgggatgcatcttaaggcactttcccccgctctattcatgtttcaacatatcacttcactctacatcaactacaacgcgctcaccgtgcttcctccatcaatcgcgtcactccgaaaattgacgatcttggatgtgtcgggtaaccatttgacggccgtcccacccgagctaggtatgattacctcgctgaaagaggtttatttgtttgacaaccagctggccaatttgccacccgagctaggtacccttcatcaattggacttcttggggctcgccgggaacccgcttcctgaggcgatcaggctcatgctggagaaagagggaactcaggcattgattacgttccttagggactcatgccctgtgccgatgcctccgccggatagagagtggatcacggttgaggctgaatcagagatggccctcgcggtctctcaggcggccgaaccggaaacgttcaccttgctctgctacaacattctttgtcacagatatgcacctccccaaacttacggttatactccaagctgggctctttcgtgggactaccgaaaagaattgatccttcaagaagtcatgggctgtggagcggactttatctgtttgcaggttagttcttcttttcaagcaaagtctggtcctttcaatgggtttgagaaggatgctgacagggtgcaattctttttctctctctttgatcggtttcacaggaggttgatgacgaccaatatcacgatagcttccttcccaatttaaccaaagagggttatgatggagcatttttccccaaaactcgtgcgcgaacaatgagaacagacgagaagcgacacgtggacggatgcgtgacgttctggaagacgtccaagtgagctggccagaacttttctgttttaaaaaattaatacattatgaattctgacgtccctcatcggttttctcatatcttgtggttctaaacagatacgatttggtagagaaacgagtgatcgaatttaaccaggttgcacttcagcgaccggacatgcgaaactcagatgatgtgttcaaccgagtgatgtctttcgataacattgccgtggtctgtcttcttgaaaatcctacgactggatctcgattgatcatcgcaaacgttcacatgcactgggatcctacgttccgagatgtcaagctcgttcaggcggcaatgttggtagaagagatggagaaggtatctgatcagtttgcaaagttcccacctaaactcctggccgacaacaaacgaggaccgtcctactcggacgcatcaaagattccgttgatcatctgtggagatttcaactctgttccttcgtctggagtctacgagttcctctcatccggtgacgtcgccaaggaccacgaagactttatggatcatctgtacggatcttatacttcggaaggtttgagccacaagttgaatcttaaatcggcctatggatctgttggtgaacttccgatgacgaactacacacccaacttcgaaggagcaatcgattatatttggtatacccaaggatcactcgctgttaccagcttgcttggagaggtcgatcagtcttatctatccaaagtggtcggtttcccgaatgctcatttcccgtcagatcacgtaccgatctttgccgacttcaagatcaaggcacctcccccgtcgacgagagccgtagtttataataccgatcgttaaaacctatcatctctcacctttctctttctagcggcttctttgcctctttttcttgtagatagttcaatctctcttcgtacacacacccacgctcacacctacacctacacccacactcatatccacacctatcccgtctgtttttcgttccttatcaatccttcgcgtactaaaaaacaccactcctctcttccttgcaacatactctccctactttgccagctcaagattgtttcctcttttggtttctcattacttttgttttccctttctgtccatgggatttgattcatccttctatttcaatccgtcgtgctttcttcttcttgttttctgtagtttaccactttttttctcttcttcctctttcataattttgcttccgtaagtgtctccttgttttctttcgcctcccactcttctatatatctatcttttatgagggtccactcgatcaaaccgtccacatcggacagacacaagaatgcaccttctccaacactagaatcattctctctccgtgccctctctctttttcccgacatcactgtccctggttttcgtgggatatgtggtctcttttccttgtgatctttatgtgcccaattcccttttcttgagatcggaacggaaccatacatgacagatcgaacatcacatcgaacttggcccgaagtacctcatgaatgtgatctaagagtgtcccttcgtcacattcatcagctctgagtgttttttttcctttcttattcttatttcctttcgtggagctcggtcaactcggaagatgcttcacaaagaaacgtgatgcaatggagatgaaagatcatgagaaattaaaagagacactgatcagagttggatggtcggtcgtgttgcatgagaagagtaggcagctaggttgaggaagaagatttgaacaagaggatggacaaagaaagagagaagagggagtaacagagagagggaagtaagatcaaacaaagaactgattgaagacagagagagagtagaaccaacgagtaaaaaaaaagaaaggtttgttttggtgtatgtatgcgcggtacaattttttttggaataactcaacgaaaaaagaaaacaagaaaatgaaagggaaagatcaggatcatgtaaagaacgaggaggaaatggggcgaaggggatatcagggtatataaaacgggacgagcggagatttgattgaatgatcttaactatgaagagaagttggtggagaaagaggttataaacggaagaaggaatgaagctgaggtcatggtacgttctagtaaaagatgcaggtacataaatgagttggaaacaagaagaagaaggagaagaggaagatagcaacacgatgaaaaggattgaaactttaatcaggaaaagagaagaggtggtagcatgaatagagaagaggaaccgtatgatgcaaaaaaatcagggcaaccgaaaagagaatttaggggaaggaaagatgacaaagccaccaggaggaatactctgaacaaaagacaacagaaggaacgtcgaagggaaaggaaaggctgaaacgatatcgtgaggaagacaggatatgaaatctaaacaaggttaaaaagagagaaaaacgaaacagaaaggtatcatcaagctcccgatcatcatggccagctgtctttggtcattggaggatccatcaacggccctcccggtccccaatgtttattagagtcgcctcctgacctttgcttcgcgtgacctccaccaaaagctctctgtacggccgaggttgacgactggctttgtcccagatcagtcgaaggaggcggtgaagacgctttaatggggtagtatgctgtcgactgcatatttccgtaaccaccacgaggcggagtagtggaagccggattatcgctcagttcaaacctagggactgtcgtatccgccatcaaccgaccaccatgaggtagattgaaggaggaagtcgaggaggaaagcgcgccgtagctaccgtacggtccactcttcggaggcagatcaaacccttgatctaagatagcttccaaatcgttctcattgaagatctcaccatcgtggtcatcacctgcaaatacgatgggcggcggagggaacgatggattgttctcgttatatactccaatttgaggtccccattgatcgtcgtcgttcgaagaaaccatggatgatgcgtccgaagtatcatattcggaattataccggaagctgggggcgagcgttccatcctcccgaggactgaatgctcgttcgagacgctcttggtccctttgacgacgttcttccctcttgatccgtctgagacgagagcgttcccaatcctcccatcgacgcaaaggcacgctcgctacgagcgctctcttgtcatcgacatggcccaaatcttttccttctccagcaaccttcctatgaatcgatgaagaacgcgcaccgccttccagtttagctcaatgtgaatgcaaaagaagaagaaagagagaagaatatgatatgtttcagacaaaaacgaatgacacgaaccgagtttcaccccaagagaagtcgtcaaaatgccaaaaggagtagaccggtaggatcaagttccagactggaagtgcacacaaatatggcaacatccaagccgcgtagatgagctttccggtcgtgatgatgattagaattgctggaagaccgagaactgaagccagcaaaagtagaggaattgcgctcgtaaaattttgaggagggtcgatgattgagttgataatgagtgctcccgtcaagcagatggccacaggaagagtgaccgttccgacaagatccatgaacacgacgaattgcatcgagaaacagaatgttccacacaagtttcgtactcggacaagctccatcaaattatgaacagtcgagttgatccaccgacgtcgttgagatagcaagaccgagaacgtatccggtgcgacagtgtggcacctggcctgaggacagaacatcatttttctgttcgggaacgttctgagcatcatcgtcgataaaaatcgatcttcaccaaggagcaagaggtttttttgatgcagggtcgaaacctcactctgggagtattctcgaatgatatccggattggtgataacagggatccaatcatcatcgtccatcttcctcgacttgagtcgatacatcgagaaacatccaggtaaacaggtcactccgccaaataccgcttcgaatgctttggattgatagtgagagataaagtactcgaatacttgaatagctgtaacccaagattgacgtttgttggctatccgagtctccccgcaaactcccatgataagcttgtcgtgctgcatgcaatttaccagatgcgtcatggaatccggggaaacaacagtatctgcatcgacctgagatatcattcaacgactctttcgttagtttgacagcctttctttccttctttcctgcttgatgggaataagataaaagaggtttacttaccatcaaacagacttcgaagaaatccggagtaacacccataaggacttgagtcttcctgaaaagatcaaagtctagaggagtcatccggtcgttgtatgtcactcttgagaagaaattcatgagaatgagttgggagtctcgttttcctctgtttccaggcttcttatccgaggcttctgatggcattccgcatttgacaatcaccaatgtgggcactcgatgacggtcttgaccagttccggtaactgtagcgcacaacagatcagatgttcacccgtctttgagaacttaaaagtctgatgataaaaggcaaaaattcagaacagaaacgatactgaccataatgaccggcgtagaccattgctctgttttccttcttttttccgctccccacagcggtataccccatcggtaatgggtttccgaatctctcatccgcctctaacagaccgacacaatgatccggtgtagaaactgtctcaccctctccagtaatcatcccatccgccacgatgaagagtaacttgcgatgatccgagtatgtggtggccgccaacgagtcgcacgtggccttgatggaggaaagggattcggaataacaagtgactagactgacggtaaagagctcggctccgatttgagcttgagtgattagcggggcaggtggttccgtggaagccaattgttttccaggaccagccggtcctttgatgggtcgttttatcgttccccctcgccaaggagcggcaccgttcggatcatgaacggagaactttgctccatgtgagggcataaccatcgggctaacagcatgcctgttcagattctttggagggacgatcattcgtgcagataggaaccaagtgaacacgcaagccatggcgaaccgaatcaagatgacggtcaaaatcacacccagacagaggtagaggaagagggcagagatgaagcatccgggactgattttatcgagtctcccaacggaataacgagccttcagacaagggatcgcctcctcggttgatttcagagttcgaaacagtcgagtggcatctttccctccggatggatgagccatcgtggttcgaatggcggcatcgacatcatctccagagatcacttttgggtttgccgtcaggtaaggatcgagattgaggacgataccgtcgatgaccatgtagtatagagagtttgtcacgttttgccatgagtagccgacctgcctcgtggtgttgtatatattgagactcgaaaaagttgaggagccgagtgttgataatgggcaactcgtgttctgagtcgtcgaggttgaggtacaaggagatgtggtcgcgaaccgggcagtgaaattagagcattgagtataatcactcgcctgtcgggtgaacaagcttgtgacatcttgaccaggcatggctgacgcaagcttgtaaaaatcaacagagttggaaaccgtagaattcgtgatgttgaaagcccaaccgcttataccaaccgtgttggcagtgcctcctaaaacggccagggttgagacggcgtcttggtcctcaaccgggcagaacgtcgagttcagacccatggtgacgaacacgacgattccacccaagaaaatgctgatcgcacagagcgtgactttttctctccaagcttgtctgacacttgattctttcatcccacaggcggccagaacgaatggaggtgcccaaaacgtgacgatgagcgacatgatcacccaccaatcccagacttctgtattcgtgttcgctggcacgatgggtttcgatgaacctgggatcatcggcgccggaggtgtcagaagcggagcggatgcaacctgccgttcaggcctcgtcaatgtctttcctcgacgaagcgtagtagctcgttcatgttgagcaggtggaggtgggttggacgtagggatgatgctggtagagctagccgccgggttatacctagacataattgaaaagacctttgagccagaagaaaagcaaggagaacagaacggatacgtcgaatgctatcagggctgttattctctattttattttgtcggaagggcctaaggctttaatcttctaaatcgaccgactcggatgtccttaggtttgaatatatagaagagacaactggtaatctatcaggacctgaagttcttcttgcctagaagcagaacgcgaagagggagaacatgagtgacgtacgtgaacttttggatgaagccggtgtatggatcctggtctacgggttttataagtcggacaaagggaggagtatcggtcggaaagaacgttgagagacagagaaggcaggatcgttttgtcctggtatatattcaggctgcgtatgtaccgggtcatgtcaacaacgaaagcagcgatcgatacatatcagactgcattcagaaaggagagatattgatccagaccggatcgaaaggtataataccggtctcaaagctgtcctctcaagaagaaatttgtgaaagatagacgtaccggaacaagatgaattcacagcaaaaagcgaggaagaagggaggagatatagccgaggcgcccagcgacctgaggacccaaatatctaacacaaagagaaaccaaactagtcgagtagactatctgtgctgatccggaaggaagagtggtcgtgcaaaggaaagatgggcaaagggaccaggaagggacgagaggctcaagagaagtcagggaatggttgcttgctgacgtccaagagatgatgggacattagagcaaacacagggctggactcttgccggccaatttgagccaatcctttacgtaagccaggtttcgatctaaacaaaataaagatgaaacaaaaacattgatagaccactctccccatgaggcgaacaggagaatccatcaaaaggacattataataaagaaatggccgagaggcgacatctagagcttcaaggttggaaactatctaaatcgttgaaggaacgtaaacgaagagaaacaagagatgcgggtcgtatagaaaaatagatatgacaatttgattcggattcgacaaacataagcgagactaagatgataactgaacgggtagatttagtgatggaaagtatggagatagaaagaggacgggcgtaaaaattacagcctagaaagcagcttattcatctagaatgaagtccattgagtgtcggttgtccgatatgagtcgggcccattcgagatctggacatcaatagggagcaacgatccaacaagagacacaatcagaacgtctgtctcttcaaacaatgtaaacacaagtcgcactcacaaagacggaacatatatgccgtctgtcgcaagagcgagaaagaacagggacgcgtcagatttgattagtagagagcatcaaaaacaaagaagagagacgacaaaccatatcttctcgacgccagctggagagtgaccaagcgcgcctaagaaaacaatcagaaatcaaaaaccctctaaatattagcccagatcgaggaacgtccttggaggagcaaccgtatactgacccattctcggcgatagctctagccattaactcttcgccaatgaattcctggccatccccatggaactaagagtaaggaaaaaaaacacaagagcaaaagtcatttttaatgaagagaggttcaggatcgcagaactgaacaaagtactcacaaatgtcatgatgtcatacaagtccgaaaagtcgactttcaacggcacgtctttgaagccgcgaacgggaagaacggacaagagtcagatctgagagaggaaagaccacgagctatgagtgaaacatacagtgcaaccacggttggattcgatcattccaccactggaaagacagaggaattgtttacgtgttagcatgtatgctcaagagctaacaaagtagccgtgtatagagaggaaggaacgaaattttgcaaatgcatacctcgggaaagatggttgactttatgatgagcgcgttagagttcagtaaccgtttgaaacgagccgaccatgcattctggtcgaacgacaaaggaaaatagcatgagctttcaatcgtctgtgctgaagcagatcaaagttgaaactcatcagacatactccatcgatgtctaggaagaatacagtggcagatcgtcataaagaagaagtcagaaaacatgcagggtaagaagatagacgagcagatcctgcgtacctaaaatgtacttgtagtggttctcttgagagaatgtcttgacgtcccggaaggttatttcacgctcaatatcgtcacctgttgatatcatttacaaaagggaaagaaacggtaattagagcgtttctggaagttgatcaagcatcatcaacaaaatgacaagatgcaacagttctcacaagtaccatcctctcggtcacacctgttgggcgatcaagacagacgagtttggtgagcaatcggctttaattaacaaaaaaaatcaagaaaagagaacatatgggcaaagaaactacgacatactgtatagccttgtaagccaacccaatgtccagcattgccttgttaagttcgccctgattcacttccaagatgacctgattcagagttctgatatcatcttcgtgtgtctcttcgtcttgtctgcgcacgagcgaccgtcgttcgctatctgcagcttcctgtgcagcctctgccttccttccgtcatcatctgaaatcgtgctggatccgactgcctcatcatcattcacacccgttggcaggtcaaattcaggagtagtggtaggtagtgatccgtctgactgatcatctgcttgcgcttctggcggtggtgcaagggggtggggtacaaacttgttggcctcgatccatttaggggatggaatgatctcgaccgtcgtctcgagatcataagatcccatccgggctagacgtggtcgatgagaagatctccatggagtatgattcgaggacatgcctcctgtgtttcggcctcgctatgataggagatatcggtcatcaatcggttagaaatgcagaagagtattgacaaggttcagacatcctgatcaaggacgcgaaaggtcacatacccagaggactctgctgctctctttctcattccagtgcaacgcgccagcatcttctccccattgctcgatcggaatgaccaaaatgtcactgtgaagatttgttttgcctggaagcgaagaatagaataaaaccagacagaaaaaactcggtcagatatgattgaacacaagaaagacgtcaaaaaccggaccgtacttagactgaagatgggcatcagatgggaagccggcacggggtgtagaccgttcatagttccgtgcaatctgatcgaagagttgtgagtacagaggtccattgattgagtgtgatccgctatgaaactctttggtgcacccatctccggcggtggtggcgcttggagatcttccggcttaaaatgaggtcgacggaagccaggggaaagaataacgtttgggtcgtcaacatattgctccttgggtgatgtgtagttgtaggttgggtgaagagcttcgtcgaccgactgtctccatagcggggtgtgtggagggcaggcggatccccaatcagagaacgctcggtcggcttcgtcatccggatcaaagtctgggagcgtggcggagagtaggttcgatcaggcacgggaatcaaggaacctagaagcaaaaaggaacgatacgaacactctccttcctcgtctaaagattttagttcttgaagatgggaccagctgacgaattgagtgggagtgtcttctatcgagaagcaagcgtcaaagtctgggatatgatgcgcaatattcttgatgaagtcgagttggccctgggctcgcgcgtcggctcctgcgacggctcgatcgtagttgattgaatgaatcgtcaagactccgcctacattcttgagagagaatgttccgtgaactttttgaagatctttaactcttgagcgctttgtaacgcatgtcgagagaggagaagggaaggaaagaagatttttattattattaagacccaaagacaaggcggatgagagcatgaagagagagtgaacacgaaccagagtggagggtgaaaagccacggaagggtcctaaatcgaccatgatacggtcata

SEQ ID NO: 2425 - DNA, 10997 bp, Xanthophyllomyces dendrorhous
gagtgagtatggatatcacacgtggtcaaggtcattgcagacagttggcagtggaagcgaacgaaccatcaggaagcgggacattgttttgtctatagacacgatcaaaaagtgagaccgatggaaagatgaacagagaacgtttcaacgcacagaaaaacaagagatcagcttttgggctcggtgcagaattattcaaaagtcgtaaggtatatatccgatcgaaatcaacgagcggggacgaacacgacaaaatcccaccagcggtcgaagcctttgggaggatttctacctccgtgtctacgcttatattccttgacggcttgtgccagagtagtgctctgcctctcgttctttttgacccagtccttctttgcagatcggacgagctggtagatcggatgattcgttgcggataagttcttgttcacctcgagaaggccgttgacgatcaaatgttctttcttgccgagctgagatttgaggggaaggttgatggaggatgcgtaagagggatggatgtcgctctccggctgaatggcaggtgtaaaggcgtaatagaacacctcgagtggaccgagatgtatgatgggatagatgatggagagcgagataaagatcacgatacagaagaagatcggccgacgggccagcaccgacgtcggtttcacgaaacgggacgggaacgcgcccatattgaagaatcggacgaacagaaattcagaagaaggctgaaagtcgaggagttgaatgaacgaaggtggagtgtgacccaaagaagagggctgcttgtttgaaagtcggatagaagtggaaaagaaggtggaaagaagaagaggaaaaggctgagaatgacaagaaggcaaaaagaaagaaggtaaaacagaacgagtgtgagtttagataagttagaggatgtgttggttccttccgtttcttcctcttcttgttattgttgttaccgttgctattgccgttgctactctgggccaagagcccgaacgtgaagagaagacgagcaaagggaagagtggacggtctttatcgggatcaataataaggtatacgagagcgaacgaaaaatagagtaatttgctgacaggggcgatcggcttttcaaacaagagaggcccgacgagagaggggtggtgcgaagtggtggtcaagctttacagttccgcgtacttttcgaagggtgcgagcaggccaaggtgggccatgcctggtccctggtccctggtgcctaaatctattcgcagcctgcagcctaatccctactcaccatgcctcttcagtgaaaagtacgctgctcgacgccacagagcccgaatcgccatgtgtatgttgttcttagcccaaaggcctagatagtaccgaatcgtcaggcgcagcagggttttaacattcaccccctttctctcacagtcatcccacttcacctgttattcatccgaccggctgatcatcgatccaataaatcttgtttatttccagcaggagtagcgttagcgtgatcgttgttcggcgtgttcttcttgctcttgagataaatcacgattttgacagtaacggtagcagcttaatatctttctctctcacacagcacctacggcatcgaacgcacacatcatatgcctgcttcgttggtcacaacacatagaccacacccagcgctatcctgtgtttatgctcatcaaacagaccttcttggctttcttcagtcaaatctccgagagccagaccggctggtagagcaatcagatccagagagtttcattcatctactttcacaaacgatcgtggctctcgaacacgattacgttcaaccgacatgcaaatggacgcctctgatcgagggaagagacgtaagcagtagtaatgtcgacaggcgatccgtcagagatgtaggtctcttcctgccttgtcctctcggcctcactcgcatccttataggtatagataagctagagagagtctaatctattttcgactgggaaattcaacgcgtctagattatcgaccaagcaatcttgtccatcttcaacgcatctcctaacgggagaccttcaaaccaactcacaaacgggttcacctcatcagaattcgcgtttagcgtaagcaacattgacgcgtcttcatatctttaccaaccctttttatctttctttgtctaatctggttgatcgtccacgtcggcctgtcgttcacgttgacctgccatcagaaatcaaaatctcaacttccctggaatccaaatagacctggaatctacgcgaaacaagtcaacactaatcttcagctctttgaaactgtttcttggacactgcttttgaccaggttaggattctccactctggttgcacgaacattccggcatggcgactgaaacctttctgaccacttattacagaatcgggccaaaccttcttcaccatgttctctcaaagacctcgctcttcattcctctccctaatcagtgtctctcccaacttactggaacgcctattactgacctcaagcccaaacccccgttgatatcttccggccagggacgtgagtccagaaaacgaaaagctgaatcagacccatactggacgtccgatgaacttctttcaaaccgatccaaacgaagtaggaagggaaagatccgaacaagacagaacacagagaaagggcaagagccgtgtcgatctaccagaaaacacagccacatgaacactgacactgttcttgattcagctcccgtaatcaaagattgtttgttggacgacaatggcatgttggatctgaacatcgcgtcggcgcttcaaaatccatacccagaaccaattgataaaggttcaaaactattaaagaagatcaaaaaaaaaaagagtacttcgaaaaccaggtgagcttacttttcctcgatgtgctctcgagttttttgcttgcgtcaatatcaccatagtaaccctaactctaccagggtgtcaccggcggatatagcgcttcaacgatcttggattttctatggcagacccgccagacgtacaggccgaatcgaacctcagaagaggatcgttgttggatttccatctaatcgtgaggctgcacgtctttttgcacttgtcttcttgaaaacctcctaactaactcagatccatccttgtctctcaaacgacacgtctagacatccttgggtctctcccaatcgtcccatcagatagacccttcccttcagccgtccttcaactgatcctgatgcacatctttccatcccagtttgccctttcgtctcgttttttcgaaccatcagctcgtccaccgggcgcacccccaccagaacatgttcatctctctatagaaatcgagagaacaaaagccgccaaaggaggaaggttcaagacgccagaaggaaggatgaagggagaccagttaaagaaactgacagaatctcttgcgagacaagctggatccatggatttttggaagtggagatctatctgttgtcccagtaaagtttgtcgaacctacgttcatttcattctcatctccagcccacgacctcgttcacttatcaagccgaaatcatattgcgcaatacagatccggatacattcacccggtaatcagaacaagaaaacaacagacgatcgaaagctctaccgattacccctggttcgtctctgtatcttagctcaccttgggactctgatcatagatatcctaacgttcgacccctcaaaataggagtttgccccacaaactcctcaagtacactcggtgtcatcgtcggtgccaacggagcctttgtcctcgttgtccagaggttctgaaaggagtgttgagttgatgactcaacagatcccgatcccgttcagctcggtcgatcacgatcgagacggtatgtcttttggagttttagagctgatcaacggacaagaaaagaaagacatcgtgaggtttcaggagtttacgcagcctgtcggacaagtatgtatttgaatattgctttcaaacctatgttttggtcaatctcaatgaaaatgttttggttacatctctgcggtcaacaggtttgtagattcgctacaggggtcattaaacgggtgatccctatcgacttcttcggcggacctttcaatcaacacctagttcttcaaagtcagttcttcctttcgctccaccctcgttctatccagtccaccatcgttcttactaattcaaggctatgtcaaccttttctaccaaaggcgtcgacaaattcataagactcagacggtacgaaaccatgactctccacaccgttctccaaggattctccatcttggaatgcggctggctcgaaccaggcaattttgtccgaggaagcagagtctctgaaggagacgctaggaaaaggaaagagttggcagccgagtttttgctttggttgtttgaaggcttcttgattccgttactccgagtgtgtgcctttggtctttctctcagataaatccctctacgcgcgagatgacgcacccttgactgaaatatcattcctctcgtcactccaatttaattcacaaaaaagacttgtttttacatcaccgaatcaacggcatacaaaaaagaagtagtctactttcgtcaagacgactgggaagcgttgtgtcgacctgtctaccagagacttcgttcgacggcttatcaaatagtcgaaccggtgagttttcaaatgtctccaaagccttcattggcaaatacagtatcgagagagaattggtacgactcattcatcatctttatctccatgtttccatggtattcttcatatttcgtctgctctaggatggaatcacccggacgtacactggtgaatgccgaaaactaggtcattcgtacgtccgactgcttcctaaggaaaacggcgttcgaccaattataaatctccgtagaagaccaaagcctccgaagccagacctggagactggaaaaattccctgggattggcaatcaaagtcagttaacggggcattgaaggaaacattcaacatcttcgcccatcgcaaggtgagtgctttgtcgttcccgcttcagttcctcatcagacgggatcgctagtaaactcatctgttttgttctgttctcaggactctgggccaagtctgttcggagcgtctatccttggcgcagatgatatttatcccaaaatcgtggatttcaagcgaagggttacccaacatggtgccgaactgtcagcctggcccttcgttcagaccttattcatcctttttttttaaattaattctaagtcttctgttactttctttagacctcgattctatttcgtcaaagttgatgttagatcgtgttttgacacgattgatcaagatactctgatgtgtgtcttgaatgatatattcgaagacgtgagctttctttcttgtcaatactactccctcacccagagcaagatgctgatgatcaaaatccttgacgtgcgtcgcttgattttcaggacgaggactatgagattctccgatataacacaatcaagctctccggcggtcgaatcaaaaaacggtttatgcagcaagcttttccagagagtaagtgccttccttcctctgacttttctgactacctcccgaattacaagaattcactggttctgttcgggattatagtggatgcgcctaccttcaagcaattggccgatactcttgctttaaagagtcgtcgagagatcttcgtagataaggtatctctacacttttttccagctttatagggttgttttggttgagttaactatctgcgcgttctccagctaactcggctcgattgatgcttaggcttatggaacgacccatacgaaagatcaggccctgagtctgcttagagagcacatcactgataacttaattaaagtcagttgttgagtctttgagctgagggaacatatgcttaccgcggttcctttcgaaatagatcggcccccgatattttagacagactcaaggaattccccaaggatcgatcgtctccacccatctatgtagtttcttctacgcggatatggaaaggaagcatcttgggtttacttctgatcctgactgtgtacgtctaggggtcttttctgcttcaatctatcattcaaacatgaatcatgtgttctgacatgcctttgtctaccattcttcttatgtagatgttagtccgactagttgatgacttccttctcatcagtacagtacgtatcctttctaacgtgtcttttaatggaatttctatccttgaaagagatgttgacaagctgtttacatcctgacacgcgtagaacaaatcgaaggctatccagttcgttcgcgctatgcatgccggtcaccctcggtatggctgctttgtctcgaaagagaagacgttagtaaattttgaatgtcggattcaaggggatctggatggaccgaacgtgaccttatctaccggtgcgtttcattttgactatctacattgggttctcaagctaattcggctataacatgtcttggttgagaaacgtagattttccttggtgtggaaggttcatctcgacgacctctttggagatcaaaggagactacactagagaccggactcgtaagtcactttccccgatcaaagatgaccctcgatcacatctactatgcatctatttcccgatctaaatctttctgttgccgcccggaactaaagatattaaaaagagtttgacggtgaacgctcttcgaaatcccggcttgaccatccgagccaaagtacttcggtacgctctttcaaatttctatttatcaaccttgatcatcgctcaaattaaatagttcgcatgttcatctatttgtttttttctcctctgctgtaattacaacagaaacgtcgcgcagaaatcacctatcgtatttaacgattgcacgttcaatgcattggatactgtctacctaaacgtgtaccagaatctggtccattgtgcgatgaaaacgatgaactatgtcaaagagcttgggttcaatgagcagatccattcttcgtttttgttgagtatgtctctctaggtcctcatccgtcattgatcttgatcgaccgttaattcctcaatcattcctttttccctccaaaccctgcgttgtgcggaaataagaaatcgtcgaagaggctggcgagtttgcattcaacactataaataacgccgcaaggaagcctgttgcggtagctcatcaagctagggtagacattgacccgattgtcgtttcttggtccgtaaaatagtcaatctaaacctacgcattcagcatacatcaaccagatgctgactgtcgattggcgcttccaaatgaacttacaggttaggaaaacatgctttctggcaagttctttccagaaagccaacgttgttccgaagaatgttgtcgagcctagagcacgatgtcatcgggctgaagaccgtcacaggagagagattggtcgatgtttgcgggaaggtgacctctttaggatggagtgggatgaagatgatcaaattctgaatatcatatatgggttgtatcatgtggccagatgttctactcatccgaaaagaatgattgacttcaaggtggcatttgcacatcgactatatgttccctaatctttgaactcttttcgattgtcataaattggactcagttaatattcataggcatacgaaagaagcggctacgaagaccaatgaaagactgaatcagggaaaaaaacaacacgaaaagattagttccggtctctcaaatgtgaccaacaggattccaatgtttgaaaagaaaagttgaggagaagaagagaacgtctcaggacccagttttcaacccctagaggaatcaacccggccgcgtaagttatcgtctccgagcggctttgcgggcacgctcttggactgacgtgcaaatgtctcagtttcatctttgacgtcttcttcttctgactcaagcctgttcttttcttccaacctttagattcaaataaggaaggaactcacaaagtcagtttaagaagggtagaaagaatgatggttgccgagaaaaaaaacaaaatctggcaaggaaaaaatggctagaagtaccagacagaaacctttcggagtttaaaatatatcacgtgataaacgcgtcgaagaatgacagcgtaagcagcgtggcaagacgcgtgatcagacgcgctggatcatcatgatctcgccccaacaaccattcatcccactcgaatcacatacatctgggtctctctctttcaaaagttaaccgattgatatcgccttcgtatcgtcttgcccatcctatgagctctactggaggtattttcaaggacaccatttacttcatcaattcttcggtccctagtcaaataaaggccctggtgagttccacgagaggaacatttacccgtcacatcgagtctggaatctcgagtctgatctcgaatgtgttgcacatatgtttattgatatagaacgaacaagtcctcctcaagaaccaagctcgcgcttgtgatccactcgattctttgaaggccaagggctttccttcatggaggttcgatgtcgatcaggtcactctgattgtcactgacaccttggactttccagagcttcaggatgctcaaagtcgcaagaaggccatcgtcacggtgagttgagatcgaatcatttgttcgagatttcacttttctcatcatcatggtgctcttcatcctcgattgtatttgaagcccgagtttgtggtaagatgttacgagattggcttttggcaagagtcagtatccacttacctccacactgaggttaacgcacccgtcgagaacgcgcgttcttaaaccaatcattcatatcgtttatctagaccgaaatacttctctccagatcccaacaaattcttttcaggtgtgagcgtatgttgcgctccagaggtttgtaatcttgtcctcatgttttctttctttcgagtcggagagtcttaaagtacttacaaccgcctccgaatccttctacttaaagataccagagtctgatcgggaggtcatttcagcaggagttcaggcatggggtgggcagtttaagaagttcttgacaaaagaagtgactcatcttttctgcatgacgcctaaaggagtaagtagggaactcagtatatcgtgttctatcacagtgggatctgacgtatctcttttctatcggtttataggaatattacgacatcgcgcatgaacatggcgaaaagacgggtatcaagattgtccttcctcactggtatgttcttctgatacatttttcatcccatttgcgctcttagtctgatttcttctgttgccataaaactatcaggtttgatacttgtctaaccttaacagctcgcgtccccgaagacatctatctgtttcctcaacctccgatattgacacatccaactcgcgcgcaactcggacatccaaaactaggccagtctccaacaccgagccaagcagccttttttgattcgcttcacgagaggattcactctgcgtccgatcaagagcgacctttggatgggaaacgaattttcttttctgaggatctgcagctaggagggagggcaaaggccattgaaagcctaacaacaaaatcgggcggtgttcttgtgcatgaggcagagaagggggaatatgatgtctatattggaaaatacagagatggcgagagctactatagggttcgttgcttcctcagatgttgatagactacagcggttttcatcgtagaccatcacaaaccaaattgtttcctcttcgatttaggctgttcgtcaaggaaagattatcggcaacctggcatggttccactatctatgcgcagacaacgctttcgttagcccgaaacagagtctgcttcattaccccgtaccaagccagcatatacccgcgttcgaaaaattcgtaagtcatgtatctcgttctcgtaattccaactacgccaacgactcacatgcatttttggccctgtttgatacatatgcagtcaatcactcttacaaattattcaggcgatagcagagagtatctcaaaaggctggtagaacttatgggcggtcgatttacacctgagtttagtaagaaggacacacatgtcgttgcagcatcgtaagtttctttatccatgaagcgtcggccgctatccttaaatatctgctacgtattcctactgttgatcaatgtactctccttgcttctgttttgctgtccatttctgtgggatgacagaatgcatggggcgaagacacaacgggcaaagacatggtcgataccgatcatcaatcatcgctggctcgaagaatgtttcgtcagatggcgcgttctctcacctcatgccgagcaaatctacacggccttccctcctggagtgaactacatgaccttcattggaaatcgaggcttgacggatgctgatttggagccttggactagtaaagcctggctgggtatagacgaagcgaacggcaacaccgataccgaaaagaaagccattctgcccgaaaccacgaaaaccgtccctatatcgacgctaaagcccatatccgagtcgacggtcgcgtctgtaacacccacgagctcgactacaaatcagacacaatttgttcaaccagcatcaacgacagttggacgatctcgacttgccacttcgactcgagcatcttctgccatcaatgtgcctcttttgtctgaatcagatccaacagttccgccaattcctcaactgttgacagtgcctgtttcatctcacacgacacctagcactgatgacccttctcttgtgaataaatcttctcttgtacaacgcgcacccacgtcgtcatctcttgagccttctgactccacgcctccttcagcgaaaccaccattgcataacaaatctcacaaaccattccctgctctcgctcaggacagacaccaagccccacttctatcatcttcttcgacaacgacaaatgctccat

SEQ ID NO: 2426 - DNA, 18269 bp, Xanthophyllomyces dendrorhous
catccacgccctcatcttcatccacacgtcatgggggaaacctacaaggcatgtcccctgatgctattctcccaccctcatctaggcgaaaggcagcagataaggcaacgaagaggctacatgacgaaattatgccagatgtattggactatgagaaggccaaaaagaacaagacgttgttgactggaggtaggaagggaagacaagaggaaatcgaagcggcagaagagagggcaaagaaggctgaagagcagcggaaggtttatgaaggtagtgatgatgatgatgagggggaggaggagggggaggaggagatagcaagaaagagagtgaacgtaaaatcaaatcagaaaacaaaaagaagcgaggagcaggaagggaatacaccggtgtcaagatctgtcaagaaggcaaggttatctgatgagtaagtacttcacattgaatggcgactgcctactcaaaattttctttgcgctctcatctctatcatctcgaggatgacgactgatatatgttttgcgcttatacagaactgctctgccttcgagtacattacggacgggcagcaaagctcgatctgcgacccctgcttctgacgcggtcgcaaaaatcttgacaactcaggtaaacctaacgactgttcagaccagagtaagtagaatgtcacttttctcgttcaaactttctatgctctacgtttgatctcaacctatgcgcgatctcactcctctccaggctttagctaaaataggcgctgttgtagtgatcagccctgcagattgcacccgtaaaagccatcatctttatattctccaggttgggtttgattctatactgatctgagcggtttctatctcatatcagacttggttacaagaacaatcgcccgaaccgagaagttcttgtgcgcgttgtcggtttctccgtttattgtttcccaagcgtgggtaacatcctccatcaaggctggaaagcttcttggtgagatctggctcgctccttttctgttttacgtgtgttgagtttgatgagtagatgcaataactaatattcgaatcttattcacttactggtggctcgaccgtagatgaagaaccttttcttctgagtgatggagaagccgaagaaaaatacaactttagcttgaaacaatctctcgaacgagccaagtcgttagcttctcaaggtggactgttggctggaaaacttttctatgccaccaaaaatgttgagaccgactatcaggtcctcaagcggattattgagagtgcaggaggccaggtcggtcttgtcttgtctggaaactcgtcaaggttcagatcgttagatccttgcttgtctgacgcgtgtcgcttgatttctgccgttctgattatgaacaattttgatagctcacgaacaagattcctcatgccaagatattcatcgataaacctgacgactgctttctcatatcagcggaagcagaccgagacctctggcgtcctgtaagtacagatttgtctatttaattcggagctattcaggaaggaattgataatttttttcttcctcctccctacttcctttttaactggacgaacatgacgatagttaaagaataagggagtcactgcttactcaagagaattaatcttgactagcatcttggctcaaaaagtgcgttttatcctcatattgtctctctgcttgaagcgatgcatggcatggactgatcgataggtgttcgggaatctatagttggagttttcgaaacacgcattagaataaagactggaatgattgaaaatcgtgataagaatgcttaatctgcgtggatgtcgacagagctgtcctttctgatcgtgtgaaaatattcctttatctgaacaaggacatgtgtgcacatagatacgatttcagtttgaggaacagaagcaaacataagggtagttgaaagaaaggaggacgagagaaatgcaaggaaatgttgaggaagagacaatgctagtttcgaggttttataggtgtgggaaccggatcgagaatggaggcctcaaagtgtggaacagaaacgtggtgatgggaagaagagaaaagcaataatctcgttaggaagatagatggtggaatatgaaggataaagaagcagtggtacccggacgatctggcctcgagctcagaaccccaaacgagtgaaacaaaagcagagaaaatgaaaaggagaaagaaaatatgcatgtaacaggaacgatgaggggacgtgcaagagagtccaagacgtaggaattttggaagaagggagtattgatgatgttacgaaccaggagaaagaggaagtgtgaagaaagcgcaaagataccggaggagatgacaatatgaagaaaatcaacaagaacaggatagagtagggaaggaacaaagaagactcgagcctcgacgaaacaagtgaaacaaaaactctgaacggaactaagcactctcttcctccagaccatcatcacaaccaagatcaacgcccagactatcgtcgctcgtcgatttgaactcattcggaggttctaacggtggtagaagatcccacatgtcggtctgaatatgaattttgtttacattctccatcccgggttcattcttcccattgggaaagacaccaacatgttcaacccctgcgccatggtcatcggctgtgtatccacaagtgagaccgacgtcatcgttgtttcccatatcaccaccggcatgatcgtcttgaatcgcatccacctctacctcctccttttcaccgtcttcttcatcgacgtcaatagcgtcgtcctcttcgtcctcttgttcttgttcttgttcttcctcttcagactctccgtcgatagcagtacctcctccgagatcactccatcgttgtttggaaacgtaaccggcagagtcggccgcccaccaaggaggccgttctagtcggtcaaggactgtgtcgagttcttgaaagtgtcggtcatcaagagcaaaccggcgatgtttgcgtgagatgacatgctgaatgggttgaaaaaagaaacgataaatgatgaggtgaaagggatcagtattagttttggtttttccccagaaagacgatgacatcagattgagacaaggagagaggatgcagaagacatacaaccgagaaatcgtcaaacttgactctacagttctcacaatagcctggcttctttgtctcttctctgacaggtagtctgacccgttctttctccctacgctcaaagttaccgggtaaagaatgtctctttttgatcggcggtgggtccatcctaccatgggtcacgcttcttacaggctccacgatcgtgaccgtcggttctttcttgggttggacatttcggtaaacatgatcggccaaaactttagcatctaatcgttgatcttcctctctagctttggccgtgttaatcgcggtgacgttgtctgctccggtggcagtagtagtgcttgcatggctggcagattcactcggagcagtaggaactctaccgagaggatctaggacgggggcggccgaagataggtctgtgatcgcaccttcggtcggacataatccttttatagcttcggaagtggccgcaaacggacctctggacgcaccggccgccatcgggaccacacgcttgtttagctcagcgatcctcttctctcggcctctcatcgctagaagtccggtagtgccaccttgaccatggcctgtccctgattgctgagatgtaatagcagaggtgatgttgacagaatttccggaggccgccatatacgccgggttgttatcagcttctgctgctgctgctgctgccacttctgctgtggttgcccgagcgagattgtctccgacaaacgggtttcgattcgatcgtccgaggttgttgagcgagacagatcgtcggagatctccgttggctccctcacctctaagacgggctgccgtcgtcaggtgggaaggaatattggcaattggtctatcagttggtttagaattctgtggggggtgcgccggttcgggcttgattcggggttgagccggttgtggtggtggcactggcggacacttcaggaaatttccatggaggaccggccaatctgggacctctccgttccgaggcttctcatactctctagcaaggattgttcggtactcgcctgtcgcgtcctcgcacaagacatagtaggatccccgagagaagtaatgatgattcgcccgaggagctgtcaggtctcgttcacgcgttccatggatcttttcatcttcgaggaggtgggataaatttgagttgacgctagttttacggtgatggttcaagctaggcttcctggcaggggagtctgcgggtagtagtcggttaatgaccgaatggaactctagggcgcacacacagtccatcgtagaacatagaactcagagtcagtaagtaaaacggagatgacatggccaaagcttggatgtcggacactcactctcgacatcccatactttcatcttgaaagtcagcgcttttgctaggacatccgactggccggtctcatccaaaaatgggttggccagactgaataccgagttggcgtgagaggttaaacagaagaacgcgcagagttagcatatatccaagtttccaaccggaacgggttggaagacgactaacactttcgatcgggcgtttagacctcggtcggcggttcctatgttggagtttcgtctggcaagggtcgccggcgatggtggagcaagttgtttctcagatagtacagggattggtcggcaggtgatgacatgggtgacatgtctagagaagaacttgtcgatacgctatagtacgtgatatcaacgataagaggtcagcattattgatagttgacgagtagaacatgatagcatcgagacaaggattgagaaggatgagaacccgggaactgaaagagagtatactcactccgccaagctccatcaatttgggtccgtaaacgccgggctcaaccgagtcgaaatggaagacaaagctcggaaatgcctttgcatactttgtcacaaattcctcctcctccttctgaagcaaagccatctttgcctccttgtctttcttcagagtgagcccggctgttgatgctgatgctgtagataccgacaccgccgttgttgaaggaccggcagcggtggatgtatccgggcatctccctaatggtttgcgcggcgttgaggtcggaagggtctgataattaggcacagccgagccgttgacggttttcaactttttggtcactccggcagagatgatggagttgatgagggcgccgttatgggagatgttttctttttcacgatcaccccatctggaggcactggctgcggctcgtttgagaggagtgatcgaattaggtttcactttggcagccatccgtggaggagcggaggcgttaattgtcgatggacgggtcggcggatgttctggagtaggaggattggccgaatgagttcgggcaggtggaaggacaggtgaccgagggatagttatcatgacaacggacagaggagaagaaagatagagtatggaatgaaacttgaaagaagaagaagctagccaccaaacagatgggatgaagtggccaactttgcaatgcagggctgttgataaacaccaaagggcgggcgaaagagaattgaaagagcgtaacccgttagaaccgcctgtcctcgaacgatgatacacctagaaagcaggcgaactcgagaagatatatagagagaacgatactgaatgactactcacgacgatcagaagacacacacacacacacacgattgagagaaacaacaaggagagtgttggagacagagcaagtcgaacgacgaaaaagaacgggaaaatggttagaaagtgtgagcagttacaagtaaaggtctggccccactatatcactgacgcgcgtccggcgcgtctggcgcgtccgagtcgcgtaatctctcgcgtcgtcaggcagcccttcggactgagcatcaacccggaaaccgtgccagagcgaaatcgaaattaaaagcgagaagaatttctcacgcaaagaaagagtgcagaaaagttgtcctgaaactctctagtgaattaacgagttaaaatgatagggaaacgaaatggaccaaaatgacaagaaaaaaatgaggtcttacccgggatcgaactggggattccagaagacggaactatcatcgtagatgatcagtttcaaaatctggcgtgataaccacttcaccataaaaccttggataatgataggataaattaaatcactatgtacaaattcaaatctcatcccttaatcctaaccttaccccctacttaccttcagctcgtttcaattgcaactggcatggttgatccaagtttggcaacatcagaaccccatttcatgattttgcttatcattgacaggaaaaaagaaaagacccatgtataagacaagaaaccagatatgctctagtgaaactaaatctataagaataatgtacgcgatagaccagacaagacaacacaagagaagacaaaataaaacggcaagggtgagaaagaaggagacggtacagagtttacaagatttctagtccttcttgaacgtgtctctaaacttggcatcctccttgacccagattgagacgctcaccgcattacacgggaactctgatgtatagggaacagcaaaatgaaaaccataaaggaatgccattttcagtattgacagtcaccatcaagaaaactccaatcggggagactcaccagcccaaccatcttctccgatgacaacctcgccttgtttccagcccaacagatccgtccatttttgaccagctcgttctttaccaacctccattcgcttgaaaccatcgcctccgttggaaagcacaacggcacacccgtcaggatgttcctcatcccccattcgaacccacccaaggctgttcattcaaattcgaattgtgacggagatttggataagccaggaaacctgtgtttgtagctgtagttgtggactcatcgagaagaggaaactaaccagttctggtgatcggagtaatctcgaagctctccgtaggcgtaccacttccgggctcgaataaagtcctcgagctgagtgacaggctcttgtgggttatctcctccgcaaccgtctgataaaatcgattccgatttcaacaggaaaaacattggaaagtcaatcagcattgaacgaagagagaaaagatggcatgatgaaaatcgtctttctcaatctgcattggagtactcacaaagatctccatagaatacacatgggtatccgtctactctgagcaggatgagcgcatacgccaaaggtttgaactgagggtttacccaagactcaagactctgcccacgctgagtatcgtgattatcaacaagagtaacagcatcaattggtcgactctggacgatcgttccgtcccagatctgtcgcatactttatttttttagaaccaagatggaagatacgccaatattatcagttttccaggttatcaatcaagagacaagataccggatagatgagccagacttactcgaactcggctcctctctctccagcttccttgaagttgtagtgaagcgggcagtcgaacactgagaattgagttcccagggtatccacatagttttccagcgagccgagcgaactaggtttgtatgtaacaatacggtgtgaggactgattgtcttatatcaccctgtttgtaagtaagccagaaagcataatacatactcttcccaactagtcaagagcagtagcgtgaagaaaagaagcgacgcccacgtgagcaaccgtagaaactaaatcgacaactaaaaagaagacttacaactctcctacacaaaacaacttatcgttcccaatttcttttcggacgtgcttgacgaactgtccgatgaattctcgatcaatatgcttgattgcatcaaaacgaaagcccgcggcaccagactctttcaagatccaggttccccagttgttgagatcctttttgataacaaacacatacgacggaagaaatcagatatacaaccagattcatccgacatttgcaagcacgagaggggaacgaacctcaatgacctcaggatgatggtgatcgatatctgcgaacatcaagtaatcgtaattctgtaatcatgaagtcccattttcaatgatccataatgagtaacataaacttgttttggaaaggaagagcgagaaaacaaagagacaaacgccgttttctccagacacagacttggcccacgtctttccatctccatgaatcttgaagatagctaggaagtcataagatcatggtaaattagatacttcgcatgaagagaccagttcagagatagagaaaaagcttaattacacacattttttcttgcccttgtcatcccagtctacaccggtgaactgatattggttgaggaagggggaggtgattagagttcatcacacgacgaccctaggcaccacactttctgagttaactactgacgtggttgaaattccacttgagcttggaatatttatctcctcttccggggaagctaaacccagtccatccgtcgatgtcgtaagcatccgtgatctccttgtttcggtctgtgtttgtccgacgtttggaaaagagcaacagccgtttgagcaacggcaacacacatgggtttctcagtatacggaaagatgtaaatgatagtaaacacttgccattagaatccacctcggttgcttggaaggtctcggtcttatccgctccggccttgtgattcaacacagcgtcgatgtacgtaagcactccatttcccttcgcagctgatgcccaaacaaccagtcacagtcagtttcagattcgacacaatcgtcgctgtcgccagactcgttttcgatcggttcataaaactaattattgacacgtactttcaatggcagaaaccaactcttctttagttccccagtgagttcgctgaccacccttctggtcaaactctcccaggtcatatagatcgtaaactagttgcacagaagagaagaaaaaaaggattaattagttcgctctggtttcagcatacgatcttgagcgcgtcaagagataaggaaagaaaaagggccagttgatggctggaagaaggtggaatgagatatgatgatgatatgagatgacgaactgtcgtagcctgtggattccgtcgagcttgcacaagtcggaggaggcagccacgcagccgtgattcccatgtcacccaacctcttgctctctttcgaaaacttcttccagtgtacaccattaccctcggcatactgtttcaagaagataagaagagttagggttatcagtcatttgagcagactgtgagtccgaatagatctagatgcaagtacccattcaaaatactgaatcatgctgttgaacaggatgataagcagagttgatttatatacgttcagtcgtctgggtcttcacgttttatcacatgaacccatcgacatacgtaaagttggccgggacggatttgatctcggggtgagagagctcttcggtagcggtagcctgaataggagatggccgaattatgagctaatcagtcgattgaaaactccttctgaagagcattgaacagaccattgtgttaaaagtaacgagtggatagggagaacaaaactagatggagaggataggactagatgaagaggagtagataagactagatggaggatgaatgtagaaatgttgaaagaatcagaagcggtttgttcatcaaaacatcgaagagtagtcaccatccggttaagtctactgctgcgtattgagaaaaggtctaggcttttcttgaatgacgaccatgacatcatcatcacactccccgaaacatacacacactacacacattacacacatacacatacatcacaatcatacgctagatctcgatcaattcgccaggtaagtttcaaacgcatgggcaaaccgccgttcgattccaccatatcctaagtatcggccaagacgagaagtctcctcccaggaaaagagaacagcacatgtatgccatccgatcggttctatcaaggtcgagacttgaatccctgcgctctccagcgaccgagtaaattgtttgatctccgagtcaaacgcttcttgtagtccatgatgaatgaagaatgttgtccctgcagactgcagaggaacaagaagtctggagacgagctcggtcacgtcctttttcgatgttggatcttgatttggtgcaggcgagaacagaggatgacgctttcccaagctagcaaaggcagctggatccagcaggttggacaattggttaacagtaaaggattctcccgtttcaatggtcggaatgtttgtcaagtatcgctcagaagcggttaccatctgattgtaattaagaatatcaagccggatgttgttttcgagcgatggttgagacagagacaaatcgagccagggctacagaccgtgacagaggcaacggtaaactgttatgagtagacacattcttggttcagagggaaaaagaggagcccaaaagacataccgaaatgagagctacctttccaggaacaccaagattgagttcatctttcgatatcgtctcctgcagtatgctgaggtatgagatcaagctccacgcaagctatgtttgatcaacacattgaagaataaatactttaacaaccgtaacgttgaataggtcaaaccaaggaagatcaacaagaagtcataagacttactccacctccagcgctactgccaaccaagacgatattttcaggcttaaacataacatgatcgactaggtatatgtagcatgctagtgcgtccatgagagcccccggaaatgaaccggactcctctgttgcgagtctgtagtcgactgtcaatactctagtattcttaggcgcgcgacgaaggatagagtaagcgaatggacccaaaagaggagaccctgccctacacattcgtagaaccagaaagattgaaaaaggtgtttatatccagtgggtcagacaatcgaatgttaaaagcgtcttcgaccattctataatttataccatcagaggaaaggaatgcttacacataacctcctccgacgaaataaacgagcactttttcgtcctcacttgccattccgatctttcgactttcctttccaattccaaactctcctccttcccgccatagccacgaggtgacaacctcttttctcttcacatgtccatccccagcttctgttccgtccccgaacccattcttgagtactcccaaacacgcttggtccttagcaggaggaattacaagtttttcactttcgatataaacactctggtcgttgggtgatccgaaaaggtaaactgatagccgcagggccccacgagccatagcagagggaggtgcataggtatcaggtgctggatctaacatgccataagtagcagaaaaaatgagacatgatgtccacgcaatcacagtgtcgatcaaaacactggcttccatattggaatctccgatcggctcgatcaatcatttacgtgatcaaggacaaaaatgtcaagaaaacccaaactgactttcttcctttgaccgtcggcagaccggggcctccaaaaagattgatgatccctccgatgaatatcaatggagtagaaataagcagaatccactcaagtcttattaatcggatgacatatgcccacgggcctgtcataggaaggtactctcgtagacatgctggaggaatgaacggaggctgcagaatcgcgagaggaatcaagacaggtttgtggcccatatcttgttgaggaactaagatgatatttggataaagaggatggagagaggagaatagcagattgatatatgtcatcgagagatggtaaccaacgggcgatcggttcctttcccttatctgctcacacttccgatgttgaaaaggtattcacacatcatgatgaatactaacagtacatacatcatactcttccgactaatatatacgtatagagatgaaactctttcgatcaatctagtatccggcgatgatgtctttgtagccatctactttgtgacctcttgagttcaccattatcgtcatcatcaccctcgtccccacgtgatctgatctgctcttcgagcagatatcagacttcagagtgttggcaaatcctgaagtcgaagctctcagtattcccattgctgttccttttgaggaggctgaggtgtcaaattaacaaggattggctcgtcaacatacattttaacagaagagcaataattgctgatcaatacttacagcgattaattctcctaccatatcacctttgtaacctttgcagctgagaaagatagaagaagattaataacacactgttagtcgaaagaatcaagagaaagcggcttttgtctacatgaacgaacacccaatatgcctcgccagattctaatcgatcaagacaaacacgaattagttctaagtgccctgaaagcttgacattagagcaactacttgcttaccagacctcgaggcttccggtttgaacaaagtcacactgtcaaatgatctgtctagaaaggtccgtttgaactcttgaagccttggataggtgaaatgctttattctgtatggaattagacaggtacgacacatgttacagactcaaacataatggggagcacgaagagttgcttgaagtgcgcacactaaagttcctcctggccgacgaacgccatccgcaaatacctgacccggagaaaccacatacacaatcagatggaaggcttcaaaatgttgactcgtaagaggtagaacaaaaactcacatgtccgagtctcagcccagtcttacaaaactcccaaacagcctggcaaatatccattcctgcttcctcatccttgaatctgtttccactcaagtctcctgccatatcactcagcacaagatccgccttgttgtgtccatttccgttggtcgcattctcgtggagatattcccgaattcgaagttggatttttggatcgagaaaatcaccctgtatgaaatggacatttggaagaggagagaacgggaggaggtcgacagctacgatagttttcaaattggacttcttggactgcaaagttacttgacaccactgaataaggggttgaaaggtagcaagtaattagaagacgggcaatggtcttggatcagttatcgcaagacgaatccgtcgttctgaacaaacgttgaaactcactcctccaggggatgcgcctgtatatttagatatttgaagcagccgggaacgaacgatcatttcagtgagaccacaatcataacgtattgtgcaagttgagtcacacttaccaagatcaacaatggtcctcacagagtctttaaacaagttgtactttttgcccatttcctgaagcttgaaagccgaccgggctcggaacgctcccttattcaagacgaagtgatcgtttttctgcctacatgtaatatcagatccatggtgagttgaccctgtacagagcggttgatgaagccgtatcagagaagctcacttggcaagccagagtgtagtcgacttgctggaaaccaagcggcaagccggctggatgacgttcgacaaacggtcgacagacacttcccgagcaagagtacgggggggaaacgataacattctattatgaattcttgatacgatacggaatatatctacaacggaaccaagcgaaatgagtcaacaaatgaggttcttcggtgttaggttcaaggtcggtgtcgaacgacaacaagagggtaaagaggagagcctgggaaacgcctgttgacccgatccgcatacgactctcaaccactcggcagtacacatccatcatcccttcgctctctcaatccaacaattagagggaggacgagaggatttgaccaaacatgtccacaagcactatcttaggcatgcttcctcaattcccgttccacctctcccctccatcatcttggaagatatcccggcaactttatattgggctcttcctgggcttcactatctctctctcttctactacacttgccctcttttttcagcaaagaagaactaaaaaagctacctcaaaagtcccgccacgacctatagagcttagagcggatgagattgtagatggggttgctgggctgattgggaatacgcctttggtgcggatcgccagtttgagcgacgcgttaggagtagatatcctgggaaaggctgaggtatgtcaagccctcgatttttatgcagagattggtgcactcgtcatgattcttatttttcttatgatctatagtacctgaatcctggaggttctccaaaggaccgggttgccttacaaaataggtagaacaagcttctcttcattgactctgatcctcacatactgacagtcattttgggattctgaacctctcgcagttatcgaggatgctgaagctcaaggacttctacaccctcataccaactctcggatctttgaaggaacagtcggatcgacgggtatttcaatcgcaacgatcgcacgggcaaagtttgtgttgtttctgtcccagtcttttcctattgctcaatcagtctgactaacatctatccaatcctacagaggatacgagagtcagatcatcatgccggatgatgtggcaatcgagaaagtattgtgagtctatcagatattcttttttttctccattcaagagcaatctgatactgagtccaaaccagagttttgaaagcactcggcgctatcgttgagcgcgtccgaccaggttggttggtcatgaaatcgtaggaaagttgcgttcatcgtgctcaacatgatctttctttccatatattactttatcaaccatatctttccagcgtcgatcgtggatcagactcaattcgttaatctggccagaaaacgtgcacttgaatttgggaagacggtgatcacttccctacctggggttcgggacgatcttcttgccaatcgacgagaacagggagatgaccagggtctaggattaggaaatcaagacagtgggaaagtagacctggtcgtcagcgatcaaagtgaaagcattgatggcggttggaagaagggcgttggtcgtagaggattgtgagtccggtcttctatttatcatgaacctcctatctgttggtcttactgaatataccataatggttttgtataatctaactttatctcgtgtgaattagcttcgctgatcaattcgagaacccttcgaatcatcatgctcactatactactactggacctgagatttggcgtcagacgaatgccagtatcgatgtctttgtctctggcgcgggaactggaggaactctatccggctgcgggcgattcttgaaggaagtctccggaacgatcacaaagagaatgtacgccgacgaaggaaagcttgaagaagaagaagaagaagaagaagagaaagggagcattgtggataagctcaaacatgttggatcagaaccgagcaggaaacaagttaaggttgttttggctgatcctgttggttctggtttgttcaataaggttaggatgcgtctcatcgtcatctactgaaggggccttgttctgaactgactaggctcattcgaaaaaacgtctgatgatttcgaataggtcaaatacggagtgatgtatgattcgaaggaaagtgagggaacgaagaggaggcatcaggtggacacagttgtcgaaggaatcggaatcaatcgagtgcgtatcagggaaacctgagtcgctcctctctatatctttctttctccagacagttcactaatcaccataaccggtctttctcagatcactcacaattttgagcttggccaggatcttgttgacgaagcctacaggttggttcttccccacacgatatcttttctggctttatttcctttttgaattagactggatccttactcgtatatcttatataacccctcctctaccaacaaaacattcgtactccagagtgacggacgcagaggccgtcgctatgtcgaggcaccttgtcctgcaggatggactcttccttggctcctcctccgcctgtaacctagttgcttgtgtaagagccgtcagagatggactggtaccacccggggggcggatcgttactatcctgtgcgattccggaaacagacactagttcgtcatctcccgtcctgattcttccgtttattcttcatgcacctccgagattgttttcgcagaccgcaaaagcctgatcaacaacccactttccccgttttgtttatgccttccggcatattcttttgcttttttagctccaaggtgagtctagtgtcggcctttcatgtttttgtctcttgcacatgtgactgaaccgctttctctcgcataacagttctggtcagatgaatatctaacagcacacgagattccaatttcttccgacatttcttccatcctctatggatgattgcctgttcacgctttatgtccttcttgctcgctgatatccatgattatcacttggcttcaaagacgaataaggtttgggtagtttgtgtgagtgagggaaaaatgaccatcgaagaacagaagtaagaaggtcttatatgggtggttgagtttacaagacatgagggtggtcctgataggtagcaagattgatccatatgtatagggttttctagactagtggaatgtaagggataagaaacttggtaagggtattgtaagggaaaaataggatcgaatgattttgcaactaacaacgaaatacatgaagagaacgtgcagattcacgaagcaagaagacaaggaagcaaagaagaacataacaagcttacaaggtcaaggagaaagagaaagagagaaaaccgaatagaatataattttagatccatgatcagaacctcaaaaatcccttcttctttttcttgtctttttcctcgtcctttgtcttttccttcttgtccttcttatccttctttccaagatccttgttgtagttcgctccggattgagagtcctccgtgtaggatccctgtggaattccactcgatccggacaagcgagagctgccaagactacctggcccaccactgtgcctagacccagataccgaagctgctgccactggcggcggcgggggtggtagaggaggaggaacgaatgtcgtccagtgccgtctgtcaagcgtcaactggtatcgttgtcctaaggtgtgtggtggttgtaccgaagcgagggggaaggaaggatgaagtggatgtatattcggggggtttgcaccgacaccagagcggccaactgccttcaggtctcggatgaacgcttcaggagtgatgatgtgtgttgatcctgtcaattcataggagaaacacacaaccatgaagatgttcagttcaattctcagcaaagttggacacgttcaagaagatacatgaaatcgatggatacgaaccgatgatgacctctctccctaaggcagctccaacttgatacgcactcctcatctcagagtaggtgattcctccagcgacgaacaggatcagccgctgctttaccgtatcctttgtatttgatgctccagatgctcctgctcgatgccagttagggcgctgagaacgaagtgatccagaactgggcgcgatcgatggtaccgaagtcgaccgggccactacttcgacaggcgcatcttttacgtaaggaaactctctggcatctaacttattggcgatatggtcctgttgaatcgattgttgttgaaattgatagatacggttatagttggtgaacttgaaagaacaatattgatacacaagtgcagcctcaagatgaaaaccaatacagacctctaacatgattttcacagccggctggtatcttgacagttcatattcatcctcggcgttcgtcggtctctgtttgagtctttttttgctatctcgatcatttgggttctattcggaacagagaagccgagaaaatattgtatgccgtgtcatatatgatttttttctggcatcagtcgcgtgtcatcaccagagaagttacggaaggtgtgtccttaccttgacaacacgccgtcctaagttgaccagattgttgatagcatcctgttcggtcaaagacagcttggcatgctgaaacaatctccgtcgatcttcatccgggactccatctttgaatagtatatata

SEQ ID NO: 2427 - DNA, 42905 bp, Xanthophyllomyces dendrorhous
  misc_feature (5561)..(5570): n is a, c, g, or t
gtatatatagagcgatgattcgaactttatccaatcgtctgttcggagataattcgttcaattgtggaaatgacggacgacggaaaaagtcagacagatacgatgcaacgcgttcgtgacaatgaagaacaacctgattcatccacccatgtggatcattgagaagtctactcacgaaaccacgctttcatgctgccccaagagcggtaccatatcatccacaagagacttcggcattttcccttctggcgtagtcccagtcgcacagttctgtcctcccacaagatattcgcacaacaaagagagtcagttcagatttgatcaccgcttgaagagtaaacattacgcttcgatctaattgtctcatgaagagctaaagggcgaagaacacaaacctgttcaaccattccagtatccgaaagtcgttttttctcaaatagatccatcgaggtctgggccatactcaggtgaagcgaatactgcctccccaaaaaaagaaaaccttagtacaagtcagcgtctttctcgcgattttgagggaagcaagcaagacaaaccttctctctcaagtcggtatactgtggtaagctagccaacatgtccttcatatcattcaggctgacagccccctgcttagcactaaatccaccatgctctctaacaaacgcgttaaagtctcgcatgagtttatcaatcgcgtctttcatgtgaagatgtcggacatcgacccaaacagtatcttgctcgctaagcacggcgtctcgagtttctgaatggccgatagaggtctgaaaatcatatctaagaagaaccagaccaacgcgcgagaatatgagatatttttgaggacattatccgattgtatagattgcacagtaaagaaggaacatatgacggaccgatggattttaccatcttcaacctcgagtaggtcgttcaccatagcctggtaggtgaactcatgtaggaaaggcgcgacaggatctatcgatcgatcagcgatgaacagacagccctgaggtcggggcggctcagttttcttctactcaatacaaggaagccatgaggttagcgactgagcttaacattgacggtcctaccattgtattgaaagagctggaaggataacaagaaagagaacatacagggaatccttcgttttccgctttgaacccctgtagttccttctcgaccatttctgccaacttctttgccacacctccccccccatctcctaatccacctgatccagtacctcccctcgagatggacgaccttgatgctagtgccgatttccaacgctctccatttccggacgcattcgccctaagagatgaagacgccatcgccgttgtcaaattagacatgcttccttgaacgctcaacggtccgacagcaggcgaaggagcatatcgaatttgggggtcttcttccagaagagagagaacattgatgatctaattcgatgggatatatgtcagaaaaacgtgtctacgctcgcccacgttactaaggtctgaagaagaaagattgggaaccaacagttcggctcatgatcgacaagtcatcttcaaacgcgtccatggacatctcgttgttgattgctgaacccgggtttccataaagactatagaacgaccagggtgtctgagtggagaagacctgtgcttccacagctttaggcgtcacagtcataaaggggaaagccatgaagaatgagaatggatgggttagaacagaagagacctttgttggagccttgttagacaaggtaaaaaggaagaacagacgaacgccagagattcagatagacctcttcaaccgacttgagtacatctggaggaacgcctgctgccagcatctggaccagctcatccggtgctacatcaataaagatgacatgtgcctctttataacctcgtctgttcttggcaaaatcagctacgacgcgctgagcgttctgggtggttggggtgagcaagtagatcgcaggtagtgatgcttcacatggacggggtgcttggagattgtcaatgactggtttcaatacaatcgatcaagagaaggaacgtatcatcagccacgactgacaagcagattgatagtgttcctcaaagcattgtcatcttttctcagatctcctgatcgcctgcatcttcagcgcactttcgagggcatctctgattgatgctttccggtctatctcctctctggatgaacacagtgagtatcaaaatgatggtctaatgtgacataccggtaacattcaaagcgaggatgtcattagggctgacgacctcgtccaatagcttcttcgtgtgatcatccacgatcaaggtcttccatgcattaggacaaaccgacgcgatcttgttcaacacacctgtatgtagtggagtcagagagaagttagaaacacagaaaagtcgccagtcaaagtagtgtataaagctgtcagttccaagaactcctaggatggaaaggcccatactgaagatggaggaggaagaggaggaaaaagagacttgcgatgctttatgagagagatcaggttcagaggagccatgctaaacggacagtctgtttatagatcccgtaactaagagtagaaggttcttccggatatgaaaaacttagagatgggagtatacaagatggatgggtgcgaagagtgaaggtttagatgtcggctgggtgtatctgcattgatggcaaggtgaggaagtgacagtaattcgacttcgtggcgttagtcaccatatctgactggctggcttgacccctgtatcttaagcctgacgagatagttcgaaacaacatgtttacagacatcatgataactctaacaagcgagagagaaaagaagaaagaggaggtgacatgaagcacaagtggttgaaaagacgagagaaagtgcaatgagaaaggaacccagtgtaaagatagtaagatagaagaggatgggaagatgagagtgaacacagaggtaacaaaacatctactggactggagacagagaagacaacaatacaaggcgaagcgtcagtgaaatgatcgtgagctgattgagcatgatcagcagaagaaaaatactcacgaagagggtctcggaagtgtttttgcgctgttgaaagacagggcaagaaacggaagaaacaaaacaaaacatgaagacgtatgtgttatcagtaccacagaacatcagtaagtgcatcataaggtccagagaggaaagtatggacgaacagttgtgactaccaaaaacaaacgaacaccgttacacgtcagaatgtttcaatctacagctatatacatagtgaaaaaaggaatacagatacgtacatgaagccggtcctcatcttgaagttctccctggcctgctgtcctcggaacggatttttcatgacgttctttgcctctcccttatttctcgctttgacgacctgaccaccagctccatagtctccgaaaccacctctggcagggattaatgactgatcggtagcctccttgatcgtacgcctctcaactggaacaagatctctcgtttctggatgcaacgaagcatacgacggtcgctggttgtaatacctttgaagagaccgatggccgattcgacgacctgtaggaaggaccaactcaaaggtttccggatcgaatgatacacctccagcaccggctcggtaagcagcctctgcttcatcatctgtcgcgtccgtgtagtccgatccattctcatcagatgagtcactgtcatcggcttcctcgtcttcaacaacctcgacatctgagccatcttcctcgtcgtcagcagtctcctcggtctccatgtcttcccactcttcattgacgggcttgagagccttaggcactctacgtcgtcgtcgtcgaggcggaagagctccatacgaggacgagaaatcgtagtaatccgatagctccattcgatcgatttcgtttccataagcaagctatagcagacaaatcatcacatcatggccgttagctcgaatagtcaatggctcttgagactagctatcctatattgcagacgtaccttgcagtggctcttatcaatcatgtgtttcctgacagcctctagactcttgtactccttaccctttccgttgcagtacaaacagacgtttccgattgccaccttctccgttaggtagagcatgagaccctcctggtcaaccaagaactcttgatcgggaatgaagaatccatgagcaatgttcatgtgctcgatagccgcctcctgggtcgcatttggatgagagcaaaacaagcaggatgttgggagaagtctcaatcgagcataggcaatcttgttgtcgatcgtgtcgttaatctcttcctcagtggcgtcaacgtcggcagagagcgtcggaggagcacgaggagcggttgacgagtttgagggaccagagtaggaagggacagtgtcgagctcctcagctgtaggagttcgctcaggcaggttggactcgttggatggatcagcttcggtcgaggcttgcgaggcaagcacagaagcctggaacaatcgggtggcctctttcacttcggcatctctatgcttcttggattcgacgtgcgtgcggtaagctccctgtgaagcgaacgacttcctgtgagtacccacataattgtgagtcgttaaacaaaggtcaattcacgattcgaataatggtaattgtctcaaaattgatcagcaaagacgaacatgcagagtcggcaggtctctcccttcttggtggcggtaacagcgttctcgtttcgtcgctcaatgacctttcggttgaacaaggcggcggaaacgggaggcaagtttgcgacgcgtctctgtagtttgtgagatcgtgcagaaagtcgatgaaacgtaacatggggtgtacaatgagaagtcgaagatcaaacaggctatcagttggtgtatgcttaatcatccataaaacggagacgaacggaccttcatattgtacctatgccaatcactcctcatgtgatctctctgctcatccggagacaagaaagcaaccgagcatgacaagcatctgtatacaaaaagcacgaaatgaatcaatatcggataaaaatcatcataaggaagaaacacacgaacgtaaagagctgatcatggtcgacattggacatatccgcctgagcggtgatattgacaagagaagccgcggcggtggcattcaaattaagccctgcggctgctggattgggaacagccatatcgagtttgtatatgtatgtaggtatgtctgtgttggtgagagcaagcacgatagctggctgagataggtgtggtgtgtggtgtgaatgagtgggggtctgacaacctctctcaaattatcagtgccatccgagttgccaacacagcttgaggatcacgtgatttattttcaaccctcaatccccatatcttactcatccagtctaagtgacaaccaaggccgcttccttctgcccatctgtctcatgtcgcgcgcaaactggaagacaaaaccgggttgatcaatgaagaagaagaagaagaagaagaaagnnnnnnnnnnagttacatcacgagacacgatgctgatgctgactatgtcggtgctgatgactttagtgtgggcggtgacgataggaacgatgttacaatggatttgagaacaatctcccttctctttctaccaaccactcactaccctttcgtacataacatgtgttcaacaacttcgcactttgaagcagccacccatcgaataccgggaaatcttcatgtgttaataatcaccacgggtagtgtcgcttccgtcaagcttcctcttatcgtccaggccttactcaaagtagatactcgagatcctgtcttgcaatcctttacacgtacgcgagcgacatctgacttggatctttcgttttgccgtctcatgattatgtccctgcgactcatctatttgtaacacgaaagaacgagaatatatccgtacaggtgatcgccacagaggcaagcttgacgttctttgagcctcaggaggcagaagctgtaggaaaaggagtcaaggtttggagagatagagatgaatgggctgtacgtctagttcggcttttactatcgcttcacgaattgcattgtttactctctgatacatggatggatcgttgagcggttttagacctggaacaagataggcgatcctattcttcacatcgagttgaggaggtgggccgacttggtccttgttgctccttgttcagcaaatagtctggctaaaatagctggaggtctgtgtgataacctcgctgtgcgtgtccctctctgtctaccctctcaatttaacgtatattctcattccatcttcttttcgcaatgatagacttcggttcttcgtgctttagaaccctcgactccaacgtacctattcccagcaatgaatactcacatgtatttccatccgctgacggctaaacatctcagagtagtagagcaagagatagggtataacgtccgtgggccggtgggaaagacattggcctgtggagatattgggctgggagccatgctagaatggaagtgagttcatggatatactccctttcttcaaaatacgttctccgaccaagagcatcgttttgatttgttgcgctactttccgcctttcatctctaacagagacatcgtccacttagtagaggaacatcaccttaagactcattcaacatcaactaccactccttcagagactactagatctcagactggtccttcttctcaactcccatctcttcaggatcggctctgttctccccttgatacattgatatcctactcgcgttccggacagaaccagcaaccttctccgagacgagatcctgaagtattcgacctagaagctcgacaccctctggttctgtctgcccaagcgatatctgagttgcagtcccaactcgttcttccacctagtctggttcactctccatggcgcgacaaagatggtcttcgaatattctggttttgtcccgagcgtctaggggctaggcagctgaaagcactggcaagcgcgcttgaacagtcgactgggcaggatgcgcagggagctatcagtgaaggtaaagacgaagaagtcgagaagagcaagacctggttaagggaaacatatggagagaatgattcatgatttggctacatacgccatgcgtaccacaattgagaccatagttgctggtaaagaagagataccataccttgaagcctgagaagaaggacgatgacgatctcgtttactgcgcttagtagcagaaaatccgctcattctattctttcccgctttatgcgaataccctcaatcgtccatctggatactatcaccgtatcatctctcgttgttgtcgccatcgaaccctctttagtctctggcttttcttaggacaatggattcttcacctcagatgggaagttcgggtactaaaccgtcaagggctcctccggctcctccttcttctgatctcgataggttgaacttagatgacacaggcaagctcttccgtttctgttatgtaaagcgtggcatctgattttcttggtcgatcgatacaatacgggcccaatcggtatgggagaatggcctgagaagagtccttttggtagaagagaggaggaagaatgtgtagaaggtggctgaagatgagttcaagttgatctccggtcatcctattcttagattggaagaaacaccatcagtataacaagagcagcagcagcagcagcagcagcagcagcagagtggctctcagtttttgtctcgcccatcctcctgctcaccatcccgacttgatgtgattcgtgtgatattgggatttgtcttttcttaggatcgcactgacgtccatcgattctcctttgatcaaccccattcttatggtaacagaatcaaaatccgttagaaaacgaacacgaccacccatccctacgtcctccattttgcatccttcaatctcgtcgctcccgaaccacaatgcttcgaacgcacatgttttgactcctctccgagcgcattatctgaaaaagttccttgtcaaccatcagtttatggatgaactcgctttgatctcggacccagcgttggggatggatggtatcgccgcgttgggggcgccattcaaggcacctcttgagcaagttccgggcagggaggaaggaattatgagaaccaagactttgccggacctaccattcttgaagtttatgttcagacagtttgttctgacatttccgtaagtcgtcctttgtctatattctctatctattgagaatctcccgcctgatctcaccatctactctgggtatatatccggctcacatcattcatgcccggacagattcttgacagcggcacctgctagtttctggccacacaaagttcaaccaaccctctcccagttccttgcgctctccctggcaccttcctcaattcctttcttggatgatgatccgtccattgcgacagacgctgccaaacgaagacagatctttgatcgacttgagaaacatatgaccgtcctcctcgggagcgccattaaggtagaaggcggagaggaagtcgtgagaatcggacaggatgatttgcatgtgctcgaggaggaagcaaagagaagagttcagcttacaggtggagtagaaaataaggagagtccagaatttgagattaatgtcattggcgttcgaggtatagccgagaagggaagagtccgaagcaagactcatgaggtaagtcttctccagagtctaatcatttcctcccttagagagtcgtttttgaaaagttaaatacgcgtttttgcattcacaggaattccttataagaacccggcgaacgaatcgaccagacgtatatgtttggagaagatatggagacttccgccggttgtctgatgaggtttgtttcttgcctcttcgtcctatcaagtcgtatccaacctttttcttacatcatttcatatatcctgacatagctccgactccaccacccaaaagaggagatcaggtctccgcccgcaaaagatagaaccacggttaccacaacctctgctcaagcgcctggcaacgtaccatccgcccctcaatccaccagagcgtacctcgcatcttggattcctggtgcatcctcctcctccacttcaagccctcgaagctcgatcgaccacaattcatcttctgtacctggctctcctttcgatccaacactaagccggacatccactgctgattcgggtttacctcccaaccttatctcgtccaatttgacaagggagaagaacaggctgacccttcggtcgttccttcgttcgcttctcgctaaagcaaccttggcaaactcacctgttcttcgatcgttcttgctctcgcagccagtcgagctctcggcaggggaacaaatcgacgctcgacgcagagaggatgctgatcggattcgagaggaaggaaagaaacagttcaaacgggaagctgagagacgggttgaagaactcaggagttccatcaaggagctgagagaagaagttattcagaccggtggaatcagaggtgtgtttgagatcatcaagcagactgagaagaaagaagaccttcctgaggacttccaaaaggttcttgaatacggacgtatctcgtaagcctataacctgagtctgttttgtgttgtcctcataaaactgatagttctttgacactgttgattcgaagagtggcggctgcaatcttccaaacatttgttgcatcggatgatgcatctaacacgctgtcccaactcaagcgtctgcatggtctcatgccttacttcgttctcaaaggaattctcaagatcagtaatcctatggcgatgatccgaggtatgtagtgttctctcaagtcatacaacggcagaatgaatcttcagctcaatatccttgcattcaggtgtcctcgatctgtttttggctagaccgttcggagggcaaagtttgattcagcggtaagagggtcttcttgagtgatcttctcaatgttcctatcgctgaacttaaggccgagttctcttttaactgttttcagaatgttctccactgccatcaacgaggacattcgggatctaaccgaacagatcgatgtcctgagtgaaaaaattggggaccctgttttctgtgaaaaagtcaagcagtttgtcgctgctcccccggagattcaaaagctttacaaaatggatgccggttcgttctttctgtatccgctctcaagttgcgcttgtgacaattgatccctttctcttatcgttgcgtcaacagacgcggaaggaattgatatcttggcagtcatccttcggtccccagacgcacctgcattgtctcgaccacagatgatgagagtaatccaagctcatagagcgtactcccaataccgatccgaacgagtggaatcggccgattctgacgaagacgacggaccagaacaggaagagggttggctgtttgtggatctcaattacgttatgaaactatattctagggtcagggagagagagaaaatgattgctttgatctttgaggtgagtttgatgctctcattctctttgaacattctttctctaaacatcttgttggatcgaattgttcgactgacatcgtgcttaacatactctctgacagggggcaactgcagagttgatgaaggatatcatcactatcttctatgcacctctggctcaggtttataaagccgctgggattgccgattcattaggtgatcttcagaacttcatcaacgatctaatcaagacacttgaccaagttgaagatcgtacgtttctttgattcacaagtgaaacaatcttctatgagcatctttcgtacctaacctctctcttttgaatttacctgatcaatagtgagtcaagagaattcaagtcaaaccgttcagatctttatcgatcttgttgagagacacgaacaatcgttctatacgtttgttcacaaagttcattccaaggggtccaatctgttctcgtcattcatgtcctggatagagattttcctcgatttcgtccgagacggtgtcccttcgaaagctgccgggggacctggaaagattgatctcgaagtcctactccctcattccggacctgaacgtcaagctcttctgaaagaagttgacgacatcgccgtgtatcactacaaactgaaggtggctcatgaatcaaaagttcgtcgaaagttccttcgagccggtggaaaatccggtggatcgggtgaggcagccgacggggaggaggaacaagaactgatcgactcattggtggatgggctgagcattggcaacaccatgcgaagtgatgttcaagagatcgaggaggaagacagtagcgacgatgatgttatctatgagaacgatgaggagagcgatgaagatgcggatggagcaggaaacgatggattcagtactcctccagaggagagtacgatgcctctccaatcaccggccgttctcctctgggacgagaagagtcctccgattttggaagctcccgcttcaagatcactccgtcatcctatccgacacaagaaatcaccttcaaactctagtaccgccatccccaccaactccaacggatcctctacaacaacctctggcaacggagcggtgtcaggtctgcaaaggaggatgccaccgcctggaacaccggcggatggattgtacggcaagaaagagacggcaaggcacgcgaaaaagaaaggaaaagttacaatcactcctccatccgttcgattgctgcctgatttactacccctttttattgaaatggtaggtctttcttggtttcctttcctgacaatcaacaactagctatatactggagacctgttctaaccatacgcacgtttataatcatataggtccgaccccttctcattgaatccaagctcgaggatccgcaaacagctaaatgatcgaagctttctaccatctcccctgctacctttctgtatcgtgctcgcccctgatttcatcgatttgttctattctgtcttgtctggttgaacttcagatttatccacggatttttcttgtatattattattcggtcttcatattcatcaattgtcgcttcaccaattcagatcacttgcttgttggctgttccgtctcgttctcgtttatgcctattcatacatgaattcttgaacacacaaggttgctcgatatatattacggctctcagtctacagtaacgatgatcgaatgaggtcagatgttgagacaaatcgtggtctggaaagacatcgaatcgaagatgcgtacgagtggatgaatgttggtatatattgtacaaaaacgatcttttatctcatccgaactcctcgttctgtcaaattgaaccaatccactctaacaaaacgcaacccaactcgccccttgagctgaaaatagactgatttcactctctctgcgattgttcttttcggtatgccttgttttgggcatctcgtttcttgaacaatttatttctattggcgtccttggagattgatttactatgattggaatgtgacacggacgtgaaaataagatgagatgcgttttcaacaagacagacaagaatagcgtgtgaggaagaagagaaactcacttgacactcttgttttgctctacataactcatatgttgacctccactcaagccgaccatgctacccacactcctctttgccgccggtgcacccgtgtcaaacgtcggatctctacctcgcttaccagccgtcttgtcatagttcgactgatcagagatgacctctgctttggattcgttttgacgaaggacagattcgagaagttcaatctgttctttttgagtaggaaacacaagactgggaagactctcgagtccttctaacttcgtgatgactttgaaggcatatccttggtcgaccaagaacttttgacgttttgtagagtaaaacatctcggtggtatcctgagagactaatgagtaaaaaaatgcgttaaagccttcatcgtttcgtcgcttggctcgaaggatacgaccttgtatcgtgagaatggaggtcgaatcaaagaaatatgacgtatgagtaacaatcgatagaagctgtcaagggcagaacacaaacctaatcgttgcgcctcctgccttctagatccgaaatgactcgagatctgaatcaaacaggtagcttcgggcagatcgatcgatgtgtctccaacctaacaagataaagaaagtataagtcgatctccgatgtagtacaaggaagagatggagaagggaaagtgactgactttcgataagaaaattgtgctaacagccgggtcattctgaaatcgatctagaatacgaattcgctcgacctgtgaagtcgctccatgaatgaaaggctttcccaacttgatagcgtatgtctgtttcaccgtagattcaaagaagtgtcaaaaggagtcagatagatcttgataacaatatccaaaatcagactgttgtacacccgatcaacgctcacctccaaagcatatacgttgtccgaaaatacaatgattttgtctcctcgagtctcgtggaaatcaatcagatactggcagctttgaaacttggtcggattcatgcagtgtagcaagagcttctttctagagccctcccggaggtattccttataaaattcgggtgtcattggacaccaaacctcagcacactatgctcatatatcaagtcagtatttcgattgattataccagaactgtctaaggagtacataatgcgtctgttgaagagctcttgaaaacgagactaacctggacgtttgcgatatgacctttggcggccaagtccatccagttggcctcgtagagttttggtccaataagataatttagatccgtgattctgtcgtcctctcgtacaagagttgctgtaaagtcaaaaagatacgaatggtattgtttttagccttcttgatccgagacagataattggatcgcgatttcaacgatctagaaaagaagaagagtaaagcataactcaaagagatgaagtttgatactcacccgtcagcccgagtttagcatgggtcttgagtgtactgactgctcttcgaaaaacgttggcaggcgcaacgtggacctcatcaagcaacaagaaaccccattctcttgaggtcaagaaatccatcatctttgccgaggcgtgggatcgcttagaagtgttggcaatcattgagtatgtggacacgacgattcctgatggtccagtaaactacaacgtagttatgcataatcagaggaaagtgagtccagagagaatgagatggagttagagatgagaggaagcgtgaacaaagcacacaaaccatttctttctcgtctgcagtgaatacggagatttgcttttcttgaatattggagaaatgcaggaattgttgtctccactgcatgacggatactctgtaaaatgatgctgtcagtaaaatgtttgagccttcatatacataacacgccaacgaggaacttacccggaagtgcacaggactagcgtgctcttcttgatagtacaagccgcggtaataccgaccagtgtctttccggctccacatggcaacacaataattccacttcgtgctcgactgtgataaatcgcatccaattgatcgttaatatataaaaaaacgctcaagagacgtagaatcacagatttacttacccgtttccaaacattttgctaagcgacttctcttgatagggtcggatcacagtaattggtttaagatctatctcaaggtccgggtttatctgatcgttacgaaaatcgtattcctctagaactgggtattcaatatctttgcagcgcttcttgacgttcttttaagtgcgacaacatgacgcgtattgtctatatcagttattcaaaattcctcttcttccgggctcagggaaggctcgaattgaaggaaaaaacagacctcaatctcagcaggttgaatttcgaatgtatgaacatcctcatcttcgtctaactggtcctccttttctaagcccacatcaactcctttgaagaactcgtcttcaacctcccgtcgtataagaatctcatcgtcccccatctctgtggtctccttcgcttcctccaactgttgaccttggccagctccaggagtgacagatccaccagcgatacccaatcgggctttcttagccgcctctgtaccaggaatgaccagacctgcccgtttgggggcgatgtctcgtcccagacccgagtttgaaccagttaaaggagtcccgttctgagatccagagatagggggcagagctctagcttttttgatcacatcgtcccgaaggagtcgttgtagaagttcaggatgagatgattctaaatagtaatggttgtgttttaacaccagtttgattttaccatatgaggccgtccatgttcgaatttgttgtagaaggtcttcgggtataggaatctagagattcgtttgattcgccatgagaacaatctcaatacgagttgaacagggtagaaggagtacgtaatcgtacagtataagacaacagaacctactttagacagtcgattcagaacctcgataatgtcctcggtttctaggccgacggacatggcagcatataaagaatattcggtgagcaagtactcatgaatgaaggcaggtctgttgtttgatgaagacaaaaaaagggacttgagtcatgcaatccacatgtattcaagcacaaccacaatcaccgagccctaacacggatgaccatagtgatcgaccattctattactctatcacgaaacggatgtactccaattactcacctggacaccggttctgctacggcaaccaagaaatcctgagcttgttcggcgataggactgaacccttccaggatgatagtcccgttttcgtctatccacagcggcctacttgaatgatcacccttgagccactcatcgcccaaatctatcgggaagagcgagctgagcaaatctgagggagatgatccagtgagttgaggagaattttctgtgagacgtccttcttcggtaggagggataatgctctcgttgttagaagaagcagtagaggccgtagccgtatcggtggcggctcttcgggtgagcgccgagaggttgattcttggaccaccacttgttgagccagtggtcgatggttgagtgagcctgatcttctttatctgtcttggaacaggtggaggagatgacgcgtcggaatagaaatcgatatcttcatagtcaacagcgtcttgggtttcttcatcttcaatctctgtgacctgttctggttgattggtatgggcagcgacggtcgactggcggagggaagacggacctacgatttgagatgggaagccagcagtacatcagacaaaaccatacagatcacatgtactcgcagaactatattaaatcttgccaaatatataacgactgggctgacctgctctaggaatcatggtatcagtccgatcggatggtggagagaagttgaaggtgagcagactcgtcatgaaacgggtgacactaagatcggcacagacgggtggcgaacgtgagtcacgtgcgtgtcaggctgttggtaggagagaagcacgaacatggtcatcgtgatttagatctatagaattcaaggtgagatcatctattgtatcaatcacatccttacttctgctcttcacttagaacggcactggtgtatcgtatgatattcatatcgggcgctcgtattgagttgtgttcgaaatgggaacagatatatgtgcgtggaaggtcaagtgaagcttctcaggtttccatagacctccccgaaggaagtcaaggatgttttatgagtacgccaagggtgtgcatgatagacagttgacccttctgacggttcgtcgcatgcaccgtgatttgctagcaacaagatacttaccaacatcttgaattcccgtcgttttattctgggacatgcagcaaaaacaggggttcttctacttaattattctttgctcgatacgtaggagaatgcatgacatggtgcttctattgagtctacggcaactgagagtcgactataagatctcttgttcatgtgtctgttcttccctttccatctctcttcgttacgtacgactccttatcacttgcctttcgacagcgccagcggaattcgactagcatctcttaacaacagaagacaccatcataatggattttgtaaagaatcttgcaggcaaaggaaacaaagacaacgacgacgatagcgatcgaacctccaagaacaatgtgaccaatcctggtccgcagcgaggaggtgattcaatgggaatgggaggagacactatcggccaagatgcaggtcaagatgaaggcatgggcatgggtcagagtggcatgggtcagagtggcatgggtcagagtggcatgggtcagagtggcatgggtcagagtggcatgggtcagagtggcatggactccgatctgtcgggcgggggatattcgggacagagcatgtccagttctggaggttatacagaccaagggaacatgacaagttcttcgggacgccagactatgggaggcaaccaaggttagtatcttgtctttcttcatctgcttgtcttcatccttgttgtgcttccactcatacaacagcaagattcttgggcaatatcgcaggtaaagactatcaatcggacctcatgggaagtgactcccagagtgtagatcctttctttggaagaaccggagataaccaggctgctgatagtaagcctattgaaaggaaaaaatctcttagaggacacataatctgacatccctctgattgcattgcattcgatcaatacaaacaagattctggtggcggtaggcagttcgggtcacagaccggatctggatactaaacctccgatatggcccgaccatcccatgcgttcttcttcctgatcacatgcccttccttgctctcttgcgtttaccgtgctgtctgtctgcgctgacagctacattatgtattctttcatactcttccattgcaatatcttgctgctgcatatacatgatgatgtagtagagtctgatcctctgggcctacttctggctgctacttgtgcttcttggcagagagagatataacggagcatataattgttacatgcacctgtgtattaaatcagatcttggacttgaagccctgaatatcctgagtgtagttgagctccaaactggaaaacagtgtgatcgatgatcaaagagaccgtcagaatcgaactcttttgtcaaatgattgcagactgattggactaaacttaccctgcagcaagattcttagagacaagctccttgagcgcctcgcctttaccgtgttctttgaaagcggccaagttctcatatttctcataagcgaggaatgtatccggttggtcaagctgtcggaggatggtgtaaataagggttccaggctcctgtatgatatagaccaagtcagaatcatagaaaaccatcagccacgtgatgttgcgaaaaaaaaaacacgaggatgatcacaagtcaagatgaaaaaataaccttgttggacttttcgacacagatattgatagcttgaccgagctcgtctgccttaccgggcttggctgtagatacagaaaggtcagataagacgaatcattatcaagatcgatggtaagaaaggacattaggtcgcaacaacgatcaagtctgtgcgaagacgaaacatagacgtaaagcatgcataagaccaagatcacataccaatgatctttgcaaagacaatcaaaggagcatctggtcgaacgttatcggggacagcaggaagagacatgatcacagttgaagcgaagattgatggaaggaagtgatgatgatggttgaagatggtgttcggagcttggaatcgaatggtaagttattccctgtttttcccggatattctggcgattacctataaccgaacggtgaatgattttgaactggctgacgtcagactaagactccaccggggttatcgcattttgtatcatctcagaaacctttataactcaagtgttccctccgatctatcaagcttgcttaacccgtccttctcttccgtcaaacttgttcatcatgttcttcttcccaaatggagcctacaattactcgctctatactgttcctgtagcttggatcttgtcctgttagtagttgatcgatcgattcgatggctaaacaaagcgaacagttacttattcgtgtgggataacctggatgatatatacagtgacccctcatctttatgccgtcaacaggtggaactctttgagaaaggatgaatgggacaactcaagtatgttgcattcccatttgacttcactagcccattgatatagcaaaatttggttagagtcggctatcgtcctatgggcatttcggctttgaatttgaaactacatcctcatagttgtcttgcaattcactaacatccttttgttcaaattcataatatttctctcgcaaagatcctcgaggattcttgaatcagctgcagaagaaagagaaactaaccaaggagtatgtcagacgttttctttgcttttctttaaatcggtcttttgttcaagtgtatcggtgttcggtctctataagtagtaaggcataagatagccctaggctgacgtgttcccttataaccctgttttagagagaaggtcattgtccgagccgaagctgctcagcagaatggttttgagaatctccccttcttcgcagttgctctggtatgaagtttcctctcgacctgtactttgcattcgaccttctaggaacatggcgtcgatctgacgtctctcctgtcttcaacagctggctggaaattatgccaaactatccaattctaccttgaacaatttggccgctacatacctgatcaccaggtatgctcaagtctacagctctttttttaatggtctcctgctcgaaatcgagtgagctcacctcactattgacatcttcctaatctgtttttaatatgaagggctttctacaatcttgcatatatcaagatcgataacaatcggctggcgcctattcgaactgttcttttcctttcggggatagggtgctgcttcactttgtttgttaaatctgccaatgcgcttttctgagcattgtactttctacattgtacatctagcagtgatggacactcaaggaatattcgtgatttgctgtagtatcgatatcttcgataatattaccaatgttgttgccattacaaagttcaacttaaagcgataccgcttttgaccacaacacatgattgaaaatttatttcgataatgcatcaatctttgagttggtgtagagactttgtacacacttgacaacctcaagcgacaggaagtccccactgttaccgaccgtacatagtgaattggacgggcttggtttgaacgatgtcatcgatctctttcaagatctctggagtcagcttggggatgacatcaagcgctttgagattgtcgatcacctgctcaggtttgctagctccgaggatgcctttgaaccatgggaaagagagaacgttgtaagtcattagactgatgatcgaagagagagagagacggctgttgaaggcggagagaaacatacatgaagacacattaggatttgtgatagtccaggcaagtgagagatgagtcacggtgcatccgagtttcctatcaatctcgacaaacgtaagtagaccgctcctgttcgtgtacatatacaagagtatgaatatcgaaacctactcctcagctaatttggtcagcttcttcaccttctcgatcttcgcttgaccctcaggactcttgagagcagcgattgtatcttggaattccccaggattagtcgcgtatcgagagttctctgggattccgtcattgctatagttattgcgaaatcaaaaaaatacaacgattatagcagactgccaattctggaagaaggaacaatgagacgtactactttccagtcaggaaaccagagctaagaggggaccaaatcattgttcccagaccatatcgatcaaagataggcaagaactctctctcaagtttatctcgaacactgagggtttacaatcaaatttgtttgaacaagcaaagaacgtgacggctaattaggggcatgacttttatggacgtacagaagagagtattggggctgctcgacagttggagcaatcaatccaaatttgtttgcaacatggaaggcctcttcaagttgcagcgcagtccactccgaagttcccctgcaaggaaaaaaataaagacagtcagtatgtaaatcagctcggacatcgcttcaagatggcactgaccagtaaaaggccttgccctggtttatgagataagtgaaagatcgaacgatctcctccatagggacagtcacatcaggtctgtgggcttaggaagtgtaacaacgaacatcgaaagaagcgatatgagcacaaaaggaagagtttaaagaccttacgagtataacgcaccgagaacgatatcgagataatctaaccccagtcgcttgagcgactgatcgacaccctcgatgatgtgctttcgagacaatcctatttccagtcacgtgattatagatgatgagctttgcccagatcatgacgccagaacaagaatcgaaaaagaagcctattaacctcggtcgttgggaccctttcggccgacaccagagaaaactttgctagagacaacgatgtcgcttcgtcgaataccaagttccttgaagactcgtcccatttcaaccctaatggtacaaagcgcgaagtgacgctctcagagatcagaagtagatgcgcgaatagatctaagggggaaaaagatcatagttcatcaccactcactcggattgaccattggagtagttctcggcgttgtctatatcgaagagaagggacgaatatcatgaatgtaattccaaatgacaggcttgtcaaaactctgcaagattcccaagcgtgagacaccatgttcgtataaacgcaccaaagaagtttattccattttcaaaagcagtcttgatgatgtccttgactgggtctcccttgactgccccaccgtaagtcaaccaccctccaagggataatcgagagactcgaagcccggaccttcccagccgggaaaagatcatctacagaaaacatctcttcgcgatcagaccagagtgtttatgatagatcaaaagaaccagccttacattcttgggatcatattcgatagaaggcgaggaagacatgattccggttcttttgaaaggggtgtagaatggggaaggtggatgttgagagatgaatgcgatctcccatctaaatcatttacggtagacatcttgttcggcatgagtttctatctcggtcaaatccgaaagccgaagttgactgagccagttgtgtcgacttcgatttttgtttgatgtttgattcttatttgatttatgatttttgtttgatgttaaatcttgatcaaagcaatcatgtaagagaagagcagttctatcgtgtcgtgattgtcgtcatcccaagaaatatacagagtaaagagtgtccattgagtagatgcatgttgagatgagagaaacaaagaatgaacaagagatatataaaaagagccgcacgtcaactcagatatgggctttccggatcaccatccggagaaaaatgccgtgctcgttataggcttcagtctctccaccaagactactctggtagggacctccttggcaagcttattgggtcggcctccgccatcactcgaccagcggtgatgcttccccttgtttgtcttgactcccccaatgccccccaaactacggatagaccacagtgactgggtcattgcttcatcttcgacttcttcatcttcttcctcgtctgcatccgcgtcgacatcagcatcaacgtcggcatccgctgctccatcatttgcatccatcctctgcgaagatgtcgaccggctcataccttttggcgtcgcaaatccttccagtgacgactccacaatgccatccaacgacatgcgcgccttatgtcccgacccagacgagctgaaacttcgacctctagccggtcgaggagcaatgggtattcgatgccggctgggaggaaacctaaacgacgacgacgactgttgtatgaatgatgacgattcggaatcatctccatcggaaaacgctcctctggagtactcagagtggccggactcgtcttcccctgcgtctatcgatttttttctaactttacgcattcgtttctgaagtacccaaatcagatgagtcaatctcgagtctcagttcacccatcaactaacgaaactgtcaaccttcggatacaaacaatccagagaagactaactttttgggttctgtcaaacttgtcaagagacgctagcgcagtaacacctgagtgtccttgaaatcctctccagaccgtttgaggacttccggagatcggtgccggcctgaaagatgcaagggatgggcacgagaaggttgaggctccggcagaaagtctcgcctcggagctgtgtcggtggtctatggtaggtcggacggacacaggcaaggtttcaacagaggcatcgacagagaccggtgtcgagcccagagtgtctgcgacgagctggtcggttatcggatcgtcagggacttcaatctcaactcgaatgacctccatcctttcacgcctacacaattccaggggaccttcgtcctgagagaaaataatcaggttaaaacagcattgtgtaagctttgtgctcgtgacacccatctgcacaaggaaagtactgaccgtagttttcaaagactccagtaagctgtatccttgtcctttcaactacaattgaaaaattcgagacaatttagtcacggacattaattctcagagactcttcaccaataggacgattcagaaagaatacacctacaacagcgagctgacgttcccacatgtcttctgaaaaatcactgtcgagctcgaatcttgatgttttgtgtgggtatagattagtagaataatcggcgatgataatgctcgcaagaagatacttacagcgcccggagctccttggttgtttgctcccaccacgccggggacgagaacaaaggaatgaaatgttttcgaatcgattcactgaaaggctgactgaaaaccagtagcgatcgtaccgacaaaagaagtcaattaaatgatgaggtcgtaatacttgggcagagaattgtcttacccaattagggaaacggggaggtatagccatccataagtatagctccgccatcctttaggatgatggtgagggaatgatagtgaattatcgatcgctgaagaacagggagataggtaaacgattaattttactgcatggtttcggttgttcgttatgagatggatatacaagaaaaatccttgcctgcaatttgaattcttggacggttctcggttgattctggagacgtcgtttggaaggctttgcctatgttgggcaaagacatgctcgaaggaggctcagaaatgacagttggtacaaattttggcgccggcggggtcgctggggtgtattttatcatctgatttggcaatgtggattatcaattgaatagagcccataattatttactggtccttcttttctatacgtacatagttgtccatccctgaaacccgagagagatccgtggaagacatgttggtggcgacaacgagacaagaggcttgagaagagtgaaatcagacgcaacatcaactatgcagacgcacctcgatccgtgttgtgcatcaacacgtccaaaacaactagcttttgaagttcttcccaaaactgagtttttaaatcggccgtccacctgaaggtcacatctcggccagtttgttgatacccttgttcgttgtagctattttggtcttgttcatattcgttcccatcggcatcccacgtgtcggctcctgctcgaccgcagaccattgcacctgcccgaagacatctccggagatgatgccgactgctgtggtgatccagagcttcttcatcatagaaaggtcctggccaaggatgttttttaagctaaaaaaaacgatcagttccatagatacgaatttaatgtatcgggattgaacggatcaagatgatgatatgtacccattccgtagcatcctgatatttgcatagacacattgagattagctaatgaacccgatatcagaatttttagtcaacaaggcgtttacctcgtacccggtcatgaatatctatgaggttcaagaatatgctttaagtctcaaggaaacaagagaaaacaagattgaactcgatagtagcttacctctgaaatcggactcgcattgcatgagaaaggacggacatcatgaataatgtatcaggtgtatgtatcagttaaacaactactcacggaagctccccgccttctctcttaagggctttccattattcctgtacgccgtcctctgaaaatgaagatttccgggcaagatacaatcagccgcattcctgtcataagaaggcaaaccaggcttacgtcgatccaatcatagaagaatgccggactagatagagatactagacgggtacatgggacaattcctaatcctaaccggtcatccaagcaagatgccgcaacttccgagatgtaactggacagaccaagttgatgttacatgaacttgtttagctgcgtgcgaattataagcaaatagagattttcgaaaaatcacctgagattggggattaagcacgctcttccaaatccgacccaccaaaacagtttccgatgaatccatttagtccactgagagaaagacaaaatatattagaacccatttacattaaccatattgggggattttatgagatgcctaccttagggtttaaacgcccgtactgagatgcctcggacagagtcagtatgcatgcgcttcggttatgtcgttatagctgccacttacaggctcttcgtcttttggtttgaacacactgcatagaattccatcagggatatgtgtaaacttcacgatttatgatcaaccggacgcgggccgataggcaagtgagaaagatcatggggtagagatgcactgacgccacaattttcgatgatgaatttacagcaaagtaactgccactagaacccttcgtgatcatctttggatgaattccaagcgagatagcttcctgaacagaggtgacaaccctgagccaatggttgtaggaaacaaggaactgttcaactatatggtcttcggtttgtgacacccattgagaggagaggataacaaccgcgcgcttactcttgaaactgactctccgacataagttgggtagtaaaccctgccgaagaggcaagaggcaaaggggaccctgcctgatgaagtcgtgtttgaaacagtttcaggacactatcaagatacaagccgtttctgaatagcaagcaatatgcttacgctgcctcctatgccgaacacgctcttcatcaacatcttcgcctcttgctgtcctcgaccggtgtgtcgacgttttttcatagaccttatcgacatacgtttccttagggagactctcgatatccatttcgatagacctgcttcgactgatcccaaatcaactttggaggacgacaatctcttattcgaagaggacgaaggatctgggcaggactctcgatgagataccgccggcggccgcggcgggaaagtaattctcggttccggagaactcgacgacggtagtggctgatagccactgtgtgaatgcatgtaagcggaaggttcttttggctgatatatatacccgtgaaagagagtttgtgaaactgttcttctcgtttctcttcctcggaagagacaaagaatgaagagaagctcttgagatggttgaggtgttgtccaagttgaggccgtggaaacatcatcatgtcccgggcggcaccggttacaccgaggttcgggtaaccatgatatgataacgatgagagcacgtgcgtccggcttgacggcccgcacatgggtaatgtcaatgtcttgatggaacaagcagatgaacaagcaaaggatgcaatgcaagcatgtaaaagtacatcaacaaagaagtacatcaagtcgatttatgtacaaaagagtttgtcaagtcacgatgtacaggctgcatctaacagagttcgttcgccttggatcatactaggccataaactccgttctaagttatcgctctagctctcatttttcggtcaccccgtgttccaccaggaatgccaagaccatgtgttcttccggtttgagagatcacaatctcctcaccatatctcttattatcatcgccaacatcgagtcctgttcaacaaccatcatctactttgcaagaatattctccatttgggaaacagtatcgaggacgtcgtgtaaatgtcgtttgctcaccttctactactgctagcagtcgcgcaactagccgagtcacggatactcaaacaccactcttcaggtgtactatatcctccatcgtccaatggaggtccctctctggaggaattagattcttcgctaggtctacaatccagacagacttcgactgatccttgtacagctttagcagtagctaaaggaaagctttataacgtagctgacgctagagcttgtcttaagtcagttgattgtctcctccccatccatccttgtctccagtatggacctcttcaaacgtgctgaaaatgcgtccgaatttcttattggtcaaatacaggtcggtgcccttcaatgagaccattcgaactaacattcttagcgtggttaacaaggtagagcatacaatctctttggtcctaacttcagagaacgatattggtctctcattacatgttgacctggatgttcgcttgttcacgtaaaaccactctctactatctaggtgtatgatctggatgtgagttgttctagcgcaaacaggaaggcttttacctgttggaatagcgtagacacgagacttacatcttgttcgttccatcgtgtgcttgcatggcagttgttcgagtatgagcaaatttcccaaccgttaccgctaaaccagtcaaccaatgttcggttcgtgatgctcaaacttgaatcgttcaaagcttcggacttagcccgatatatctcttgccggtacttaacttttgcatcatatgggctactcgttatcttccaggaccgagcttgatcggatcagtaaggcgacttactcttctgattacgacttcaacaaagatttgtatgatatgttcagaactctcaatgacggtcaccattattggagtgggtgtttcttcgttccgacttccttcacaagtcgcctttcttgaccagtggatctttccacgctccattcaggttcctgctactcgactgccttcgttacattcatccctttccctttggtcgccctttcctcagcctacggagcaaaagatgtcaagatctacgttgcgcctgattcgcaatatatcggctcacagtacaatcggtacttcttaggactccaaagctcttatgagagattagggataaatgtcacggaacttgctggcgcagaggtcgaaatgattgacggtgtcgaaccttggactttgtaagcttttcactgttctcttccttctcagagatctcaccacagctgccgatatgttctctgtttctttgtcatatcgtacgatgatagcattgacaaaatcactaacaatgagagcgggtcctatcaagaccagcagatccggcgaaatgcagccttggcatcttacacgctcatcgggtcaacttggtgcgtacctctttcgtctaccttgtataacgatgacatggcttcacttttgtgtttcaggctctgatccggaatatctcactctcacattcctgggtgttcgcaaacggtgttatctactatctgtgtacaggactcgagacctgggtgatattgctcaacagaggttgccggagcgagacaacatcactcttcagattgccaccgctacaggttccaaacaggttgtggttcgtatcaaggttgttcaaaaagtgtggcagattgagagtgaaacctaatcttcattcactttacgcactttaaatagctcccgtatttttctcggtctacttctgaacaagcatattcctctaccgcaacattcttcgctaacaactgccttgctgagggctcttcttctggctcgaattctacgggcttgaacactgaaaccaccatcatccggcatcctctggctctctttcctgaactagacctggctgaatctaaacaagttgagaagcggcagctcacgacgtcggcctgctctaccgcaccggtcccttacctgccgatgaggcttgacccttcagaatctgcgcagtatctgggaggaagaaatgtccaattctttttgttgcccagcgcggaaacgggtggaactaaagtcggagtcatcttcgtgcgtgataccagttttttctttatcagaaaagagaattgtctaactatgtatgaacacgttgatatcttcttcgtcagctggctacttttgacccagactcaggctgcacccagcaatttattactgatacggatgaaggcttccaggtgagatcgagatcaggtttatctgtacctttgctttgcgtatcaactagcctctcagcagtgtctaatctcatacatcggaaatcatctcatgtactttaatttgtcagaattttacaatcaatggggtatcaaaggtcatcatcgatactaccgggaatgtatgagtcttgattttcttcttttcgtctcttcattcatttcgaccttcgaaagatcatatctgatttttctcgagtcaactttcgtttgttgatgatgaccaaaacggtcctatatagggaggaggttctgtcgcactaaacatcatttggcaatcgcttttctctgggagttcttacaccaaatatctaaacttccaatctgtgttcagatatgcgcctcttgcggagaaatttgtcaattatcacatcagatatcctacaatcgacccggggtgtgagtccacttgtactcatcgatcttttctacttattgttcgcaatgctcaccatggtaatctgcattcaccttgtttagattatgccccgacatctttcaggaaagatagcggctcaagcttcatcagcacagagagtttctttactgagaagcgaagtttgacagccaatggccatacgttccagacatctgagctgtaagtgatagcccagatacgttttattttatcgagggagtcaagctcattggtcatgttgtgctcacggaccacaatacatacacatcttacactatcagtatcagagatactctcccgtcaacatcatacttatggacgtcttccaatccaatctatgctcctgaggatgtaatcgtctatggtgatggaacttgcggaagcgcctgtgccagttttacctcggtaagctctatatatcttttcttcaactgacgagtgttcaaaaaagtgatctgagtaggttgtatacagcgaatactaatctggcctggctgttcagtttatcacgtactacaataactacaccacagttgtatccactggtcgccctagtaaataccttttctccctactctgttttttctttcaatgctaagtctcaacacttatactattttggcataatcactatcaaacagatgaaccaattgaatttcaatcattcgaggcaggtcaagcagcatcaagcaccgcggtcttttctgagatgagactcactgggcttgacggtgatgaagatgcgcctccgtctttgcttgttcagggatcagtggggatcgctctaagaggacatgtttcgcctagtgatcctaacaagtttatgcgttcgtacgagtttgattggggagttatctcggtgatatctggtcaaacttgagctgattaatacgttcttttgtttctcgttcttctcttgcccatccttctttttcttgaaacggatcttcaacagaatatatatcccgtcccgcagacttcagattcaccctaacagaggagggttacttgaatccgctaaagacacatatctacctcgccaatcaggtttggcccaattctacaacgagctcaggttcaaccccgggtttacaggctggaaatacgacggaatcttcgtctggttccaccaatgaggggtcgccaaagagcaaagtcagacaggtggtacgattcggatggatatcaatgactgtgggagtgatcgtctcaggaatggacttcttgttctgagagatatccttccttctgtatttggtctatctgtttatctatccaagtagatcatactcaatcttctctcctacattttgttatacattgtatatgtgcttatatcttgcttctgctaggatctctcttgcgaatctactttttcttcatttgttttcttccttattctttgcacttcatcctctaatgaaatgcttactatcagaagttccgattatgagaataaatgaatgtctctcatataagaatgtaacagggataaattaggagtgaaccatgtcgcgcggtggaaaatgacgtctcgggtaggtgacttatttagatgtagttaagataggatgcagaaagtgggaaagggatgagaaaatacatgacagaggccttcaaggcttcgaggtttggtcatcgatgttctaagtaagcaacaaagagaagattggaatgatttaggtctgaagatatctcacacaagaagcagatgaacaaaagtgacacaaagatgccctagacataccatgattcgtattgtatccggactgcactcgaaccttagctgcttgcccgacatctcgccgggagaactattcactattgtcgaacctgcagatatcgacctattataggaggggcggaatgatctatcggcatcaaacgagaagtttgatagagacggatgatacatcttttgacaaggattcaaattgagtaagattgatcagaggggaaaacagagtgttacttcagaagaggagatccggcgcacgagataagaatcagaagctcgtctgtgggaagacggcggtgtgatctgtagaaaagaagcatcaggggctgactaaatggaatagatgtttgttcagcaagtctgtcagtatttattgaaggtaaacttcaaaggcgccaaatgacacaattgctacacgaaaacaaagttgaaacgatgcaatacgcactcctcttcttctttctatgcataaaccgaagtcaagctcatcatcatctatcaggcagtctcgtgaaggtcgtcctgatcttccggacggcataccctggtccattccgaaggaccttggtggatttctgctattcaactcgctcggttgtacgcttatgtcgtttcgcatcaagtaaacatctcgggagcattgggtgctcccggtcgagttcgaagttggccgtcggctgttgaggttgtaaagtatggtgatgacatggattcgaccgagtagcataccaagcattgttgccacttttatgcgacaagtggacgatcaagaatgagaggatctgatcagttgtttgtcgacagagaagagggagggaggaggtcaaaagaagtgacttagtacagttgttcttcatcgtgttgaagcagatacaggctgccacagcgataaccgctgtgcaaatgcccgtctgagcagctctgaccgagagcctctcgatcaaccgttcactaccaccaatcggacttatagtgccgttcatatgagcaatatcctctataccacctgaatgatttggagctgatgttgccgcatttgaagggtcgacgctcgtacatggtgcacattgacatgctggtttggttttctgacgaaaagcactgaatacacaagacggtttcgttggaaagaagaaagatcgtggagaaggtgttgaacggttagatagcgctggagtagaatgtgttgtcggaggagacgcagggatatgtgctgagttggtcctcctcttcagggagcgcaaggcgtatatcatcatgatcgtgatggaaagatcactttcatgtattttgttttaaattccgcaagacaagtatgcttatatgaataccgtaaatcatcattcacaagagagaaagaggtgggtaaacgtacgtgacggccgatgaacagaaccagaaattgattgtccacatcatattttcactataagctgggtgatccatacctgctaccaggatagaggcccctagagctgaaccaagctgaagtatgaccaaaaaatatagtatcagcagtcattatagattgttttgtgcatatcagtatgtttttatgtgagaccatataccccagtgatgatgaacaatcccagcgcgattggccagactagctgctttgtcaagagaaagatccgcctggtcaagaagctctgggagatgacagcggagagtgcggtctgtttatcgaatgcaacgtagtgatcaattcttcctgtatggtaaatgatattctatatgaatgactgacacccatcatgtagaccggtactgataagggaggtcgtgctagactgatcacgtcgcctagaaccagccgaaaagaagatatcagaacaaggatccgggcggctagaccgatgaatagagtttgaagacataccccagcaagacacgaggtagtaccaagtcctaagaaaggcaacaggtatagattaactcgataaagcacacaacttgtctgagatatatcatgactcgtacgtcaccattacgcttcccatggccatagcgtcgacgagaaaggaaaaggacacagcagctcgatttactaccgagtcatttctatagttacgaaagtattggcaaacttgaatgaatctaggggtaggaagaataagaactatgaattagatcatacttagcgcatgcgcaaagaatgaaagaaaccgactcgtatgtgaacaaggggctgttgatccaactggcgatgaggagcatgccataggccagaacgaagtctgaagaagccatgggtagtagaatgttgattaaagagaatcaaagagatacaggatgactaggctctgatagcaaagcaagcaaaacacagggccgaaagcaaggtgaggaagaggaaaggctagatgagaccagacgagtgaggagagggaagggtgtcgtataggatgaacgatgaaacaagagagatcagcgtctcggtggagagtgttggggagaaatgagtgaattgttaagtagactgtgttagttcctgcttccgatgttgtcgttttttccgttcaggaacggacgaccccaaggggagatgggtgcacaggaagctagaaagggcgcgtgtcctgcttgttgggttcaggctcggtcagtcgagatgggtagaggtcagtttgagcagagtcgctatttggacaagagatgtcagcgctcggtctgtcccaacgaatttcttcgtcgaccatgtcaacaactggatacatcggccaggtcagtggatcagcaacctgcactcaaaccccaggatactcagaaggaccaaatcaagaacacacgacaggccctggatgcgagatggagtagagcgtctttgagtttaaccctaacaaactttgatttgtcttattgtttttttctgccataactctaatagaactctcttgtgttccgtattcgtttgagatggcatgcctttctaatagaaaacacatcggctggtacaactttctgtagtcaaccgctccattcgaacatcatcagttccatccagcctccatctcgttcgcaacgaccatcgagcactgatcctaccgactgttcaccatggattactttcgctccctaggaacgtccatcttgcagagctctggagtcgttcttccgttcgctctgggcgagaaaaatgcggcttttgagcgagaaggcaccatctggaacatgcacaatgccatcaaacgagtcagtctagtcctttccttctctctgtttccaacatagtctcgctcgtgtgtttcgatctatgaactctttagtcattccttgttctattccatattcaaaatcaacaggacgacaactctagaatcaccgtgtttgtgtttgattcttctttgccctatgacggccgagcagacagaaaggcgctcctgccagtagcaaagaatgcgctaaagaagatccgtgcaacaagacatcctgacgtgtcagtttcttcatctgctcgtttttttctaatcacattttctcatttctcaagcagaatatctgatcagacttatggactaaacactgctcatcataaacagtctcaaatttattgatgcctacgagacagaatctgtcatttacatcgcaacagaaccagttcgttcactgagcgctgtgctcgattcgacaagcaacccttccttgacggacgacgagctggtttggggtttacatcgtatcagtgtgcgtatgattcattatagttgtctatcatagttctcgcggcctgctcttctctgtgtatcttgcaggcttcacaagctcactcgctagaactaccttcatcagcgtgccgtcgcgttcctcaactcccaagctgtctccatccatggacttgtacatagacgatcttctatattcctgacggactctggcgagtggagactcggggcactggacctcctctcatccaccagaagcgaagagaaagacacacaagtcctctggacgacgggcggattagtcgttcgcagaggagagggtgtcagtccggaggtgatgaaagccggctggggtgttctgaaagagtttgttcacccatgtttatttcgttttctcaacctcttctactactttgttcttacatctcattttttttgaacagcgccgaacccacgtcaaacgatgcttattccttggcgctcctgatccatgctgtcttcaatccgtcacttcctttgccaccaacagtaacgcctccacaccctgctccacagccttcctctcgaggcgcaattcctcaagcaattttccccttgttcaaacggctgcttaatccgaatcctaagacgcggctcactgccaccatgtttcttcaggaggccggtggggctgatggtacggatggaagtgatcgaagaggattctttggaggtaacaggctggtttggatatgcaagggtttggaaggttggggacttagtggagagggtgagagggtcgaaattttaaagtatgttacatttttcggatgcgtacaagctcttcctataggacgatggtgtacttgcagcgttgcgcgaggcatctgaccgcccattatacgtcttctacaaacagagcaattcaagccccttcacctcctcttccccctcttttcttaacccacaagatcctaccttctcttcttcatacactatccctgccttcttctcccaacacgtcaccctctgctgcatcctccccttcgcagctgctaccattggtgttgaagctaggaaagttgctttctccagaagaataccccaagctggtcttggagccggttatcggcttgttcaagagtcctgacagaggtacccgaatggctttgcttgaggggcttcctcaatttgagagtttcctgagcgagtcagctgtcagagagaaggtctggccgaacttagtaagtgacctctgaagttctttctccttcgggatgtgtgcatatccttcttgaatctcaccaatcgatctcatcctcgcgaaccaatgatctgcgcagattacaggatttgctgatacagttccagtcattagagaagccactgttcaagccattcctttgattgctccaaaggcacgtttcctttgagcttttctccttcatgatactataacttgacaaaagtccactctatttcattcagttatccgatcgattgttaaacaacgacctactccgactgctcgcaaaatctcaaatggaccctgagccttctatccgaaccaacacttgcatccttcttggccgactagttcctcatttaggaccaaacacaaaacgaaaggttctcgtccctgcatttgccagagcgctcaaggatgggttcattcatgcaagagtcgcaggattgatggctttcatggctacggttgaggcgttcgagatggatgatttggcgggcagagtcttgcctgtggtgtgtggagcgttagttgacaaagaaaagtaagcgaatatttggcgcgacaaaaggtagtttggttctttctaacttatatcatcatcatctctttccgtagactggtgagagatcaggcattcatcgcagtcaacatgttcatgaaacgtcttgaaaagatggtggcttctatggtgtgttttctttttcgtggtctcagatgatcctctcgttcaacactcatctcacaaccacctgaattttgaatcaactgctcttccccccccaattctgtttttatccttgaaaccagcccgaaactattgaaccagttcctgtccgaactataagtggccagacgaacggtttctccgcagacgcaccgacgacacaagcacaagcgtacggtaacggggatggcggaaaggcgattggttctgcagccggtgcggctggagctttagccggttgggcatttgcttcgataggaaaggtgcgtgtcatcttttcctgctatacaaccatattcatactcctgaatgataggcatgcgcttccaatattcatctatacttttttttctagacgttggcttcttcagatctgcaatctacgatggctgtacctaccgcgtccattcctggctccttcaaccctccctattcttcatctccttcaatttcacctcgaccttctaccagtgggccttcatctgacttcagtcgaccggctgccgctcctactcccaatatcaacacaaaaccatcaaacggaatgcgtctcacctcctcctcggcgttctcatcgaacgcaaagaaaactcagttcaacatagatgaaatattagctgaggaaaccgaggtagccgatgcctggggaatcgatgaaggaggagggggagatctgatcgatatggatagggacgaagacgactggggtggatttgaagaagcgcccacgccgctttacccgtcccatcctacaacttcaaccaaacctcaaaacacgtctacccctgcatcgaagcagaaaccaaaagccgctactacactggtatcaagatcatcatcagcagctcagccatcgagatctcgatcggcaccgcctgtcgttgaagcagacgatgactgggggctagacgtcaaggatgaagcgatagctgcccctccgcctgtcgttcctattcgaacgaaacctaaaccgagtccaatccctacatcaactactccgactctcaagacaacatcttcgaccagctcgactcccgtcaggtcgatttctcctgctattcctgcttcaagcccaagtgcggagcagagcgctccacaggtcagtctgagtgggctgtcaaaggaggagaaggacaaggagatggcgaggaggagggaggaacggaaggcacggatcgctgaactcaagaagaacaaaggctgaggaaaggcgtgtatcatcttatccatctgacttatctgatacgcagcattgatcttctgagatgtactttttgaaggagaaaggtctaagtgacatcttctcgtttcagtgatgaattcagttggagatgcaacaagtcaaaatcaacgtcactatagaaagataaggatgatcaaacagctttgaattgtgtatccaatttttgcaagaaattcaatctactgtcgattgggggtataaagcgggatatcaagatagaataaaaacaaagcgcagtgaatggaagatggtactggagcgaagaacaaatgaacgaacaaacacagatcaactggttaaaaaaatagagcgtccttgcgcttgatgaatgatgaaagcaagtgctgaaaacgagaagaaagaacaatatgaagatgacaggaaaggaagaaacacgataaacggatagacttcggctcagccgaacaagcctccaaaccaacatttcactctctgccaccacgaccctctccatcgttcacctctttgttcctctcctttccacatccgaccggtccctacaccttccaatacgccttttcccatcgtcattccatctagacctcttccttcttcaactgaccggattggatccgatccagttttgggcggaccgacgtaaggaaatcgagcggtcttggaagctgattttgtgatatgtgaaggaaacgcgcggataagagatttcagttccgggtcggatagattctcaggtgaaatccatgttcgccatcgaggccgaagagaaccggcgtcgagttcgccttcgaatgtatccgattcgaacccatcttcgtcatcatcttcatcatgcctatagttgtcatattcttcatcgagcagagcaacacctgcttcagaaaactcagttaccgactggttagacggtcgattcccggaaagaaggagagggtcctccactcctggcgtaataggctctttacaatcagcggaagacgcatttgagcgtgacctatcgccggcattattggcctctaggatcgaagggtgtggtctgataggaaccggaggggccggccctcgtctcgaagaaaagcctagtccatgcgatggatttgacatgctcgaacgactcatctgttgttgttgttgttgtaactgctgttgctgttgttgctgttggaggagctgttgcttcttggcttgtgcatgtgggtctgaaaacggatctgaagatgcccttcgccggttgttgttgtttgtttgtgaaggaggcggaggcgctttcccacgttttcctaaccttgtatgattgggggaagttgagaaaggggcatcatggtcggaatctcgtcgaaatggggaggagctcaaagaaggatgtgtcattgaaggtctactcagcctcggttctgaacgacggcgaggttttatacgagggatatcctggaatccaagaagctaaaatgataaggaaacagatgtataaggactgttagcaaaaagaagtccaggatcgttctgtcgtcccaatccgagtttacgtttttgtcaattggagcgagacttactcctctaacgactgcgatagcttcaatcataaaatctttgccgccagcctccatccaaacagctaaacaaattgaaatttacccaagtaccagatgagaacgtgttcggaagccatctgacattgcctccctgtctcaaaacttctctttcatataaagaaaaaaaaagaaggggggggggggaaagaaaaggaatacacaccatcgtcaacctcccattcgatcctctttcttcctgctccccctttagcctctggtacggtttgcaaccttaataccgtatagagcgcaacaaagaacggtttcggtcccacatcgttcttcccagcatgcgtcttgatgaacgccttgagtctgttgagtcgctccctcttagcaatcgctccgtccagatctcttcttgcttggattgttaatcctccgccaggctcggtaactcggacgatgacttcaaactcgtttctccgtcgaagcgactcgtccgcatgaaaagcagatcggattgaagcttgcgttcgagtgaacgccgctcgatgagatggaggtagagtcgagagaacgtggtcgatatacgcttgagatctggggtcaccctcgtagaataaacgacggcagtgctcggagaaaagattgagatctgctggagagggtgacgaaggattttgcggtgctttggagaacacggaagtagaacccggcgtcggtgaccgaagaggtaatggggaggggaatgaaggggaagatggagaagggtgagatagctgatgaaagttggaacaagatggatctatagacagcactggggcatgacgagcaggccgagcctgaggctgatgaatcagcggagacgtcgtagctaagggaagtggtggcagtgacggcagtggcagcaaaggaacaacacacacgaaagcctttgatcagttttacagcatcatagcagggttctaaaggagccagtagtagaaaaacccagcaggcttagtaacaaagaaaacataggacctaccagctggtgtcgaccttccgtttccagtcccctgtttttgacctaatcctggtacccttccgcctacagtacttttcaatccacctgctgttctgcttccagctgctggaggtgataaagtcctgttaagtccccccgccgttcccctcgagttggatcctgcgtcggattttgtaggattaactataggagaaaatgacggcgaagatggaacgccggccgagttgggatgatgaaacgaagggagatcatacataggcttgaacgccacggaggtatattgactgtttcctgtcggtccagatgcagctcgatacgtttgggaagtgtttaatgagctattggctcctcctgctccggccgtgtgatgccgagggtaattttgatgaggagggggatagtctgacatggtggaagtcatcgctcacaagggataactgtttggatttctccctttgttcctgatacaactaatttttctttcttcgaatgtgtcggtaaagaaaaaacaagaaaaaaaagggaaaccaaggagttatgtatatagaggccaggtcgaaccaagaaagagaaggaaggtttgagaggcaaggtcgggaacagggggaacaagaggaagaggaataagcaagagagaaaaagaaagcaaagaaggtgaagccggcgggggttgtcatccgaaggagctccttttctcggcacgtacacgcgaccatcacaatcatcttcatttctactcttccagttcttttcaacagatgttacagcagagtgtcttcaggaggagatgcagttctacaaaaggcaatcaaattatacaacaaagcaataaaagccaaggttatatagctagtaaagcagattcctcatccttctcttccctgatcgagggcccttccgaagacacggccgtcttttccaacccgttgacagctccttcagtctgaccgtgatttatagaatctgaggtcaaagaatctatacccttttcattctctacaggattgttcgtcgaggctatcgactctacagcttccggactgggcgcagcactatccaacagaggaacccctttcgagatttttgtaaatcggtccttgtatgttttcaaccgggtttccagctgttctgataatgtcgagtttgaattctccaactcagcctgtttgataccatgtattaagaaaaacaaggcatgagtgtttgttcagtgtctggatgacccaaacaaagatgcagaaagaggaaaatgactcacgagacgcgtctctagatcagatagcccgtaaagtctcggcggaagtgaaggtaatggtggtaattttgctaagaaaaaggagaaaaagaagactcgacttttcagacaaatgtgtcatatttggaagtagctaaaggcgaaaccggctattaggcacatttttagagaatgacagaatgaacaacacttacaaacaggatgtacgctgagaacgtcggccatcaggtcgtgattgagtttgtatcttgcgatagcaatctcccgttctgtgactcgctcaaaaggatcaacaaatacctcctgaggcagtggcggcggtggggg

SEQ ID NO: 2428 - DNA, 10437 bp, Xanthophyllomyces dendrorhous
gtattcaaacaaggaatacattcggactgagtaccaaccaaaattgacagatttgctcagaaaaaagacagacagaccttgtctttcctttttttgttcttccctttcttgtccaccatcatatggctcccattcacatcgtcttgctttattagtttgagtttttgctgttgtttaggtaaccgttccatttgctgctgctgctgctgctgctgctgttgatgttgttgtatcaacaactgttgctgttgctgtagctgttgctgttgttgttgctgctgttgttgttgctgctgttgttgttgctgctgttgttgttgctgctgttgttgttgctgttgcttttgttgctgttgctgcagcaatatctggtgatcgagatgttgctgttgttgcagatgctgctgctgcaagtgatgatgctcctgtctttgttgttcctccctagctttgacctgggcgtgtagcagctgctgctgttgcatcattcgaagttgctgaagctggccaggggtcattcctcctgacggcccaagcgaactatgacctcctagtgtatatgaaccgcctggaccacttacattcccggaccctccaggagttactactactgctccacgaccctgattgccctctaaaccaggccaactctgatttccagcatttccgaaagagctttgaggatgaaccggacgggcgttgtgaactgctgcctgctgctgctgctgctgctgctgctgttgttgttgttgctgctgttgttgcgatataaacgaagcaggcaggattggagaaggttgatgagaagtagcactggatgaccttgcgattccttctaacggattccctgaatgattgttgccagatatcgacccgttgctgacgacgcgactagaagaagcctgagcaggcgagtgatgaaagtaagaaggctgttgctgttgttgtgattgttgatgctgctgctgctgttgctgaggatttggtggatgtggaacactagcaggatgattaaaaaattgacttggattcagcgttgttggaagttgctgatgggccggagagaggttccgatgggattgggatggagaattactgtagagtaagtgggtttgtgattgcgatgaagagttattaaactgaggctgataaaccgattgagagtttaactgtccatgttgctgctgttgctgttgctgttgttgttgctgctgctgttgctgatggaacgctctaggatcaaacatggatgggttgaatcagtatacttgcgtgcatgctgagagaaggaagaaagaggcgacggtagaaagagcaggggctcgtgtttcgcagatgacgcttacataatcaacaccgtaaagctcaattaaacatgtcggtcgatatattagtcaacctcatcatctacctccgacatcgacatggtatgtttctcttccttgtctgtattggtctggattcatcaagctaaacattgctgctggtccttccgttatgtgtgtccgtttgaattataccagtcagcgctccttcagccatcaccatcgtcctctttctcggcatctacgtcaaccacaactacgctcccacctcaactggcttctctactcctcccgctctctcaatctcgctcggtgctaggagtgcttgttctttcgagaacagcaaactcttacacatcgaccgctaacatcctgcaggcacaaggtgcccccttcgaagggagtgcaggcaaggactatgcaggtcgggtggccaagatggtggctgctgtggaagaagggtgtatagccgagaaggacgacgacaccgttcgttttcggttctttccttttgagcttgtagcgcctagttgggagaaagagatttgatataacattactgagctgttttctccttctttttctttcgatgtttggtggggcgcttggaacatgcgaccctaaaggatactctcaagtttcttaggatcaggactactaaacatgaactcattattactccgtgtatgtttttctattcagtcgattcaactcctgttgatcttttccaaagcaacctctcactgaaacagagttttgctatatcactgaaccatcgatttgatacattcggatcgatatgactatagcgccagccttcattttagttgtcctccatgaacctggccaagccccctgattgatctaccctggcgaccaagctttcattgtcctttccatatttactccttcatgacctattgatgacattaacgcgctttcttcttgctgtcttgtccatcacttctccttctttctcgagacacaccattgtggtgcaagactaatatatgcgcgggacaaaacatccgtacatgtgctaaaactaacagttcaatacaatatagcgacaacaatcctctgttgaaacgaatactcgatgtacgagcgttcaccaatcttcatcttcaagcatacctcctggcgtctctttccagccctctggttcgctcgcccaatcatcatccgatccgtcctcgattccttgaacctcggccgtatctccgatcccccagacttcccgcttgactttatgtttctcttttggtcgatcccaggttcctacttctagcgccgatcctgaacctgtcggtggttgaggaggacccatgaacttggctccggtcccaactacatctgttgattctctactattaccagtagctttcaaacccccgttccatctattgggtctcgattgtctgcctttgcctctaccgttcttgaatccacctggtcctctcgtcaattctgctccagcgatatcgtcatctagtccgttttctgtggatgcggcctgatgagctgggacagcgaagatcgatttgaacgtttcgtctctctttctggctaccttggccgatgtggcctctggagatcgaagagaaagcaaagcaagtagatgcggaggcagatcgtcgttgatcattcgggatgtcgcgcgagacgaagcagagcgagaagatggttcgatcccgtatggtgagggatatgcatctagacctgtgtctaattcattgaatgagccaggaatagacccagacggaccaggagttccagaggaagaggaagacgatgaagagggaatatcgttaggaagcccataaagaagccgtcggtttgatgaacgatgtttcttaggactttgatacaacttggatggttgaaggtcggtttccagatcagaattccacatcccttcgtccgacacttgaacctctgccaccgttccttcgtcatcttcatcgccatcgctgtcatctttgccattcttaaaggtgacagcctctgcctcgttggtcggctggttccggcggaaaagtcggtctttgggaataggaatggataacggtgcaacagtcaagtctcgtttaggaacgcctaacaggtgactccgtacgatccggaagccttcttgttcttccttttcgccaccgttggttgttgaagaaactttctcctcgagctttcctcctttaccacctgctcctccatcatcttcgactgcttcctcctcgatctcctcgccagccatctctctcagtgtttgttctgcttttttcgccctagcctcggccgccgctccgaaggctgagcctaccttgggctttcctgaccacgctctcaccttctttgctggtggctttccttcgcccgtcatggacaaggatctgcccctcgatgtttttgtttggcttgccttctttgtagaagattttggactaagtatcgaagagagcgttggtgggtcttgagaagtggatccggtgggcggtcgagtatcccatgctttcgtagtggtaaatgtgaatggacgtgttcgagaagaagacccagctattgtggatatcgatgaagatagagtcgcaccagaggcatccgtcgcagacgacagaacactctttcctcgggtaaataatgatctgggcgttccttggattcgacctttgcctttgctagcacctgctggttcatccgaatcggtttcatcggtgtagtcttcatcagcatcggtgctcgcttcttcatcgtcatcagaaatacctcgggcagcagaagaagctgttggctgacgatggcgagcaggcagggctctacggggctgatcttgtggtttcataggactgggtccaaccacgtcctcttcatcgttgccgttctctttgacgttgtccagccgacctgccttcctcctcaccttgtttcttccatatcgatcgtctcctcgatcatcttctctcatatcatctccagaatatatccctcgtcgtttctttcccttcggcgtgtctccaccaatctcgccgttcagacgtttccgcgcttttgtccgtggggtccagcctatggcggtctcggtcaagagcgaatcagcatcgtgaacgatggaatgaggcgcagatgtcgaggtagttcggtggggtctgatggacgaatcgggtgaagcatcggaagatgacgggcgggtaggggagagaaggaacgggttcttgggctgaaaacgtcctgaggaacgaggtggagaagtgattgtcggcttggacgccatagtggctaaagaagaagaggaggagatgccggttgatacaagtttctttggtttggaaggtgtggaagggcttgagatcatgtttgtggctggtatattcaaagtagtcgtggacgatgccaaggtcacgctgccagatggagccacagaggagggagtgatagtagaagcattaccagtacctgctggaagcccatcctttctagacttattgtagaccctgtacttctcggctgtacacatcgacagacagtatcgttcagatgggattgttcgagatctagaatgatggcaagccagaattgagaccgactacaacgtacctatctctggatcctgcttgatgtcctccttccttggatctctcccattggatgctttaaacgaacgttcccactgtttgagctcgagtttgacgacctgcaagtctgacattggagacaaatatcttcctatgaatgctctgtctctgatgcagtccggtctgaacaacagatgaaagtgtgatgccttccagaggagtcgtcggtctgttcttgctggatggtcctagttgtttgttcattgacctacacgcgtcactacagatgatgattacataagacaaatgtaataagtaaccctgtccgagcatcctcatccatcctctgcgtgtttccttctctttcggccatcaatctcctaggaatatacacacctacgtctttgactccttgactcaacacctgtaaactatctaaatgagtgggccgcgacgtgtaggaggacggtttgtgacaactgatgaacataccacttgtccgtatgaatttttgtctgctttactctctgtcgtcgcgtctgaatgtctcttttgtcctacgttctcgtatgcatccgttgcattcgttggtttggaatgacttggacataccatagacacccgagcactcgttgctcctgcagccgtttggaaaaaacaatgggtcgtaccgtccggtgagttggcttttgccgccttcacttccatactgtctcacacatattcgcgtctttctgtttggactgacttccaatttcttaatacgcgattgaggacaataggtctaccacaagagtcgaaatacaaagtacgttctgcagagtctcccagatgtatgacaggatttaatacccgatgctatccttgcctgttcataggtcttgaaatgggtcaaagttgacagtaaacaggtgagtttccttcgactttttgtgtctactcacgacacgcttctcaccgttctcatgtcgtcttcatgatctcttcaggatttttccgaggaatcagactcgtctccagagaatggtctgtcgaacgtagaaaacgataaaccaactctcgagcttcctcctgcacctgcactccggtctcacgtgtcatttgccgtagatccaaaaaccgaggtcggggccgaggcggaggatatagagatgttcagcgcggatactaacgcgaactcagctcccatcttgacttcgactatcgtctcagcgtctgctgaagttgtctcgtcagctgatactcctgcctctgtctctgcttccgcttctgtatccactcaagcgccagtcgctctctcatcggatcttagagatgcaacgaagccgtctgtgttagacggattgaatcatcatggatcagatgtcgctcagatagtagagagtgaattgtcaggcatggtggtagatggtattgaggaaggtggcgatggaaagggtgaaggagctcatgccatagcccaagacgaaagtttggaaagttcggacgtggcttctgcgcctttagcaggtgaaacggccgctgctcgtatgccggtggccacgacagctgcatctgcactcgagtctgcacccatacctccgacaacaagtccgagtgcgaccctcaccgccattgagtctacaaccgactcgacggcggttccattgaagcccagcagttcaccgacagacacggcgcttccccccgcgcttccgttatctttgccgatcgcatcaggctcaccgagcgcgcttcggttatctttgccgaccgagccagactcatctagcgcgcttccctcccctcttcctccctcgactcaggctctcacttcatcagacctatcgacaccgcttcagctgactgaagcttcatcttctgtaagcacgccaatctcccgagctaacttggctgaaccttccaacccggcgcccaaaccagacacggcaactgtccttccggggaccggagcaatggatattactgcagctggaacaggagaagacccggtcggtgaaggggcaaggattggaggaggtcacaatacgttggctgatcagccgggcatgaattgaagtgagaaatgggtgacgatgtcttgtatgtgtaacggatgaaacctctttaagcaattcacggctgggaagcggttcttgatcaagccaaaactgtagtcacgcgatgggcaaaaattctgcatgcataaattcaaacttgtttgcacgagagaatttgaaataggtaaacggaaggagaagacttttcgatcacaccggctcaactcaatgttgagtgtgaaatatcggctgaatgcgacgacttaaaaacccgacgaacgtaatagatgggatcgaatcgtttaaattctgtcctttcgccagctctaacttctcttcgcctctactcctctactcctccataccaacttacagattcaagacttgaaaaagaagcagaaagatgatccttccattcgccttcctacttattgcagctagcggaactctagctagtgaacaattcaacccctggctcgaaaaattcggttcagcaggagatctatccttcaccggagttccctctttcgctcatctgccgcacatacggtgcttagaagaagcttctaccgattttgatgtcgctgtgtttgggctgccttttgattcggccgtctcgttcagaccaggtccgtccgttagtttttcataaagaatttctttctcataaaggatcgttgagcctggtttggcttcgctattctgattactgctgatgctgatgctaaatgttggtctcatcacttctctatcaggagctagattcggaccgttcggaatccggtcaggtagtagaagacagcttcctgctagaggatggaatgtggcactaggtacaaatccataccaatctggagcaaagatcgtgcgttgacttgtttcgctgaggatatcatcaccagaagttgcactcttgatctgacgcgttcttagggtctcaatgataaaagttggactgtggagatgcaccaattactccatatgatcctgctctagctattgaacagattgaagctgcttgtgagtatagtcctctcacaaccagtttccacgtttagcgttttgatctcacatcttcatatgatattgtagacacctcactcctacaccaccctactcattcgacgtatttccctcagcttggcgagaagtctaagaagactcacccgaggattgtctcactcggaggagaccacacgatcgtcctgcccattctgaggagtttacactcagtttggggacctatcactgtcatgcaagtttcttcctttttcccaagccattggactacctcatcatgataagtctgaactcaactttattctaattttatttttgaacgaaaaatatgcagtcactttgatgcgcacattgatacgtgagtcttcaatcaattcaccggctttatcattatgagcttgttttcctagctaaccgctcgcttttataccttttcatatgcagctggaacccagtccgatatcctggttcattgacggctcaatctcagatcaatcatggcacgtttgtacgttgctttacccttctctctccttcttgattccatccaagccatctgtcttgacgatatgtctgtctctcttgtatgcgtgtttggtcttatatagttctggaaggcatatgaggaaggactactccgtggaaatagttccatccatgctggagtccggaccagacttaccgtacgtgaatgtatctacattacctctatatctcgctactcagcggacgcaacgcagttatgaaccttgacttactcttccatgcttctttgacatagagcctagcggattatgaggacgatctaactgccggtttcgaattaatccacacattcgacattgatcgatttggagtggaccatatcatcaaaacgattagagatagagtaggaacgacgaaccctgtctatcttagtttcgatatcgacgtgattgatccttctatggctcctgctagtacgtcgatttttctcagcattctcttttcttcggtctctaaaagttgcgcagtctgaagatgtagcggttaaacaatatttctttcttcatatggaaatcagcgggcacaccagaatcaggaggatggactacgagagagatcagaagaattattcacggcctcaaaggtctcaactttgttggattcgagtaagtccccttccttcctcttcctcttctgttcatcttcttcaatatgaatgtacaaatcgtctgactcgctggtttaatgcttcatagtctcgtagaagttagcccaggtaagcccactttaattccttgactccactcaagaatcgcctcaatgctaaaaaaaagcccttttgcttcagcatacgacacaaacgccgaactgacaaacatagcagctgccgatctcatctttgacttcttgtcgatcatgactctgggccaggaagaacttgatctggccaggcaaggtcatggtcaagtcttggcctcggagcaggagctggaggaagggcaaggtgtggtggattttgagacggagcagtacaagttgttcccggatgagatctctctatgatcagatttctttctcaatgggtatttcgtagagatagatggatggagacagatgtgtagatagacggcattttctgtatttgtcatattcattgctgtatttacaaatgtttatgtatgttttgacagaatgcgaggggtcttctgctcctaagacatggtgagagttacctcagccgatggtagttgtaaaaggcccttttagacttggatatcctcagaccacaaatcaccaagattcccatgggttgcggggttagtctgtgccagcctcagcctcggcctcagtgaccagcgtggtagcagtggtgtcaaacaccagcattcttcctccttcgttcttttcctggtgaagggcaaggtgcagcatgttgcgtgacgcgttcacgtctctgttccaccaagtctgagagcatgtatagagcacagtgagcaatcgacacataatcttgaggcacgcaacacacatcactcactcggcagacgctgcgacactccttgatcgcccacgctttgctccttccagagaactcgccatggcactttgagcacaccctcgacatccgaaaatcccggactttgcgaacatggagcagcggagaggccctcagcttggcatacatcatcttgataggaccaggtgcatgcccacgagaagacgacgagaaggcgccgtcgccggaagccaggaaggtgcgtggacgtcctgctgacagacggagcgccaccttgtggtacgcttgttcgcggctgatgtgtgcgccccagcgaagacgtctccaccgtcgagcagcgaagaaggtcgcgagccaagagaaggactgagagtgcgagacgagagcagcgcggagactatcgagactggcagatctgaatcaaggaagatccgaataaagacatcgaagaaggacacgaggtgggcaaggcagtttgcgag

SEQ ID NO: 2429 - DNA, 5112 bp, Xanthophyllomyces dendrorhous
gagagcggcaggagcgagaagagacggagaccatacccccggcgacgagtagtccgtcttgcagccgcatcttgggggccatgttcctcgaagatggtcagcacccggtacagagggcgcagataggaccaccacgaggccttgatggcctcacacgtcagaggcagacctacgaagatgtgatctgtgagaaagtcgaacaacacttggagttgagccttcaccgcccttcgctggcgaggagggagacatttcagaagccagggcggggccgccaaggatgtggcagcttatggtatttcctcctctttctccttgttcttgggcaggggaaggggagaattacgcccagagttgacgagagagggccgtgcactgagaaggatcagccaggtcagtcatcgctatagtctctctttagatacttctctagacatctcggtcaccttcacctgattgacactgatccggctctggatcgcttctctgactctcgtcttcagccaccagaagatcggcctagaacgtcgacgcggtatattgaccacggcgtggctttggcaggccgtgacccaggatatggcctcagcggcgaccatatagttcaggtatctagggtattaacgagtcgatgagtctatgttagcggccagtcctatcgtcgccattgccaaggagatcatctacctcaagctgctgtaatggtttccaacaagggagagaagcgtctcgcatattgttgggctcttggtgccgtgtcgttgtctccttgcgcggatcccgttcaatcttgagcatagtgatcgcctggaagcacacgcgcatcaacgaggaaaggcccggaataggaactccgatagagcagatcgtcaagatgggacgcgtcggacgataacatacatagccgggcaacggcagactcgattgaaccggcaaggggactcaaggagagtagggagccaaagccgatcttcaccgttcgctacaccagagggaccgctgcagcagcccggatcatcaccctcgtcagagggtgatacaagggacagaaatgatttgttctcatttagtgtccaacctgatgacgggctgatatctggtggtggtagtagtagtagttacgaggaaagactttggtggagcctaaaccgttctcttgcgctctatttcgaacacaaaaggagcaagacttctcagtgaccaataagtattctcgtgtggaggggtgttttgatgtggatgattgttctcgtcattccgacttctctgtgtcttgtaggctgacgaggctgacgatggtgacgatggtgacgatggtgacgatgctgacatctgtttggctgcaagataagccgttggatcggttcgactggctgccggtcatgatgaacggcctggtgaaggctctacaatctacagtccacagacgcagacgcagacgcacaaagatatacagacaacgaaacagagagaccaaaacgaaagagaaaggcaagaagacagagaagatggcattgttgtcgaggacgttgattaacacatcctgctttgattcatgtcatatcttcgtacaaaccttctatcagaggttctgtcatcgacatgatttctaagaacacagtcaagaccaatgagagaagaagaagaaaaagataaaggagaagataaaccacgaaaccactctagaccggtccttgaaaaccttgtagagaagaaaaaatccaaaagagatagagagagaaggaagaacaagaacgaaatacaaatcacatatcttcaatgctccacatcttcaagatatcctcctgactcttcttgggaatgggatggcctttgaattctgcgattctctccaccgtcgagtcggccagactaccgtgcgagaaaaatacaccagacgtaaggtgcgcacatatcgggagaagaggagaagaggagaagaggacatgaggacatgctgacaactacaatatggatgtgaccagataagattgaagattacttacaggcctccccagttctccgaggcgcctcctccgatgtccgatcctagttcgacaaaaggaatgataattgggggggttgccgaatagccttggagggcacccatgctatcgttggtagtaagaaacttgaatgggagatcatgatcgactggttgtgagaagaggttgggcaggttgtgaacgtgaccattcaatcgacggagacctcggcgggagagcgagtatgcatgggtagccatcgggcggttggatttgcgaagaccggggtggaaagtgggtttgttcactcgttcatcgccaaggatccaaccaagataactagaaaaaggagagttagaaagaagaattgagaaaaaactcaagtaaatacgtatgcatggtgacagcgactgcaacggtgtccaagacgtacattatatcccagccttcctctgagtcggccaaggagcgagtcatctccttccaccgttcgacaagcgagaactcagcgtcgatgtcgtcctccaggatcagaacatcgtcgtcgtcgttcttgagggcagtgtgccaggtcttgagatgagaaagatagcaagccagaggagcatctagattcagatgagacgccgacaataagggtataaaccggtcagtgcggcggactagagaccctgacatcacaatccaacccagtactcacagggtggccaggctgggaagttaaacatcacatccgggtttgttccctcgacaacaaactctgtatctttgtcgtcaaaagacgagaggacatattctctcctgtttaggcacatgcgcattcggaagcgggcacaccagatgagaaaggtttgtccgtctgagagggaagagatacgaacgcaagaaaccaagaacctaccaggtcttgccaccccagagtctgtccgctatgctcttctccttcgtgaagtcagcgccttccctgattcgatctttcacgacatgttcctcccgcatacggtccataatccagtggacaaccggcgagtctttaaggacggcttcgacataggtaaagttgagctctagagcttgagcgatgagatccatatgctcttttcggtctgcggaaagtgcgaagcaacgatgacttatcaaagaccagtccgaacgcagaatgaacacagatcaaagacagcgagacgtacctgaacgggtagccatgttgatcacatagatattactccatgttgaggcccggtcatggccttggatactctcaatgagttcgtccctgaaggagagttttacgtcttcattcttactgaagaagaaactccatataagaaagaacaagcacacagaaccggccgccacggtagacaaagtcgaagaagggcgcatatctatgaagagacaattctgtgaatcctgatatgcgcagagacaaagaaaagatgaattgatgaggtggaagtaagaagacaataatatggagggcgagcagggaaaaggacgctaccaagactggaatttagagtgtagcccgaggtacccacaaggagaacccacactaggatttcgatagatcaaaagcatgagcctgtgccgatggaggtcccgaactaacaacgttgaaaaacaccggatcttgagttggaacacaacctgaagttgagtggcccgtcactgccgaacaatgctcttcgagtgggtcttgctcgctttggtctcactggcactggttgggagtcgtgatttcagcgcccgtaaaaaatgtgataccattcgaaagggtgaccggatgggtgaagagatggagcgaacaagaattcgagtgccatgagaagtctatacttttgttttcatctcgcatactgccttttctttgtgctctggatgaacgcaatgcgttcagttattcctagacaaaaggaaccattcagttttgtctaaaacgtccgtcgtttgttcaattgttcggttagccgattggttgattagtctgtcccttgggatcttggtcagccagccagtcagtcagtcagtcaaccactctgtgaatgctccgtgtgtcattccagacgttcacataacctctaagactcgatggacaacgtctgtcactgctctcatcagtcgatagagctggcaatatgcttcccaagataccagaatgagggagtcggaccggtccccgaacggcgggggaataaatccggggaaaacggctggaccggccaccccagtgctagggttaatcgcgcggatttaatcaatcaacaccttacggggagccgagacaacgagggcgatatctatttatattattgaaatttatatgctttggcgaatgatatatcaatcaaggcggccgatagatcttttgaatctaagtgccttcagagcacaaaccatcaaggtctcatcacttcaaacacagtttttggctctacctcgagaagcaagagcagctgcgccaatgtcagataccagcgtcctcgcctcctccttctggccaaggggtaggtagggtatgttccgggacgcattagtatctctgttccaacaagttcaagagagagcggagaaaacaatgagcactcgacacactgttatgagacaccaccataagatatataatagacacacaacaaacgcacaatacatgtcacttactcgacaggcgcttcagcactctttgaccgcccacgctgtgcttctccccgagaactcaccatgatacttggagcacaccctcgacgtccgatactcccagactttacggacctggagcagaacggagtccctcagcttgacagacagcatcttcacagagccaggagcatggccacaagaagtcgacgagaaggcgccgtcgccgaaggccaggaaagtacgtggatgtccttccgacaaacgaagagctagcttgtggtacgcttgctcgtggctgttgagtgcaccacatcggagacatctccaagactagtagttctgaatcaaggaagatctgaagcaagagatcgaagcaaaacccgaagtgagagaagcagtttgtacagtcagcttgggcgtgagaagcacttattaccaagagctgttcgcacttctgcatcgttctacatccacagccgctgttttc

SEQ ID NO: 2430 - DNA, 459 bp, Xanthophyllomyces dendrorhous
tggtgacgatggtgacgatgctgacatctgtttggctgcaagataagccgttggatcggttcgactggctgccggtcatgatgaacggcctggtgaaggctctacaatctacagtccacagacgcagacgcagacgcacaaagatatacagacaacgaaacagagagacgacaatacagagagatagaaggatagagagcccaaaataaaccaaacctgaaaaacaaggagacagagaaggtgtgtttgactgagtcacatgcagctgatcttgccggtgttcaccctgactctcagtatcaggtatacaacataaacatcgaagtattcaagtcagccagcggtcttgctgtcgtcctcaatctctgatgtgtatagactaaacttcacacacacacacacacacacacacacacacacacacacacacacacacacacacacacacacacacacaca

SEQ ID NO: 2431 - DNA, 14988 bp, Xanthophyllomyces dendrorhous
cacacacacacacacacttaaatgcttggcttgctaagttttgttcttctttcgtcggatatacttgctcaattctgccaaatgttgtagacagagatgaatataagcataagagtagagatcgttacaaagtatcaggtcttataagtagagtaattaataaaccattggttagcgataagccaaaacttgatagccgtcgatcgtatgctcggtacctccccagccaatcctgagaacccaggaaaagaaacaagaaaagcccaataaagatgtcaaccacgatggtgatgaggaggatgagtgctagacagccaggtccagtgtgtctgaaaagacgtacatgatggcagggttcatatagtgaacttttcctggatgggtgccactgaacattgatcgtaccaaagttgtcaataaagcgtgtaagtagatgcatacatcaagacattctcaccctttcagttgacctggtttcaaagattcggataagtttggggaggacacagagagacggcgagagaagaacaaagaaagacaaatgagttgacactcagcctccggatcctgatctatatgagatcaggcaaggtaaagggatagacaaacctcttcccactccaatccacatcccatccttctctcttccgccttccacaggcctgtattgaacgccctggtcccatatggcgccaaagacattgttatcaatctcgtactcgctgcctgaaggtaccgtcgaccatcgaaccgcattctgatcaccgcatagaatctcgaattcattagaaataaattggagttctctgccggcgtacgagaaggaatgtcgttttccgatatgaggcgcacacttttcacgtagaatcccaacagggttgaattcatcagatatgacatatacaaatatctggcaaagagaaaagatggtattcaccttgccaatttgtagagttccgttatggaaccctcgacaagcatataggatctgattgttgccttctcgctcttcaccaatcggtagcgcatctacagggaatggctcgctcggatccaagtaaacccacctgggagacatggaaagcaattagcgtgaatctctttgctttgaccataggacaaaacaagacttcaagactcagtttagcaagactcgcctcaaggagggatatattgcgcctggaagttggtaatactctattctagcctttgcactcagcagccaagctgctcttccatcctctacattgtctcttcctagaacccttctgtgaacaccctccttcagtctttccaaagcctgatcttcctttgagaaactccaaagcccttttccaggagtcttgaaaacaacttctcccgtcgcttcagagagcaggacattgggttgacgttccaacgaagcctcatggtcctcaagcgattctgtcttgggaggtgatggaatgtggactaaggacggctggaatcgagaaggaagatcatgcgcgctgttgaccatgccccattctggatcttcctcgttctccaggacatggacgctctgaaatgaatcgactttgaaaagaggagaaacaagttgagactgatgagtaggaactccttgatagttgactcctaagtagacccaaggatgaggaagtgcaggctatacatattaagggccaataaaaccagggttagaaaggctgaatgttctgatgagaggaacttggctcaagaaacggacggtttgcggttgaaaacaaggaagaaacacctgggtctgatacagaccgccattgtattccacaactgacagaggaggatactctgttgaaggactgaacgtttgtaccatagatgaaaaacaagatgattgttcgaagatcgatgatgattctcaactgatgatggttcatgaccgatgacgagagtgggggatgtgacctgagtgttacaccccggtaaccttctcctgcttctgttccttctcccgcttcattagttcccatcctttctcattgcatcaacatacagatatatggcattccagcgcagatgcctctagcaccttctatggttcatcctatcatgcataattgtggagtctgaggatgatacataatacgagattactttgtcacccatagcttagtctcccaagtttggattttttgttatctctgatcctttccttgttccctggtcctcgttttcttgtccttgtccttcgtgattccatcaatcctgttttccagttctgagagcctgaacttctcattggaagcctaagagtcttgtgtggctataacctccgtaacctcaccgttaccctcctaacttacatctcagctcatagacccttcactttcgtctcttttttttctctggtttcccacgtatgctgtgtcttatgtatcatgtctcccacgtatcgtatgtgttgtgcaacgtactgcgcgcacattccttccaaagctcataatatctaagaactatgtacaagacgggcatcctcgaccagttgtccatagatagctgaagcctgatttctttattactttctactttctacttttacccttcctcgtccttctgtcctcgtcacctagtgattctgtcaatcctgtttcccttgttctaagcgcctgagcttctttctttgaacctcagattccttctgtggctacttcaattgtagccctcctgttatcagcccagtcctggatcccaacacaaaagggcaccaagtcacgtgagcgcttgctgctccttgcacagctttccaaactatttgctatcaacttcgacatatcctgatatacaacaccaaccatcattctgaacacacatcatagagccatggcagacccaacaacatcgtctcctgaaaaccgtgagaccgctgaccagattgcttccggttctactctttcaccaaatcgacccggcgattcagaatcacacgtccttcgagcacttccggcgtcactccttcccaaatctcactcgaagaagaaaggaccgtcgcctgggatcgtttatatttcgaggctaccaccgggtatgacacctcagaaggtgaagcatcttatgggcagatggggtcaggtcggcaaggtgtttgctcagaaggatgataagagcaaggaagcgaaagggaaatgtgagtgtcatttcatcatgtgtatgcggtgtcactgtttcagcttctgtctttcttctattttggggcaatgtgagactgagatagaatatgttgtatgtgtctggtcatgaacagctcacaacgtgaattattcagaggcctggattgaattccttaataaatcgattgctaagtcggctgccgaaatgctgaatgctcaacctataggtgggaacaaaggcgaaaagtttgtccaccttgtttcatttgtccgagtcacttctatctgtagtgagaaccgggtttaacactcaagctcttttgatcctacctttatcttactcaaggtggagggacgatatatggacgatgaagtatctgcctggattcaagtgggaaatgctaggcgagcagatcggttcgttctttccactcttccgttttcctctctttgttaccccagctcttggcctcaggaaatttctgctaacctcggtcaatgtttcccgtccattcagcctatgaacgtaattctcacaccgctcgacttcgacaagagctttcccggtcgaaagccgagcagaacgagtaccttcgaaacgtcgaccttgcgaaatcccttcagaaacgtaaagaaaagaaggcgctcactctcactggcgaaacagaaggagaaccatcaaccgccggggacgatgtggggaaggcgaagaggacctatgctcagcgaggaagagaggatgaggctggtgagggcgggaaacgtgggagggaaaagaagaggaagacagaagaacagacgaagaagggtgaggcgaaactcagcgatgtattggctagtgtgttttgatcgaaattcaagccttgctctctacgtagatgtcaaagatttccactcattgttatgttctgtgagactgatataatattgagagaagtagagaatgacagaaagtgacacccgagttcgcaaggtttcactgagatattgtatgttcatttcatatcaatccctcattcaagaaaacctctttctcgaaatcccatttacccaacactcctgcccgggggtgttctcccgttcttccaagccacctagcccaccttgttgcgtcttctccccctttgcccctgacaatcccaaaggcatctgtgacctgcttcactacactctcgcacttttctgtacctgctccaccccacatgatcaacacctgagctagcgtagcgagcgcgaaagcttcttccaacttcaaaccttccgcacgacacgtctgaaccaaccgaatcgcgtctagatatgtctctcgaggggacgtggggaacgatttatcaatttgaagcttcagagcctgaattcggcttcgtcgaatatcactttcagatagcgctgatgaaatagtttctgcacccatttcctcctcctgttcggtaaggaagatcgagggacagacgggacagtcgcattcgaagctaaaagacgacaggaggtgttgtttacgatacaaagttggcaggaggagcttagtagatagataagatatagtgatttcctgttggggctcgatgggatgtgtggcgtatacttgaagggttccactcgacgctgagaatgtagcttcagcgttgggagaacaagaatggtttaatcgggaggcgagcggaaagatcccagacctgttgagtttatcgacgagaaaaggatgaattagatcgatagactgaagagctacagcgtttgatgaccggtgtggtctcgcttcggcgtatggtagcaccttcaaagggcactgcagaccttgaagcttttgtgcttggtctcgtgaagagtttcttctcgatcaacgcaagaccacaccaaccatctcatggcatgggtctttctcactcaaacggactcttgatgttttcgacaagttacgagggctgatacgggatcacttactcttgcggtcctgccggcaaaacgtttgtctatttcaagtacttcttgagcactctcggttcacattgcaaggcagacgataaactgggaaaggacataccttgaagattcctacaaacttgtttccacctgctcgacagttactcaattccaagaaaaaacaaagtttctccttcgatagcgatcgaacggccttgaggacatcatcctctgactttgaggcaagcggtagagtgaataaagcgcggtcctcgaacagcagtgtaccaggggggataacttgcgacgatgacgaaaagagagaagctccggaactaggggtatgcttgaggacatataatgaaggcgactgagaagacatgatgtctgtatgagtctagatagtgatgaggttgatggtatcaaacaggatgatgacgatgatgtttgataatttacctactttgacattttcatgacctccaacgctcgctcgctcgccgactaccaccacccttcctttagcaattctctcaacatgaatccaggctcaggatacaggctagtattcagatcgtctggattgcctatccgcacacatctaatactttgctcgaaacgccaagtcggacaccttccggcatcatcattatcgtcgatagagggttggttctcgcactttttctgatgtgtcgacgaaggcaacgatattcatcacttgtttgattttgatcttgtgttttatgactcatactctaggtactacttctacaaataagtcctctccagagtccgccatctccacttcaagcccaacaaataccctgtctgccaaccctttatctcgtgcagatcagctgcccgaagaatcagttaagcgatctcgacgtcacactcgtgactacacccaaaagcaagatgtagagcatccgaaacaatctgaagattcaaagaagaataaacgcgataaacgtcgaggaacgctcactggacatgctcttcggctccgtacaaaaacgcctacttcggagattaagcctttatataatgcaagctcaaaaaacttcttcaactatgtatcggttgcccaataccagcagccaagtccctcgacacgaccttcagtggtccctgatggttcaaccaccgatagccttgattctttgccctggagattggacagagaatctttctcagtcgcagattcacctcggaagaattcgaagagggctgtcgcagattggcccataaagacacacccaggtatctatcgaccgttgaatattgcctacgcgtttcacaacaagccttggcgtttatctctttcggccttcatatcacccaaagaagataatatcccggataactacaaggtcaaacccgaaataggtcgagtgatgatgctttccaatcggtcactctcgtcaaagatgggcgcactccgacattttggatgggaattggttgaaaatcgcacaaagatgcgcaaaacgattgagggtctgacagacccacagaaacaacaatggatggggttgagtgaatcaaggatcaggacattggtcgtacagtggttgtctctcataggacaagatcgaaaggttcgtccaatttttgttttttatttttctagttgttctgtgacttcaaatacaaactgttcagcttggatctattcttgatactctatcagcacgaccctgacgaagtagtcttcgaaggctcgactctagtggttagtctccagacccatgaagctagaaccaaacctgcacctttgaaagccgcgtccgatcagagtccaacgatggccaccaggggcgtgaaacccatcaggtcattgacagcatcctctgccgaaatatctgaatctccgaaccctttccccgatcgtactccggggataacaccaagcgatatagctctcgcctggagtattgaggcattcatgaaggatctaggagcgttgggatccaagccccccgcaaggctacagacacaacctttcgaatggacagaatgaaaccttggctttttccagaacgaaacctttagctggtgccgacggacatgacacacatgaatttcccttgttgtgaatacttgcgtaatctctacatgtcttgattgcaaacaaaacagaatagtatctggaaggaatcgagatagaaatacagtgatacacgaataatatatgtaaagaggtttgacgattgaccaaagaaacgtagcagagatcaagacatcgaacgatgcgctggagagttttgctctgaaagggttctatttctttctcgatcggtaaaacgaaagagctttctcaaccgattccacagtcggagtaagagcctggaaatatatggcgggaaacaactgagtgaatcacaacctttacgaacgggacaggatacgacgatacgaatttacataccaatcggacctttgtaccttcctctcctgcttcgatgaccaaagcctgaactcgttcctcaacctcgcccaaccatttgatcatctttatgactttggcttgtttctctgctggagtcttggttgaacctattcttccaccgccgtgcccttgtccaggacctgaggagttggcaagataagaggaggaaggtgggggagggagaatggcctgccagaactgacgaagaaactcgttgattgttgaatgaaaagtcgtcgttttcttgaggagtataggagggatatcgtcttttgaaaccaagtcgtggggatgttagtacagggatctatataaagtaagaggacgaagaaactgtggatcgtatgctgagtagagactgactctttttggatttggactcgactcgagctcgtacacttgacgtcaagcccaacatgacttcctccgccgctttcttttcaaggcgcatctacagaatgatcaagataaatttgtcagagccgaggaacaacagctaatgtagatgatgcgcgctagaaagcgattgatgaacaaaccccatccagacacggctgccagcctctgaaccgacttcgcattgcgttcatgatatccgatacctcctgttgttatcggaaaagaaaacaggaaggtaaaacgggtcacccaattgcgtcatgagtgaacagcactagcgcgaagtagatggaacgaacctcctcgcctctaacggctttgccatctacggtaccatcctctccgaccactccagtcgatcggccctcaaagtatttctgccgatcctgcatcgccagatcgagatgtatctcagtagagggtgtgttcgtgtgaagatcgtccaggtcgagttcggcatatcgatcctgagcgatcaacagatcacgtacaagtacaagatgatttcagaaagatcagacgatcagtcttgttgttgctttctcgcgtgatatgacagacggaaacgagtgatagacatgaatggttggctaaccttgtctttgttattgacgtttgaatcgtctagtcggggtcgcttaccagaaggttcttctgatttgattccatcgttgattctgtatagagattaccgtacgcgtcagcacatcgaagaagcatgaccgaagcatgatatgtgcagtctcaatatagatctgattcaacaaaatatgaggaaaccccgattaaacagaaaggactgacccattatcgatcgccttcaagagtttctccgagtgctcattaaacctcctcataaggggcagggagcttcgttgttttcctgcctgcattgtgatgtctctagcatttcctgactgtattggagaagtccggaaggaatcaacatagaactcaacaatcaaggtcttggggggaaaagaaagaaaaggacacaagaaggaaagtaatcacctcgccgtgatcttcttctgtggctgctagatcgagaaagcggttcttgacagctccaggtacgtgtcgaggagtgatatctatgatagacacatgtgttgtttccgaggtcagtgtatgtaaatcaacccaatcaagtaggcaagacgaaccatcatcaggatcttcgagatatttatcaaacatcgcgtccggtttagcagtgccttgtttggagcttcgaacggacgctctgtgtctttcccagagtctggaattgaagtatctcgaccagaactgtgtctcgttgactttctaagaaaatgaacaattgattcagacatcaacatgctgtcaatacctccgtttctttggcgagtacgaaggaaaactgcacacacctttggcacgttctccttgtgagctttcatcacctcagggaactcatcaaagatatctctgatgagatctggagtgagagagatcgtgcctgcgcttgagctgccggcgccttgcttgcctttgcctttggcgtctttggcagaccaacgatcgtcgatcaattgcgaggaccgaccggctgattgagtagaggatttcgattctgacagaaggagcaactgcatggttggaaaattcaagagtaaagtacggtcagatgatggggcacgacaaacatcaaatgatgcgatgcacatgtgagagaaaaatggaaaggggccaacctctctgccttcccagaactcggcatcactcagttggccggtctggacgagctcgtagtgcaaggcggccaactgaggattcttgaccagaaccttcttatgcagatcccagtccgtcagcacatctggtgtttctgatttcacagtcgagtacaaactggccgagaatccgttcggcttgggtttgttttttggaacggatgatgggagggctgaaggacttgctttggcagctccattgtcggtgacggaggaggatgccaaagcagatgttcccacagcggcagaagtagccgagccgttcgaaacaggaggctgggccgctttattgagggctgcgattcctgctagatgagctttgagagtcattgcatcggcaggtgcggtgacgggatgggtgaagacaaacgtcagagcagaatgggaggacgacgggttgaacgtgatcttgaggttgtgcttccccgaggcgggcggagacgagaaaagagctatcgaaccggagagacagagagaccatatcaacatagataggtcgacaaagaaagatccatcagcccatgttgagtaaaacacacggcacccatcgagaagagaaacaggaagaacgataccttcaatcttgtcgagtgattcttggatcgttccatccgtccgttctgtcggtctccatgagacaaacgttgcggtcacagaaagaacgcctggctctttcttgtgtgatgcctgtgcgaacagatgagccgagtctgatgccatctatacgatcaagcggcctcctcgaccacgatggttggatgatggtgttggagaagaacaggcgaaattaaaaccctagactttttgccttttgaccatcaccatcgaccgaggtttcctcatcttccatcttgtatccacccggtcagacctacgttcagaagctcatagatacgaatccgcacgctcacagtcatggcccgctctcgctctccagaaccgtcgtcttcttcgtcgaaaagaagtaagcactcgtcctccagctctcgtcgagatcacgccgacaggtctccctcacctgtaggtcatttgtctcgaagacacgacgacgagtattctcatcatcgagacaggtccagtcgtgatggagactacgaccgaaaacgtgaacgcgaacgcgaaagggactactccagacgggatggaggagatagagacagagatagggatagagaacgggaacgagagagggagagggacaaggcataccgaaggggggatagagaaagagagcccaggaagtcttcttatcgatcccctccgccaccttccagtacttctacatcctatccttcctatccttcgtcctcctcatctgcataccccaaaccgtccaccctgtcgagacagccagttccaaccgaccaatctcctaggtcttcttccgaatatgcaccctcgacgcgtcttccttcggtggcatcgatacctgcttcctctcatttaccattacctccgcctcctgttccaaccccggttttggctcctgtttccgctccgacaacagctgctcccaagcttacagcagaagaagaaaagatcaaagccaagaaagagagattggccgcctggaaggccaagcaaggtctgtccagtgcatcccctgctccaaacgggggagcctccccgggccttggttctgccaaggtatctccctcacctcagtctacaagtataggtctccccctcaagaaggcaaacaacgagagagctgggttctccttctcgtcgtctgccggttcttccttgtcttcctcagctgcattgactcgaatcggtcttcccttgaaaccgtccgcactcgctagaggatccaacctcaaccaatcttcttcaggctctatagtagccaacggtggccgaggcgctgtcgggttagacgactcggccgcccctgtgagaaagttcgagaagctagaagacttgccagaggtcgacaagacatatgtccatgtggaggatgacgacgaagaactggactaccagccagtcgccagtgtcaaaggtggggagagggaagttatctcggccacatctggcggagggagcgcacagaccaactcgggagcagaagcaatggacgtcgattccgagtctgtctcggatagtaggaaggtggatgagccaatgaaggacaaaaaggccgacgaggaagaggaggaagaggatcctttggaggcgtacatgcggggagtcacacaggagaggaccaaagttgatatggaagacaaaagccgaatgaaagggaacggagcgaaaccgaagcctcgggcactaggaatcgatggagaggaggacggactgggaagcgaggatgaggaagagcaaaagcctaaagagggagatctccctctcacagccgaagatatcatggcgtaagtccatctgagctttctcctagcattcgttcactatgttttgcatgtttcacctcttcctttctgttcactgatccattcaataattcttgtacaactttcgcccttctaggttggctgctaagcgcaatagacgtaaagatctaccaacagtcgaccatcaaaaaatcacgtatgagccattccggaaagcattctacaccgctccatatgaaatatctgaaatgaccgaagaggaggtcgacctgatgaggctcgagatggatggtatcaagatcagaggagtggactgtccgagaccagtcaagcgatggggagccttcggtctacccggaggatggttcgtatcctctttttcttggtcgtaactgtgttgtctctgtatgtcatagtgcagtcgattaacaactctctctgtacgcttattttgactcctttttcctgtggcccttagtttggaagtcatcaaacgactaggctatagctctccgactgctattcaagcgcaagccatcccatccataatgtctggtcgagatgtaatcggagtcgccaagactggatccggaaagaccattgctttcctcttgcctcttttgagacacatcaaagatcagaggcctcttgaatctggagaaggacccatggcggtcatcatgactccgaccagagagttagctttgcagatcgttagggagtgtaagccgtttgcaaaagtcttgggtattactgtacgtttttattctctcgtctctatgcattcaacctttttgtcgttgtcttaccggtgtacatatcttgctgaacaggccatgtgcgcatacggagggtctccgatctcggagcaaatcgccgagttgaaaaagggagcggagatcgtggtctgcacccctggtcgaatgattgacctcttaacggccaactctggaagagttacaaacctaaaacgagtgacgtacatggtgctggatgaggctgatcgtatgtttgatatgggtttcgagcctcaggtgagggttccatcttttcattttgttgttttatcagagacgctttcatcaacctgtgaggaggaaaaagaaacgtaatctcaataagcatgtttctattgaacatttccaggtaatgaaaatcatcaacaacgttcgaccggaccgacaagtcgtcttgttctctgcgacgttccccaaacagatggacgggctggcgcgaaagatccttcagaagcctcttgaggtgacagtgggcggtcggtcggttgtcgccaaagagatcactcaggttgtcgaagttcgaacggaggacacaaagttccatcggttgcttgagctattgggtgaaacctatcagactgaagaagacctggacaccaagcgaacgttgatctttgtggaacgacaagaatccgcggataatctgttactcgagcttcatcaacgagcgtaccgacgggcgaactctcttcacggtggaaaagaacaagtcgacagagaccagacgatcacccatttcaaatctggtgtgatccccatcgtgatcgccacgtctgtcgctgccagaggattagatatcaagcaattggtgttggtcatcaactatgatgtcccgaatcacatggaggactatgttcatcgagcgggtcgaacgggacgggcaggaaacaagggaacgtgtgtgacgtttatcacgcctgatcaggaaaagtactctgtagacatatgcagagctgtggaggccagtggagtgactgctccggaagagttaaaagcgatgtccgaaggtgagtcgggctttctttgggggtttccttttctctggtgtttttgatgttccgttgttgtgagcatgaacgttattgactctctggccctttcttttcttctcttcttttttcctctcctaggcttcctggccaaagtccgatcgggagctgccaagtcacacaccaacaccggtttcggaggtaaaggacttgaccgattcgaatccgagcgagaagctaaagaaaaggccgaacgttcggcatttggcgagaaggacgagagcaaggcaaaggacgaagagggtggaaaggacgagaagggtgaacctgtggcgaaagacgaaaagacgatcctgcctggcttcaaggtggacatcgtcaagggaccagcgcccgaacgtgttggctcggctgctgctgccgctagagccagaccggctgcccctgtggcgccacccgctctgcaagtatctggaccgaacaaggaaggtctcaccaaagtccaggcggcgctcgaaaagatcaacgcggaattggcggcaaagaaaaaggcgatggccaccgctgccgctgcggcttcttcgacaaacagtcaaccctccggaggggacaccaaaggacagatctcgacagagaggaaaccgaaagacccggacgcgacagatttccacgcggtcgtccagatcaacgatttcgttcagaaagctcgatggatggttaccaaccgagagtcgtatgtccccccctccacccctttccttccctttttctttttttttcacagggattgcctttctctcgcatcctgactttcatccggacaataactgattgactgactgtgtttgatttcgtctcttcccatttcttttgttcttccacctcatgcaccactcttgtcaggatgacgaaactgatcgacttgacaggttgcgcgatcaccaaccgaggaatctactacgaaccaaccaaagagccacccccggggggcgagccaaagctctcgttgttggtcgagtcgaacgacgaatggagggtcgagctggccgtcaaggagatcaccaggttgttggtcgaaggtaccatccagggcctcgcgcaggaacagagaaacgcggcggctgccggggggaggtatactgtcgtctaaggtccgcgcgaagagatcggccacggggagggggtg

SEQ ID NO: 2432 - DNA, 20570 bp, Xanthophyllomyces dendrorhous
tttctttcctcttgctttcttcgtcggtgcttacccttcacttgttagtttgaacgatatgatgggtctttctgttcagtccggtctttttgcctacgatgtgaatctgatcaaccagaaaaggcgactgactggacacgtgaacgttttggagaaacagggttcgatcgattgagtctccgaaaaagaaaaagaaaagcaagagaaagagagttgcaaagttgaagagaataaacgaggagggtgacaagagggtatagagactctataggtgacggaaacataggaaaggagacgctcgttgtatatttcgttgtgttgttgctattcgatcggagaacatctagagagagaaagaaacagaagagaaagggggagggggcaataaatttgaagaaaaggaaagaatggaaaagaggaagaaataaaaactgaaagcatcaaggataaaaggcgaaaagtctacgaccagacgtccatcaacaatctagatcgttctttgagcgacttgacttcagcggctccttcgaccgctgccgacccgttctttgactcggccaacatggcagccaacttttgttccacatccttcgacatatttcgcccatcaccacaaatatacacgctcgctcgtttctcgacgatcgcgctcttgatcacctctttttggtcccacaaaagatcctgaacgtagatcttcgagccgtctggctttcgagggccggatcgagaaaaggcgacgtggatcttgaattttccttggagctccgcctcgtacgctggccattcctccgcgtagaggaaatcttgctcgtctcgggaaccgtagaacagatagatcggtgcccaatcggcgagcgcgtctggcccgttcttggcgatcgaccgtctggccagggcgattcgctcttgaatgaatcctctgaacggggcgactccggtaccgggaccgatcatgatgaccgggatctttggcgaggtgggcaacctaaaggtagatcgtctgacgtgaatagggactttgaacagttggtcgtcgtgcttgtaggaacctctcggaccttcgagtgtatactttggggcggacacgtgttccggtacatcgtcctgtccgtcgctaatcattggggtggtctcgttgttggcggcctgcttgacgttcaacaggtagtttgtgcccaatccgaagacccacctggccgggtgtcggtcagtcgcctgtgattcatacttgaggatgacggcggtaacgtggatggagtttgggtgaagtttcggagaagacgagatcgagtaaaacctcggctgaagtctggaaacgtcagagacgacgtggtcaaacggaatattccacaccgtggtgttctcggccgtgggcatgacggtgatatcgttccccgcggccaactggagaacctcggctagtcgaagatggccgccgacgacctcggtgtggtaggcctgcttgtcagttccgagtcgagtgaggaactcggcagcctgctcggacggagcgtactttgcgagcaccgcgagtgtctgccttgacgccacggcagatatgtcgaggtagtgtctgaaaacggcgtcgtacgtggtcggggtcgggaaaggcaccttggccaacgtcggatcgagcgagacgacctggatgatcatgcgccgtttctctggagaagtgagaccgaggacggccaacagccgctcgacctcgacatcagggttggaaggccagactgcgacgtgatcgccggtctggtaagtgattccggaaccggtgatgtcgaactcgagatgaatgcagtttcggtcgccgccggtgaagagttctctgcaggcaagtaccggggaggcgtacgggttcttcgcgtcatgcacacctttgctgccgaggagcgctctggaggagagctcgccctggaagactttctcgatcgggtggttaggaacctcggttacgacaaagtcaggggtctcgcccgaagcgccttcctcaaacgagagcgtggtcgccagggcggcgaacatgtcgtccttccaagcgaggtagtcttcttccattgacttgtcatcgtctccttcaccccgttcgccgactcgggtggcacccagggcggtcagccgggcgtcaagctgtctaccgacgacgttgtactgctcgtagctgtgcagcgtatgagcgtgggtatgggtatgggtatgggtgtaggaaggcggatatttgagcatatggagtttacataggatagtgtaacgatgaggagaggaaggaaagagaaaagaagcaaacaaagaaagatactcacgtcttgtttcccaggccaaacacaacatacttgaggccatcgagagtagacccttctgaaaactctggatcatcctggctgatcatctcgataaactggacggcgttgtccgtgggttcaccctcgccgtaggtggccatgcagaacacgatcgcacagtcttctgggacctggtcgagcttttcaaagtcatactcttcgatgtcgcacacgagggacgagactccgaaccgggacttggcctctttggcgatccgggtggcatattcttcggccgtgcccgtctgggagccgtaaaacacggccaatcgttttttcttttatcgtgatgaagggataaggaaggggagaggagagacgacgacgacaacaacaaagggttagtatagtgcataaggtgatcgagggtggacagagcgttggccatggcaagcgggactcgttggggattggtgggaggagagaaaaaagaagggcccgtgcacagaggagaggacgcggcctgtgcgcaagagaacagagtgggaaagaagaaaagaagaaaaagggacgatacctgatctttcattcgcgcgacaaaatctctgggatcgcctttgaaggcgttgccgttcccgctagaatctgtgggcttggatccattggcggtggctgccgaggagcctgaggtggtggaggccgaagaggaagaggatcccaacagtcgatccttgttatagaatccaagggcgaggagagcaccgaggaggaggatgacaagatcggagagtgtggccattttaattggatactgaaggagggttctgctgactgtacagggtcctgactgacctgagtgaggagataaagggagatggacgagagagacgagagaggatgatgatgataatgaagaagaagaaaaagattaaaggaaaaaaaaagaattaaataaaaaaagaaaacaaaagaaggactgggaaagttagagggtttgttgcctagtgggctttgtgttaagggttgtgttaagtgttgtgtgaaagattgatgaatgttttttgatagttttctcgatcgaacgactttgtatcttcccggtcactctatctgattagacggtggctggtggaagtcacgtgagcgtaattttggctacaaaaccccaagttctggttacgcatcgccggtaactacggaccccggagcgatcaacagacacgcagacagactgattgatagctcgaccgatagacacataggtgatgcataggtgatagatagatgatacattactgataggtagagatatctatctacgtcatcatgtctacgcctaatctaaccctaaccgcgttcaatcgaccatccaaccaactacctgtgctatctcttcacttatagtcgcgcttgttcgagcaacaagtattcccccgtcagaacagggcatactgtgccttgggtctgtataagtattcatctatctgtctaaccatctgtatatgtatctacgtatgtatccgcacaagcatgtattcattcatctatcagcttatataatctttccaaaccctctatattcatctatttacttacacagctatctacatattcacctatatttcatctacctgtccgtctacctaagtacccatcgtcactcgtcaccggtccctcaaccttctccatctttctctcgaatcctctcttcagcgctctctggtgtactctccgtcgtgtctggtcgtcgcacatctcttgcgcgttggtgatcttgtcagctgcaagaccgcacacctacacgccgcgccaatggggaaaaggtcatcgtatccgttaccttcgccgtcaccctcgccgtcaccatcaccctacagatcaccctcaccaccgacctcgttctttccctctttctcctcaaacatctcctctcatcccaacgagccagatcgagctctcctgttctctcaacagccatcttcgcctgctccgaatccacattcgaatcttccacttccatctataagccctgccgtcagatctcgctcctcttcagatgcctcacacagctcactatcctaccggcctggctcgacctttcccagtcgacctccggtctcccagtcacactcggcacgcaccattcgccagagaccgtccgtttcggcttcttcgaatgtcgaatcgagccaaagttctggctcgagtcaaagcccaatcaacattcctgtagccctcgcccacacgcttactcctagaacatccttctcgtcaacctcacttgagaccctaccaaactctcttccaggccggactctcaggactgcctctccagattctagttcttcgtccttgtcgtctccaccagatgaccacagggcgcctcccgccgcatactcctctctcccaccctcccctactaggagttttgccgacctagacgaatctccccggaaactagacactctggatctcagcatcctccaaaggaggttctccactcagcccaccctggttcacgaccatgataccatccaggaccagaaccaggaccaggatcaacctcacgaggacgccgagctcgcgccagatgacacactcgagcatcaaccagtccaccaagagccacagccaaaggccagtctgtgggaacatctccaggaagagatctgggcaaacgactatgaaagcagtcaagagttgaaatgtctgtcttcctatccctatccactgtctcttaaagcgttttttgacacccaaagtctttcctttctctctccattctgccctcggctgactcgaggtgccgctctctctttctcattcacttggtttctttacgtgcgcgccgtcgaccgcaaggggaacgagtgtccaactttatccaagtccctcttgctatcgaaaaggtaccatatcgcatgtacagatcatgttcttcttacttcttactaatcaaaccccatcattttctttcttcggtctcatctcagttgatcacattcggatcactcgtctgcctcgattcgtttctctacgtgtttaccatcctacccatcagatcttttatcgcgctctgcgtcctgctcgaaaactactggagcgcgcttgtcaaaaggaagccacgtcggtgcggcccaatcgtctttgtcgttttccttccccttctcctcgctcgagtaaataactttaactaactttactcttcttttgggtcacatatttcccttctttcctccctcaagccatctggctcctacccagcggattgacatcatcaagtttctccttgtcttgtttagttgtgtcatcctcatctggggaactgacgcaagttatatctaccattctattagagggttcgtcaataatgtttcgacagaaaccaagctcggcagaatcctttctcacattctcagttgactcaaatccgacacatacaaaacagacaagatagcatcaagctggtcgtcatctttggagcgttcgaagtatgttccatcgatcgatctttttcggcgacgcgctatccttatattcatctctcttttcgtcgtttcttcctactctgtcgcccctcagatcgcagataagttgtgctgtgcattcggtcaagacgtccttgactcgcttttcgcaagggaaactctgtcaaggcggccaaatggctcccaacctcattttagaccagtctttttcttttgcttgagtcttggatgcgtcggtgaggcctaaattgtttatagcctcgttacgatacaaggagggtaccacaacgctcataggacgcttttttctttctcgcatagtggcccacaccttggtctttcttttccagttgatctcgctcaacgtggctattaactctttcgacaacgctctcctcaccttgctcgtctcgaaccagtttgtcgagatcaagggctgtcagtgtttttccgattcttttcatctcctttaggtttttttcttgtcaaacaaactctaactatcttctcgtccttctgattcttcttcaatagctgtgtttaaaaagtttgagaaagaaaacttgtttcagattgcttgcgcaggttcgtccgtgtctcctgttctcgaccagaccagttcgcacctatccattcacacctaccctgactttcaacttctacttctccctatcgcccgtaacttcagatatcgtcgaacgttttcagctcggtctgatgctcgccattatcgccttccgaaatctagtcgaactgagtggttcagatttttcaagcttacccaggagctttatgaaaggtgctagccatgtggaagctatcctttcggtcagtcttttctttctttctgacatgtttctctctctttttatttttcgatatgacggtcctgaagagtgtattgatcgcctcgttcatctcgtgctgctatccttgaatagccggccttggttgtcttgggctcggagatggtagtagattggttaaaacacgcatagtaagttgcctacttttttcttcttaccttttcttgtggatctctccagatgttcatccggtctactctgtaccatcatcgactcggtcatcagtatcacaaagttcaagtaagatccaaaatcttgttccatgtgacgtttgacatgccccactggaaagccgttctctgacatatcgctcgcgatcctagtcatatccgggtctcaacgtacgagcgatttgccgatgtgctctgtagggatcttgtcaccgccggaattggaggcttgcctagtggtaaaaaggtaaagaggttctctcctctctgctagcttttctctttggatcacgttcaaagattgacgttgcgtcttgcgatttcatacgtcctcttcctctctccgttctcgtgccgttgtagcatgcgctggccgatcaatcacctctcgtgtcgcgtcggctgggctttgcgtctctcccactggcatgtcttgtcattcgcatagcctttcaagcgcttggaatggcatcccgtcacaaagagttgacagtcagctcggccttcctgcacggaatctccacagccgaaggggacggatcgaccgaggagccgttctgggagtcggatgctgtgctatggctgggaatcggtttcgggatgttcatcttttggatctggtccgtctttcttcattttcgtgtctctgctatctcggatccgtctttcggtcggagtccggtctgatatgatcgtctttcttgtttttcttgtttcgattttcgtttcttctttctcgaaaaaaataaaaaatgcagtctggtcgtcctgaagatcattttaggaataaatcttttaaagtacgcttcaagaaggttcgtaggtatggaatctagacgagagcaggatgacgagttgaacaggttgggaaggtctcctttaggtgaaggtgctcaggaaaaggtgctctctttactttctttctttctctgttttggtttcatgatcctccttcggaattaataacaaaatactgacagacagtctctcccacctgaatttaaatacatgaatgaattttttctttaaaaaacaaacaaacaaacgacagagctacaacaaagaactttcaagtctgcttcgacaaaatagagacgacctaccgctcctcgccgacctaccccggaacgctacccctttcccttcctcctcttctttctccacgaccgaacgatcctttactccaggcgacgcggaatcaccagcaggtccaggtgcgagatcgacagcttcgggatcaacaccaggagcaggaagcagtacaggagggaagaaaaagggatatcagctcgaagaagtcactaggtacactatggtcaaacggatcttttaaaagaaacaacccttccaaagtgtcctctcttcaatcttcaccctttctttctctcttgcttcgcttcttctttccgcttgtacgcgtgatgcttgggcaatgcacaacttttttttcttagacggcaagaacagtggtccattcatcttttgaatatacacctgatgatttaaatgattattaaaaaggaaaaaattagaaaggaatagcagaaggaccatatttgagggcctagaaaaggatgacggagcccgatttagaaaagaatccagtggcggctacaataccgagtgaggaatagaacgaattaataggagcaaagaatctcgggcagaaatagggtatgatccgtgacaaggaaagagagattggatgtatgctaggagtgaaaggaaatgaaaagaaaaaaacaacaacaacaacaaaaaaacaaaccaagaatctttgtgtattgagagagtttggatagggggattatgcgatattggggacgttaaaggaaacgttgaaagaaaatagaaagataaagacgaaaaagggggtggaagtagggaaaaaaagaacgagagacaggagaggatgagaatcgtggatatatccccttccaaaacgactcgatagcccccatcaaattatcgcatatttccgtgtgagtgcgcactcgagtgaggattaggaggcaaagggatcaaaggcggtgggaatggactgggtcctccagatgagaatgactggtacgaaagtctgttaccctgcgcttggaccggttgttgattctgggcgtgatgaggcagatgacccggaggtacgtacggtgacagttgctgagcatggtgaggaggtgcggtagggaagggctgttgggcaggcagaggaagctgaagctgttgggatagacgttcagagtgtttgactttgattgcaaacaattcggcgatcctgtttggagacgagtcgaaagattcatcccaagttccagattaatctgcacattcgtatcgcaagagaatacgagaagaaaaagggacgcactgtgactcgagcaactttttctcctccctcattcttccaagatcagtcatcgatcttccgacctcctgagaaagcagcttcttgaactcttccagatgttgagtcacattaactgatgtcgcctgggacatcgcgtccacaaaccggattctctcgccttgaatttcccctttgagctctatttgttgaattgtgtttcatgttttcgttcgtgcaaagaacgcagtgaccgaaagaaaaagatgagtttcacagtgataacacatcagcatagtgataaagcacagaccttgacggatggcctgaagcatgttataattctcggcgcgctgccgctcaagcagttccatcacagactcgatagctacatcattttaaaacgagaaaagagtaagtctttagcccaatttgactaaatcgaagatctgttcgaaagcaacgaaggcaaaacaagaataatgaaagcgcaccaggtcgttctttctcgataccctgttgacgatgttccaacgacgccaacaaaccctcgatcctttgatggtcgatcccgcctccattcaaacctctggactgttgttcgaccaacaaggcgtgcatctctccgaccatgcctaacagaccgggagggtgaaaatcttgtccgatctgaggagacggtagaggtggtggagaaatgacgtccgatagatggtcgactttgtaggacactgcgtcgagggctttgtttccacttttgggttgtcggcagcgaacagaagagcggttagtggtttatgtgcaaacaaggcgacatacgttaaattggacaatatacatactttcggacaaactgctccatccaaccattgagttcattgagatctgaagaagatccccaacccagccaatattaaaacattagccgatagatacttcctcaaggagaatcatcttgacttacaccgagcgatatcacttgtctgttgggactgagcacctctttgcgcctgctgctctcttaggagatccagagcttccagtagctgacggaaagagaaaaaaataagtcgtcaaatggtgttcgatcaatggcgacgataaatctcgagtgtacggacctctggtggagggatgaaagaggaagtgcctggggccgctgatcgtgtggagatctctttgcgatctttcttttgggtgcaaaaatcgcgcaagcaggacgttaacatcaacgacttgctgaggaatgcagagaataccaaaactcacttccgagcccatgtctgatccagcgttctccggagactccatgtcagctagcgcttctagttgatcaccagccgcgctcgatggaggtctcacaggctttggcccatgaatatagatcccgttaggcgatgttgtccttatgagaggcggtccttgggatggaggcggagatggtgaggaggaggacgttgataatgagatatcaaccggtttcggattggtagcagaaggagcatacgaatttgctcccatcaagagttgttcgcacatgctaagaattgactcgagcttctttccgtgtgagtcattcagtgtcgatgtttcaagggcaggaggcgcagggacaggtggaagttgtcgggataaatcttctgcttgtttcaattcgaggcattccttgaggtcggttcctatcactgctagggtggtggtaagatgattcaactgcgaagattgaatttgggaggtttctcctgaggaagcaacctgctctaatagtttggagacgtccagttgaatggccgaaagcctctcatcgtgtttctccgccctacgagacgaatgttgttcgttgttctccaaaagttcgacaattctggccgagttgtagtcaggtgtttgaagggaaaacgaatcaggtcggacggccgaacgagctggaggaatctctaaagagtcacccaagtccattttgggcgatttcacatctaactgcttatctccgcggtcttcgaaagttgattttgttcgattcaggtttgatgaaatttcagcgtcagtagatccatcacggataagcgtttcgcttcgtaccccatcaggcgctgtgtaggatattgacaatgattgaggcgcaagctttcccccgttttgaacgcttggtagagcagggttgttggaaaatgaatttttgaagcggtctgaagcgactgttcctacaggtgatcctgatcttgcgctcttttctagattctcgagcgagccaatcaacgctctcacgcccccggatccttccttctgcctaaaactctcaagggccagagagggagggctcatcaaactgctccgattggaactcataacttcaaccaattcctctaccgcttccctcctcaatggtttgtcttccatcccgctaagctcaaacatattttccacgctccatcgaaggtcttcgatgctacctctcccaagtttcccatccccagacaattgaagtctgggtggtgcagaactgatgggtgactgagacggaagagaagagagcatatatggtaacgtcacggatccatctggagagtttgcatttgaacgataaattggcccttcctcgtgattggatattgaaatcgtggcagtatcatggatgctgataggaggggtcgttagaatagaactctgaggagaatcagctctgttgaggtcatctaacgccagaggttgagtagtggggggtgcgtgacagctgatacctgattgaggcgctggtgtagattgttcaccagtgaaaatcgcatccctgcagtttgttcaaatcccagatgatagggcagatgatcaagatgttatcagtttgagaaagatacagctgcttggaggaggatgtgcaatagaaactgaccagaacgagctaacccatcctaacctctctccaatcgttccaacagcgaccaccacgacacctgcgccgtgcttgagatcgatttctaggtagtgcgtatcctcttcatcctcatttcctgtcgggcagggccacttttctctggcctctcgctccggaacagtcctgaccgaggcatccttggagagcgcacaggaccaacttgtaaaatcgcctcggagagtagacgtcgacagctgaagcttgccaggataaagtgtacagttcgttcggacccagtggggtggagaagacgtttgagaaaagtaaaagagagaaccagatcgaagagacaaggattcgacggatgtgctgtttgcaaagtggacattagaaagattctaaaaaaattggcaacgcaaataccacatgaacaatcttactatcaatacctagaacaagacgaaaaatcgctaaagttcggagaagagcacttacatctagactgcctgccagagaaagcgaattttcactttgataactatgtctctgtccgaacgacacgtttaatcctttaccctctcccatcccactcatcgctgcaaatgcctcttcgagatcctcctcatccattgtattatcgcctctggtcgtaacggtatcattttgaccattgtcggaagcggcaggcaaattccaaagtgtctgccttcttaggtcttcctcaggcgcaatctcttggttggctcctactacctgaaccggagcagagatctctttccgaccccataggacctgcccattagcatcagcatcttgcatcatctctgcatcgatcgcactctcctttcgaccgccgaacttgccacaaagctttttaaacccatctcgaagtggggatcgacgttctttggttgaaggtgtggtagcgtccggccggccgggtgtgcgcggaggtcgaggggcagacactggttgatttggtgagatcggagggagaggcttatccagattgaagcgggaggcggacgtaggagtgtgcttggtaggtgagtgtggagactgtggctggtggccgtacgggtgagagggtttgcttcgagtgggcgtggaaggtgcaaaatcgaactttgtcgctgatgcaggcggtctggtctctgagcagggctggggaagcggtctgttggaggatgctttagttggggtcaaatcaagtcggtaaggggccggagaggtagagtaatctcggatgggagacgaaggaaaggattcagccggatgtctggccggtctgattggagatgtgcctattcgagtaggagtgtttgtcgagagagacatgttgttcatcggagggagatctcgatccatgttggaagcgttcccaattttgagaggagatgtctgttggttataatctactccagtcatcttctccttcccttttcccggagataaccaagtcggaccagcactagattcttccttgtgttcaaacatgttcgcccgttgacgcatgcttcctggtctaggactattcgttgcagactttgtggacgaactgaagattccttcctcgtcctcttccaacataggagagaacacccctgatttcttgacgtgactggccacgacgactttccttcgagttcccttgacgggcgaaattgtagaaggcgaggaaggagatgttatttggccgttggccgagttcgaggaggaaccgatggcaccgggagaatcaagaagagtaggaggaatcggacgagaagagttgagaggttgagataagattgatctgcctttaggccgtccaccaacaatcgacatgacgacagaacgtatcgatcggctgctggatgggtatagatggaatggtagggtaaggtaaaaacgatctataagaaagaggaagctaaggaggggaaatcaaagaagatgaatgttgactgggtatgattgagaggaatgaatttcacagaaggaagagccgagagttcgtcaatacaccaagcagcccatggatccacaaccgaagatcaacaaaccacaggcaagtctaaagatccctcaagtccatcctcggctgatcccgaaaccaaacaaagagacaatacaaatcctaccagagaaagtgggtgaacgaaaaataagaaacaagaaaggtagaaagttcagccaacataaaagctgtgctttaaatcgccgcagccacgtgctgcagatcagtcttagtgtgaaccatgttggacctttgcgatgacatacacagatatccataagtctacaacgaaagcaacgatacagtttcccttccttgatcagtctacaaacgtattggtctccttccatacggtctcgcgaatgagattcgcgaaccagccttcgcctcctcctccgctgcctgagacttgttcatctctgacgacgacaccccgctcgatctcgagttcactcatcatctccttgaccattcccactccaagatcttcggacagcgcgatctgaatcgtcgttagacttggtatatcttctgttccgttcaaaccttctgcttcttctatgctcatcgagcgagtggcggaaagcgcacgctcaatccgatgttgaaatgagcgggaagaataataaggagtgtgtaggatacacgtattcgttcctccttgagaaaatacctttaggtggatcgcaggttcagttaatgtaggcagataggctagggtctgtctaaacgtctttgggggtatcaatgctttttcgatcaagatcccccgggagaacaagggacatcagagttgtattcgtcttcgttctagatcgatatacatcaaggaacggataaaattaaagattaaggacgaaccaacacctctcgctcggttccatcccgcccatacctcatccaacctccagacctgatccctcttcttcctctctcctttctgcgtttgttggagatatccgccaagctctttggcaagctctttgagatatagcccctcctcctttgattgaagcatatcctttgtgatcgctggggcaggaagcgacatcgagagtgttgtttgaaggagcgtctcatcagatgaatcagaacctgaggatgaattgggaggtggtagtcgcgcagaaagagtttgcgctagttttaccttgtgtaacaaacaatgagtgatacatacaagacgcgaacaagacgcatgggttgttaaactcgttcatctatagaaaagaaattaaaaagaactaaccatatcgctagctttcttcatcagtgaatctaaatcttttaaactactctccaaagttttcgcacgttgggagtcctccatattcagagcatttaatattcggtctacccatcaaacatttatcaacatgggttcaagtcagaaacatctagattttgagtagagctgaactcatggttgctatgaggagaacgcaccgatcccagaagacgcattagaaagtgaggttgaaggcgaactgaacgcgggcgcgctggatgatgatgatgggcccgctctatgttctctcggctacaaaatatatgatgaatcagtctcttttcgcaaaacctcttctccagaaaagagtagaacagaacaaaccaaaccgccatcccatgctctaccctccaaccctctcttgagtgcagtataaaactccttgaccccacctcttcggaaactcagtctgatgataccttttcgcttgatcttttctccctctctgttgactgaagctatttcgttcgaagtttcggttgcaggtctagactcggataatcgagtggatgcaaagcctgatggttttcgtgaaggcaagggcgagtcgcacatctcgcacgtgaccagcgacgggtggttcaagaacgtacagacctcacagcttatcccagctacttccttctttttaggtggaacctcggagacgggagagtatgacgtcgaaagaggggccgaggagagtatagaagaagaaggaataatcggaggaggagggggcgttgaggaagcggatgatagggctgaagaagaatacgctcccttggaagcgtcttttgaaaccccacacatctggcatttcaacgttctggccgtcaaaccagaatcagaccttggattgttgaagccacataatggacagaaccactttccatccgtctctgtcacgtcaatcacagtatggagaacgcttcttgatggctgcggctgtttgatagatgaatcaaccacaggaggagcagatgttgaaggtatctttgtttcgttcacagtttcctctgacgcgagtgttagagagaccttaggagaagagctgagaaacccggcgtagaattctgtttgacgaactgaggataacaggatgtataaaccatgggggaaggactcgtcggcatgcctagatagatttgatgacgaattatgagtagaagaagatggagagaggatgattcgatgtgttgttacccaaccggtgacgacatctaacggaggaggaagcttggtattactgcatttcatccctcgtatactcaatcagcaatgaagagagtgattttcgcgaaagttcaatgatcgagacggatgagcctcactggttgtatattcctatataatcacagaactgagagatgagttcttcttcaggaaagagatgttcggtgaggttgaaagttgaattgacggatctgaaaggaagcttatagaaatggtccatccggcagcctgcttgatgtctgatgaatagagacgatctatgtgttgatcgaagtcggccaaaagagtcgagagcgatggagagtgttcccaaaaggaagagcggataacatgggtgactaacctcaattgcggctttaaagtagacacacccttcaaacaaccccacctgggttcacaacacacccacacacacatacatgtctggctcatcagacacgccgatacctaaacggccactctatgaggaatcatctcagttcaaacactggcggttctctcggtcaaagcttgatgaactgcgttcagcattgaacgagcgttcgattcagatcgttcgcgagaacctcgaggaggaagagaaagctcgtgcctctacttctaccgataccaacgaagttgacaacccaataaagcctgctgctctggccgtcgatactcagtatttgagcacagaggatgagtctctgctcgtgtctttctatatctcgtcaatcccgaagacatgcgcagggttcggtcttccggaagtcgtcgaggcaacggcgatctcctacctaaaacggttctatctgtggaacacatgtatggactatcatcctcgtaaagtcatgttggtcttgatttcttccgtcttgctgttcatgttttctcttgtgtcatgtatgaaaaatgaattgacatcaaacgtaattgtggaacggaactatcgttgaaaactcaggccagcgtgcctgtttcttgcgtgtaaaacagaaaactgcctgattcccatcgacccgttcatctctcggttctcaaaactcaaatcagaagaaattctcgagctagaatttgtcgtcgcacgaagtctcaagttcgagtttactacttggggcgctcacaagagtctcaaagggtttgctctcgatcttcaagtatgtttcgaaagagagctcttcaattctccgtgttgttagattgagaacacaaaagctgattcatctcgactcttcttccggttctactatgcacagacacttccaaacacaaccctttcgacaatcaataacgtcatccaatccgctcaacctctcattcaactttcccgtcagacagatctcgagctgacgtatgcaccctcgcagatcgctctcgctgcgcttcaccaaatagatccagttttgactgagcgatacctatccttcaaaagggagccaccttcgtccgtagaacctggggtcgaagcagatgggaaggggaagcagaagaaaccgttaccggttgggactgaagcccttcttcagatctttgaggagataaaagcagtgtttagtgagcaggcgaagaaagtgttgtcgatagagcggtcgaaggaaattgatagacgactaaggacgtgtgcaaacccggagctgataaaaggcacagcattgttcgtctcgtttcttctgatttctgtttcttcagtgatgtctctacctatcgattcttttgctgcatgggtcctgagagctcattttgggtcgcttgtatttcgtccgcaatgtctaaatctctcaaacaggtacgccaaacgtaaacaggaagaggaagcccaagaggctgagaagcgacaaaagaaagcggaacgggctcaagttagcaaagcatccgacgaagctatcttcggaggtgatcttaggacaatccctccggctgattctgctccttcagaatcagcatttctggatggtgagcacagaagtgggttgtcagaggtgggagaaccttcagcggtcgtagagggcgcaacgattgttccttttgatcatgttcaggaccatgttcagatacaggaaaccaatggggcatgaccgtgtttcgctcagaccaactctgtggatcctagaggggaataaccgtcccttgcaatatagagaggggaacgacgacatatgaaaaatgcaagcagtatgaatataatggaaataatttgtaaaaacaaaactgtaactaaacacggaacgtaaagatggcatgatcatgttaaccggatgatcacaaacatccagacccatgcgagacagactacaagacaggctccgagtacaagccaagtgtttgatcgccctttggttgaaacttggcccaatcgagtttgggatcctgtcaactttgaaaagttggctgtagacaagtatcaagtttaatcatgcacaatccgttcggcaagatgaggttagcaagaaccttatgagagagcaagaacgacaagccgatagattggacaaacactcaagcaaggccgcgccttgttccaacaatggtttctccgcctcaagtgatgtcgagaagtgcaccgcattcttccggagctgggccgccatctgttacatagacacgcccgtacatttcagtcagtcttcacgtatgaacgctctattcagatcaatagcaattgagacagacctgagcaagctgttcagttaattcgtcctggatcttgctgctactgccactgactgttccctgtccgacaacagcccttgctccaccgtctgtctctgcagcgtccttcttctctgacccataaccaagtcgatcccacgatcctcccaagagttcatctctcatattcttcacctcttggtctggatttagctcggttccagagggcaaacctgaactcgagtgtgaagggaagagatgcgattcttgctgttctttctcgataatctctggcgaagcaactggcggcgaggaaggcatgacagcattaggttgggacaacatcgatgttggattcgagagagagttcttcctagtcgcgttcgagagaagcgatgctgttctgaaagaggccgaagttgaagaggtcgaggccgaggaagcgcgagctgctgccgaggacgaagaggatggtggaggaggaagactgtatgtaggaatgggagatattggcggtgtggtctggtatgaaggcagaaatcagtcgaaggttttgtcttcaacttcatgaagaggctcaagagaaacaacctaccgattgggcaaggatcagactcatagaaatcttattgagtttggtctcgaaggaatcatatattgagctattatcgtgaagaaagtatctcagtcagcagtatgaaagcaaagatcttcctcagttgagcgatgacaggttctacctatcagtcccatcgccttcggatcgaatgaccctgtcgagcaaatctcttgcatactttgcgtcctataaaccgagtgatgtgtacaattgagcgatcaaccaacggatccaaaagaacagttcatttcattggaaacaaacctcgttgagttttcgaatatcccagtaggacttcccttcgagtgacctactactggagaatgtctccagtcggttaagaagtctaaagagattgactctatcgtgggatgatgaggctgaggacattgacgatatcgtggctcacaggattgattgaagacacttcagaatgaatctaatgagatgtcgagagaagcaaagcagagttagggttagcgccaggtgtccatatggttacgcgactttcgaacgcgcattcgtctcaccgcgtaaccagtgagcattacctaacgtggtaagatccggttacattacgtcagtgcggagaattatttactacatgcacctcgcttacttgccgaatcgccgaggtcatcgatatagccgaacctatccgccgaccgagtcgttaaaccttgccgcatcgaccgttcatgcctcagaatcattctgaattggtgcaggtttatatcgtttcgtggatcgatcttcggtgtcagggatgtgacctgagggttacacctcagtaaccttc

SEQ ID NO: 2433 - DNA, 26434 bp, Xanthophyllomyces dendrorhous
ccctgcctggttacattcttataaccttcccgttaccctctgaacccggaccctgacattcggtctcgtccgcaccattttttctctctcatgctctctccaattatagctggcgaatggttagccgagcgagaaaaccgaacgaccgaataatcggatgaacgcttgaataaccgagtgggacgcaacaaatgagagttgagaaatgttagggagtgaccgacccttttaggacgagcaactgggtgttgagaaggacagtaagaagaacaggacggaacttgagaggaaaacattgtgactcctacttgtgctgatcgttcctgccaagtctggtttaggtttcttttgcttcaacataaggcaaggcgatacgttcctcttcttcctcttttcaacgatcaccgagtaatcctggggtttcgtgattctgtttcttcttataacctgatatcttcttaaatctatttccccttcttatcatcccttcatagccctctccttcacttcctctctctctctctacaagatccttttcaacatgggtctcaaagcttcttctgatacggcattatatgggtttgtatctgcgctttgtccacttcttaatctcccggacgttttccttgttgacacgctccgttcataattcgatccttagctacgttccaaccgaatgggtttgcatcgtctttgtcgtcgtcttttcgttgaccaccagtacgttacttttacgcttcttgatgcaatgctctaacgacattactgatataccagatatcgacgatcgatctagttgttcacctggctcaagctatgcgatatcgcctcacttggctcgcccttacaattgtgcctggagggttgctggagatccttggctggagcgggagactctggaacgccatcaaccctcgtccgttgtgagtgttcctagtgtattccttatctgccctatgtatcggcgtcttaacttccagcacttatccgatacatcttacagggacgggtacctgatgcagatctgttgtttgatcctcgcgcccggtaagtcgagcagcatgaaacctcagatgctgccgcaagcatcgctgacaaatctctttttttgctcactcttgcgcgacaaatcctagctttgatcatggcctcgaactatcttatccttggtctgatcatcaacaaacttggtatccagtactctaggatagctcccaaatgggtgagtctctcatcatgaatttctcaagtatatcctttgcgctatctgatcgacctgatatcgttccttcgacacattcagtataccgtcattttctgctccggagatataatctctttgatcgttcaggctatcgggggtgcctctgccgcgattgctgtacaggacacatctctcccgagaaaggatcccgaaaagggagccaagttcgtatctctgttccttactgctcatagatgttcaaggctaatccttgtaaccaaacctgtaatctcaaggatcatggtcggaggtatcatcttccagatgtttgtgatggttctcttcacagcactcggggctgaatgtaagagcttcagagctttttgatctcgtttcatcgtcacattcatctgaccaaatgatcccttgaatcagtcctcttccgctgggctacaaaccgtccattcgtccgaacgatctcttccgagggctcgtctgatcaggtcgacgaaagtccagggtctgccctcaagcaaagtcccgagaaaactgcctcatctgaagaggccgaagtagagcgctggcgacttctgttaatcggccttgccggaagcactcttctcatctttattagaagtatctacagaactatcgaggttggttccatagtgcctttttccccctttaggataaatttccatatcaacatcttcaaatgaaatcccgctaactgatgtttggtttgtcttgattttgaacacagttgcttgacggatgggtacgtttctattctggctactcgatcagattatgagctgagactaacatctaaaccttctgttgttgcgctctctagtctgggcctatcatcagtaaccagcagttgttcaattgtctagacggcatgatgattgctcttgctcttatccttgtcaacttcctccatccaggacttcttctgagaactaggacgaacgcagtttcgttgggtatgcgcaaaaagaaatcttctgtttaagatccaagacacatcgaacaggttttgatttgtttgtttctctttctctttgtctctcttgttcatttcacctaaatgtttttcgctgtgtcacttagttttcgatcttccctcttcccctaattgctcgctcttttgtatacctcctcttctatccgaagcacttatatactcaggacttactgtcgttatatctccctcccttgcatataaaaaaaaatcttatcagactgagactcaaagccatatctggttttcatatacaaacactcttattaacgatcagtacgcaactaacccactcagcgagttatcttcgttttgatcgtgatttagataatcacccgcgtctaaaagatgacgcgtccttgaacgcgtatcgtcagtcctttaattaagaccttcatccattgaacacccgactcaaccacttgtaatcgctcttcctcttcaaatcgagtttgtcgttgaaagaagatatcgcctgaacccttttgtcgaaaacctggttcgagagttctatccgtttgacaaacagtaccactgattttagatatattatggggttcgtcgtgtagaaggtttgaattataatcgtctgcttcaaggtaattaatgctttcttttaggtcggagaacggcgagaaaccaagtgcaagaactccaaacgagaacgaatcaaaagataggaaaaggttaacaaggaaccaactgattcataaactcgtacgctcagagtttccagtttcctccaaatcaacatctagccatcgtctcctcgatcgtgctaatgtttcgttttggagacgataaaacagatcacaacgaccgacctaccatcaaacccaataacgcatgcctcgagaccggttgatgttgtcgtatcttgctcaacaggtcatcaggtgtcttctcatggaggcggaaagaaaagagcagagctaggaaattatatgaaggcgagagagcagaagatcaagaatcaggttgctgggaaggtgtgtttcagttccaatcttccctcgagtaggatcaaagccaaagagttgaccccgttctcctttgtatgttaactaaaactcatacaattactggggtttgaattcgagatagaagaacgatctgtttcgaggtgtcatagcttggatagatggttatactggtccgacgatcacgaacttggaattgaaagaccttgtgcattctaacggagggcttgtcgcgtgagtgactcatttcttcacagaatcttcttgtttctctgattatgctggtactaatgccgtccatcgttctcaagcatgtacccaggaaaaaaagtaacacacatccttacagccgcttcactttccggctcgaagacccatgcgctgcttacaaagacggttggttggaagcctgtcgtggttgatccgatgtggatcgttgaatgtgttaattctggcaagagaatcggatctgaaaagtggaagatcggagggataggggtggtacgtgtcctttcttctctttttctcctactgttctctttcttcgttgctctgagtctcagtaacatgaatatcttttcctgcagaaccaaccgtcgataggtcaatttatcacacgtcccggttcaacttcttcatcaatatcgaaatctattcaacctcgtgcaaatttaactcggccttcatcacgtagtttgtctgtatcatgtgcatcaccctcgtcaatcatttccgaccattcttccacagtaccagtatggacacaaaaacgaacatcgacgtgtccctctgtctgcgctgatcttgtaaaaccagcagtagaagttatcgacttgtgcgatagtgataacaactaggagtctcgattattacgttggtatcgacttggccatagatcacgtcttctccttagtcgtatgcgcgctctggtgaccgagcggtagtcgataacgttcttctttcattacaaattgccagctctatatctcaaatcttgctgtatgattattgtatacgtacgttgattactgctcacagaattttaacttgaggaggtcgacaaagtatttgctctgaattgattctcccacccgtctgtgagaagtcatcaatgtcaacgttattgcgctgatagacagaatgataagatgctttgtttgctgtcacaaaaaagcaaccgacagcacacttcttcttccgtcccatactttgctcgacaaccataacaatgtcttcttcgaacaaatacccattctaccagagttctacacctctcccggcctcatcctcaagtccgtctttacatcaaacggccttgaatcctgaaacatacaatctagtcccttcctctccctatcggactttcaattcatctacacctctacgttcgtcttccccttccttcccaatatggccgagcgataaatgggtttgtggacataaggcatatgaaaacaagcttctcgaggtatatgcgaccttcgagattgatcccatatactccgttcacaggttgtgtgcaaaagagcatgcacagaacgtgcacctatcgatgggcgcacagcgtgtggacggcagaggtctgtcagagaacagcataaagaccaccggacgagatcctacggttgaagaagagagaaatgtagtgtatggtgagccacgtgttaccaggttgtcgttcacacccttgacatgataattgcgacaacaaaatcaatctcgtcctctgatcatctctctgtctttctgtctttctgtctttctgtctttctgtcattccattactcagagcgacagccatgcactcggacggacttgaaccatgtggcatccacaatgacttgcgcgttttctatcgatcgggcctcacgtatatatcctcttgttaagctctctgtgaaaaggtacaccgcgctcagacaaattcagattgaagagctaggaatattcattgaaggggagcagagtgatcagggagaagaagagatacctctaggatggattggagaagatataggagaaggaatcatcaatctcttacatacatatagtcttgcacatagatctgatcacgcgaaaatccactgattgttcgagacgctcgttaagcatttcaatgaacttgatgtatccgtcactttataattctcaactctgcacatctcaatagattgtagaagattaaaggctatatggacacgagatagataagaactcatcagataatcacggatacctacggaaaggaaaagaaaaggcgatagaagaaacgaaggacaattagataaaatatttccagaacgacaccgcatctcgtcgtttcaatctacatcactatcaggttgatagagaaggcgattcctaataaataaggaaatagtatagagagaactagcgcggctatggacgggatagtgaccggaggggctcactgagttcctccgggactagtaaaagataacccaaagctagaagtcggcttgaacggagggggcaatccagtcatctgaggagcaagcggagcaggcgagcccgagttgaatgagccttgctgcgaaagacctgggttggtggaggtgaagaacgagtctccgaatccagtgttgatcgagctgcccgttggctgaggggaactcataagcgaattagatcctaaaccagaactagaaccgaggaaggaaggcgagctattcgaggtggacccattggtgagcgagggaagggaagcaggcattgtggactgtctgaatgggttgggtgctcccgtcggctgagactgcagatatcccccggctactgagctagactgaccaggaatttctggcaaactagaaagcagactggctccgaaggacgaagaaggtttgaaaggctgcacggacgagccggcaaatccggtcgtttgagctcgaagaggttgttgctgaggccggtgaggaatagaagatgtcatagaggaggccgacgcccccgtcggggctggttggttgatggcgaacgaggaagccaacgacgacatgtcgtttgagacggacgatgattgctgttgctgctgtccctgtccaccgaacggctgctgctgttgagtagcagattgccaacttccagaggccaggtcattcaagctcgggccctttgatccgcttgcttcggccggtttggagttattaaacgcaaccgatggtgcaccaaacgggtttttactatgtccgttcccggtaggctgggataaaagtggtgctgatgccggtcgggcgaacggattgctgcctgtctgttgaggctgaagcggcttagcctggttcgattgaaggaaagactggccatgaggctgctggattgcgccggttggctgcgactggaggaaagaaaacggattagactgttgcggctgttgttgcggagatggctgagacagaaagtcgaacggtgaagtaggttgttgctgctgttgttgttgttgttgttgctgctgctgcatctgaggttgtcccacaaatccattgttagtaggcatgggtgccagaggaggagcctgtccgaaagaaggaaatccagtagcctgaggcgcgagcatgctctgtcggaaagggttgaagcccgtctgctgaggttgaaggaatccctgttgctgctgctgctgctgctgctgttgaggttgaaattggccaaatcctccaccgccaaaagcagcgaatccagtttgttgagcctgaaggggcatgagcccaccttgcggagggaacccggttgcttgagggaacagaggctgttgctgctggatgattgcggagaatggattgaatccattttgaatagcaaagctttgctgaggattaaactggttgaaactgagcaaatatgatgaaataaattatcaggtccctttgcatatcttaggtgaagacgttcagctttttacggggaaagacctactcatttccttgggcgaactgtgcaggtggttgaggttgagtttcttctatactggagaagaaatcaacaagcgcctggtcttttgatgaggaaggcactgcagttgatgaggccggggcagccgtggtagatccggatgaagcagtgttatcagcagccgaggtagtagccgctgctttgttttcatgataaaaaaaatgacatcaagacccggaccagcttggaagagaagaattaaattggcgtactctttttcgtgaccacctttccatcggctacgtctttattctccttgtattccattcggttttgctcgaaatttggatcatctatgtactcctgtagagctttgactaacgaaaccggagcctgaatcattttaggcaggtcatttatcagtcttcacgcagttttggccaatgtaggattgaaaccataactcacatgcttcaaatttggtattggaacgtcgatcaggctatttaagtctcttgcatgttttaggaactccatgacttgtttggtctgcgagcagaactgtttgtatagctcaagggcctccttcgcgtccttgaggttcatctcgaagtagtgctctatttgaagaaactctgtcagttaacgaacgccatatcaggggaaaggttcaactcaagcgtaccgagaaggttaataattccctcatttccagcttggaacaagacgagaagatccttgaccaccattcggaacgcaagaataacacactcgtcctgtttgtcttggtgatagaactgaagcaaagctgaaggttaaatcttgtttccacagaaccaaacaacgatatggagagacaaagcttacttcacatcgaacaagcgcgtcaatgattttctgaacctgtttcgtttcctttagcagccctctctcgacagtcaaagacttcaatttccgagcccggtctgtacgataaaaaacttgattagcaaaattcgttcaaaggcgaaacatgcacataactagttgagtgcgcgaggaaacaagactgaccgctgattccttcggtttgactccggtagatactcgctcggttgctctcggcttgaacccgaaccatatcgtgtctaatctccctgtacgcggtgattcgtacgtgcaaatagtgggcgtagaacgtcaagataggaccttgagtatatcctgtgagttcaaagagagggagagtcatgggaaagacgcaatcatcgcgtgagttcgaatgaatgtgatcacaagaataccagacgatcaacaaatgtctctccgatgaagggacaggaccatttgagtcaaacgtaccatcccaaaacgttccctgaccaacgtttttcaaccgaagtgtgtccgatctgctgaggtagcctagaacgttgtcggttcctccagaccggatcatagaatggatcacaaggagagacttaaagacgacgttcacgttgggctcccgtaggtgccgcgccagagcggagcacacgtccccgataggaccttccggattttgtgtgatcaagaggatcggactgtaaaaccagggatcgaacgagagggtctttctgtcagaaagataaacttcttgaaagagtcacgcgtctatgcacatagagaaagggtaaggctgactcgagatactatgacgatggcaaggaaagaaaaagaggagagatggataagctccaactcgacttgatgacgcactcggatgaaaatcgagggataccactcacttttggtttaggaacccccttcttagctgagcatgctttctgtcaagacggatggatgtagacgagggagatgaatgatcacgtcgagtccaaaaagaacgaaacaaagaatgttagagacgaaaagagatgggatgacgcgcgaggggctaggaatgaagaccgagagagaaacatgacctaccttgataagcttttcagacgacgtgtcaggcatattcagctacttcgaaggtggatgcaagactttatacagagccagatagacaaggatgaatcaggcttcgatgagcggattgagaactcgagggaaccgacggggccggtcaaacggtacaggatgggatggaagtcgacagtcagaaaagtgaccgatttcttttcggtcgctttctccgctaaacccatcatcatccagccccagaccggccaacgctcatcatccgggccagctctcgtccttatacttgttgtattcgtctgtgtactcacttgggatacgcacataaatctcacatatgccctcttctcccggctcaccctcgtcgtcttcgcctcagagaccattcacattcagtccctcgcctgatccggatatccccgactctgatcttccagcatatagtccagctgctacccagttggatcctaaggattggaaggtaggatgactccgtcaaaatatagtcttgatctcttcttcttcttcgtcttgtcattgagaccccttcttctggatatacagatctatggagcatcgccgttgaacaggccggtccccgtagttagctgtcaggactgtcttaaaccgattcttcggtcggctattgcagaccatcatggtacgccagtctttctatcggcctgccgacctattcggctcatgtcgctaacacgtcgctctctgggtgttcttactgggctcgggaaacctagttatttgtcaaaagatcctgaaaggcctccatcataccataccgaaagtagaaagagtcgaggtcgaactcccatcatcggatgcccggaagcgacgcatatctgaacgtcagtactcttgcattctatgctattctgttctccttgttcatgtgcttatttcttgcgagctctccctactcgccaatatgaggaatgaacagtctcccaatcccctgcatcgtcttcctataagaaaagtagagtagaagcttcttcaccggctccgtcggaagctccttcttcgacaacaacagccacgacgaccaagtcatccgcattggacgccaacggtgctcctaaaaaggaaaagaccaagaaacagcaggagaaagaacgcaaggaggaaaagaaaggtgaacccatgattccctccggaacttctgttgattatagattgtatcgaacctaagtcttattcactcttcttgcttgaccttacgtttgggactatccagctatggcaattgatctgagtcgtcattgcggtgtcatcaacgccaagaatcttccttgcgttcgttcgttgacatgtaagtctcactcgatgggcgccaagcgagacgttccgggccggccgaagaaatacgacgtccttctcctcgagtggaacagagcgcacaacccaaaattcgtggagccaaagagtaagctgaagaaagcgttggctggaataggtgaatccggtcctaccggtgggtctggttcagcatcgggctcaggtggaggtaacggcctctccgcagacggctcgtcagctggtttagatggttcaggtagtggaaacactaatggaaaaggaggaatcgatggacaggacggttccaagggatcggcagggacatcatccggactaaagaagaagaaaaaggcgaaatcgtcctctggtcctgccggctcggccaacgctggtctcggcggttcttctagcaagacaagcaagaaggacggagggcaagatgacgaagagggggaaataggctggagtacagagttggagctgctcatccgttcagccaagacggccagagccaacctatccgctccctatcgattcacgtcccttggaatatctaatccatcatcagtccaatcaacgatcgcaccatccggtcaccctcagtcagatctcgtactccctatgacaggcgtacatgatccctcagctgatccgctgttgattcaaccatcaaaacctataccgctcgccgtgccgatgtcaatatcttcgtcatcgtttggtggtcgatctccattcatcggtcttcctcgggaaggaatgaaaaccggattgtactcgaggaggagagaagaggtcaaacgtctcagcgggctgttgagcttgattgggtaaggacttcgccggggagcgattctatgtatgtttatctggctggtccatctatcacttttggttcagacttcggatcttcgatgaattaaaaaaaaaacaaagtgaataaagtctaagatgatttgtcattgatacagaaagcatgaacggagagtgaaagacagagagaaaggaagaagaatgtgatacgggaagaaagcctggtagaacagtgtgaagtgattgcacactgaatatcagagacgtgggatgggatcagtgtgaaaagagaacaagacagcattcgaatgtcgctatcggcaacgttacagggagacggtaacagcgattctgaaaggaaaatgggaagcgggatagcagaagatgaggtgaaaagattatactgaagaatggtattattgaactatgagaatgagatgggaaatccgaacaacaaaaagcaagacagctttgccgtctaagaaatttccagatggagagaaagagaatagagaagaacggagaaagaagaaatgtgagaatatgaagggaaactgtttttgttgaattatatggaacaccgagatccgtacaaggtcaagagactggcgtgaacagagagagacagtcgaaaaagaaaatcgagtgcacaaggcataaccagcggacaagtgacttgtctaaaacatatcaacgtcctcccccggcttgcgtcgaacaccacgaaccataggctcgtcatcgtcgtcatcatcgtcgtcggcctcatcatgatcgtactcatcgtcatcgacggcgtcctcatcgtcttcgaatgcctctccctcctggtcgtctttgattaggactccctcggaacccacctacagaaggacaaggaggatatatttgaatcagctttgccttcaagcgagcaagaaagaggttggaacaacccagacaaaatctaacgaaccatcattgactctccagaatacgtaaatcctctaaagttttcttgcacactgctcgtcaaaagacttcctccggccaacggattcgctcctggcctcgacagccccttgatggccatcggtgcacccgccttatcaaagccaacaaagtctcccccagtttcctcgtcctcgaatgggtttgctttcgacatgagagtgttggtgaactcaggatcaaagttggcaaccgattcatccgaatcaacgaccggcttgaagggaggtgtcacttgtttgtgcgcgagcgcgtgccagtcaatctgcttgaagaacgcgtgctccttaagctcggcagcatcccgagtggcacccagtcggtgcttagggtttcggttgagaagctgagaatgtggatacaagtagaatcaaatggatgatattagctgagttataccgtctatgtcagaacattttgatagagagaacacgcacccctttgacgaactgctttccgtcgtcatcaatcactcctcgagggaacctgatctttccaaagcagatatttttgtacatttgctgagtatcttctgcaaagaatggactccatccacaacacatctcaaagaggagaactcctagcgaccagaagtcgacgagcttcgagtaaccattgtcgtctagtagaacctccggggcaagatatctgaaagaagttagggaagtaagattgtgtcattagaacgggtagtatctggttcaaccatcatggcaaatatgcgcaaaactcactccgtggtaccgcagaaggtgttggtcaactgatccgaagctagatccggcttggaaagtccaaagtcacagagcgcaatatgaccggtggcgtccaagaggatgttctcgggcttaagatcactgtagaccaccaaacgccaggaacacgcaagaagactgttcagttggacgttcaaatttctacgttgacgggggaagcagaagaataattaccgataaacgatatcatatcgatgcaggtgctcgagcgccaagaccaactcggcgatgtagaacctagctcgctcttctgtaaacctcccctccttctgcagatgccagaagagctctccacccgatttgtagtcggtcacaaagtacaattgggtggccgtctggaaagagaatttgaggccgacgaggaaaggacattcgagcgaggtctgaagaatcttacgctcgccgatagtgtgagcgacctcctttttagcaacaatctccttcttagaaagaactttcatggcgtaaattcgtttggtgtccacttttcgaacttgataaacttttccgaatgttcctcgcccaatcaatgaaagcggctcaaagttggttggcttgagatgaagcttggtctgtgtatagacaattttcaatgttagatctatcatcaccgcgtttttcttctctaatcacgtcatgacaccgtgtggaagaattaccttttcggcagcgtcatatcgaatgatcagccggacctctcccttgccgacttgctcatccgaccgaccttccaatctatgttcacagagacccaagtgaacacatcgttagaaacatgtgtgcgtcatgctcaatataggacgtttactgacttgaaccattggtcgaccacgaagcccggtcggcaaaccgtgctgattgctctgatgccaaggaatccctcgccttgttgacctcggtcatagaccgtcatatacaacaaggactggtcggaaacgagatcgctacagagaaggatatgaggccaactcagtttgatggccgacaccaaagaaaaatgacacaaagtaaaacgttgatgcttacaaggtgacctcatgcttccataccgggtcctttgccgatgacctgggtgtggacgtcagccactcagtcttgccagcggtgccagccttgggtgtggttgccccattctctctacctcctggcagggtcaatttaaccttactagagtttctacttctcgctgcgagatcaaacgcccgggagatgcttcccattcccaaaagcccaccgcctgccgagggaggtccggctcctggtgtagaaaccgggtgacctttcaccgcaggctcgtcgtgagactcgataggatctctagacacgaaatcgtttccctcgaaagagagtacaacgtaagggtttgcagttgcctcgccctctggaggaatgttaaggcgacgaccttccatcaattttatcgttaaccgacctcttgggtgcgagcctggagaaggaggtcgagagacaggcgtattggcaccaaaggaaacagccgtcggagtcgccgagggcgacgggttaagggagaggccctggaaaaattgggcggtatgaaatggaggagccagatttgattttggggatgccggttgtggagtcgttggcattcggcggagcgggggagtagccgttcggaaatcaggagggtgaatagagagagaggttgtgggaggagcagtagtggttccactagattttccgtcacaagagatacggtcatgtggacgaaccggatatgagaaagcaagtagactcaatcagttctgatatcagaaaaacgatgtgattgtgtggtgtatggtcggtgtgaaaagatatcaagggtgaatgcaagatgctgagagctgtccagcaatctcaacgatgtattgagccaagtatcctgcaagaagcaatcaagactgaattgatagcagctttctgacacgccaactcaacaagccagtctaatgatccgtgctgcatatctcgatatgtagaatttgaagagattaaaaaggaaatttgaatagaacacgcaccttttggcagggttgcccctgggaacggcgaattcagtcgctgttggagttcgcagcaggctcggcgggtgggagtgttggagttgcacttggtgttgttggccttgcgatggtactgccgttgccggagaagggaccatctgttcgaatggattgacttgtggttgagcggatgccttgggggtaacctaaaaggagagacacggggtgacgagaatgaggtcgtcaacgggtgatcggaaagaagacacagaagagagcgaaagatggatggttgtgatggatgtgacgtatgtgcaagggatgtggaggacagaaagataaagtaaaccgaaagggggaaacgggtagaggatatgaggtgtggagttacacaggagatgatccacgtacctggtccgacgggccagacggccagaactaggatagcaaagatggaaacgaacgagaccgaaagatacgtcgtcagcatcgacgtcgaaggaacagaaggaaacaacaccaagaaccaatgcccatgggtacaaaggaaggtacaagatgaaagattgaacgtcttggatggccgacggagatttcttttccttcctacttgcttgttcagcgtgagaacgatgtgtacaatctcttttctggatctcttctcttctcttctcttcttttctctctaaccttctctctgtccttctcctttctattgaagagtggcgagatggtgtttgatgtaaagagctatactacggcatagccatacacgccgtctagtgatcatccggagggcccccaaaccaaagggcaggaacgggcaagggtggacgagggatagcacggtaagaaaaaaaaggggagagcagactcaccttcagcatggacggcactttgaaagacttgacccagttagggaaggatgaatggcaagatcaagagacaggatactgtagatggactcggatagaaggtgttcgctccttcggtagagatgaacacggacgatgtatgatcgctggggaaggcttggtctgcaaggcgggtgaggtcgtctcaatcacctgggcgtcggacgagaggagatgagggttgtgatctaggaacagatttcaatttgtaaccacacacggtcttacgtaatgagtctggttattgaccttgtaaccacattgacgctcacatcctgttccttgctcgtttcttcaacagtcaccgcacgatcttcatcatacttgactcaaccaccacagaatctccatcgggatggaagaaggttggtcgaaagttctttgatagtctcgctgttggctcgttgtttatttgttcagtcttcaatttgatcgtctcataacttttttatttttgtttttttaaataaaaaaacatctttggtcccctcgactttatagaagaagaagtctgtcgagtttgccgctcgggtgaggaaccaggcaatgctctgtatcatccctgcaaatgcagcggaagtatcagatacgtccatcaagattggtgagtccggttcaataaaaacattcgtccatggttaagtgtcatctttattttcgatgaaatcttgttcatccgtctttccttttccgttgctggatagtttgatgacctggcttcaatcgagtaagcgcaaatattgcgaactatgtggtcatccttttcaattcaccaaggtgtacgacccacatatgccatcaagtctgccaccacacgttctgttcgtccgggtcctcaaggaacttttctcggcctcgctcatcgttctgcgaacgatagctgtcagtgtcacctggctcggactcgtgccctggtgcacgatctgggtcgtccggcttcatttcttcgtcggccatggcttggccagatctcttgccggagagtcattctctctcaacgccacggtcgctaactctgaatccacttctcctgaagccaatctaccttctcttcatcctctgaacgccattcttctcctccatcccaccaccgcagctctgctcgctaagccaacttggttcgaccttctatcggacatattcgaagggcaaatcatcaccgcttcaatcgtcgtcctcttccttgtcgccttcctgatgaaagagtgggtcgtacagatcgccgaacagccttttgatgaggccgctcaacaaaacccaccgggagcactcagagaccaggaggtcatgcgagagatcgccagagcagctgctcagagagaaatacagcagagacttagagaccatcaacagcagccagctcgtgccaatatcatggctgacaatcccgctgctgaagttcttgctgaggcagatgctgccgatcctactggcactcaacacgaggagcttcaagaaagaccagatggacaatcgatggaggaggaggatgaccaaaagtcacaggacagcgaggaaagcgaatgggattgggaaggcagacctactccggagcagcttcgagcactccgaatgcgctacctcgatcccatcaaacttgcagcagctgctgctgctgatgctcaagaggttccagtgcgggccgagccttctaccagtataaattcagacgctatgttggatctgggtttctcccaagacgggacttcagaaccatcccagagctcttctgttttacaacacccctcaccgcctacagctgctccttcctccttttcccatcacccatccgctgcagagcttccactacctccatccgtcccttctactccaccacacatgcctactgaacatcccgaagaacctgaaggagatagcccgatattctcactctcatctatccatactttttccaacccaaaccatgctccctcttctccgcctctggatgtcgaagaaagctcgttcgcgaacccgacggcgcttgttgaaccttctacgcagaacagccatgccagcgaaattgatgagggaaagaagcggagtcaggatagtttcatttgggacggtgcaaagtggccatccgagcctcaagatggggaagaacagcacggagagtcgagcgcacatatcccaagccatcaagacgagggtcacaacgaaaactcaagcgaggataacaacaagattcaggatcctgtagagaaggagcacacggaagaagaatgggttgacgagactgatgaagaacaagaagcagtcggggcaagagaagagcaggaagaagaggttgaaatccgactggatgttcatagggtggccgatttgattagacaacaacgtcaagcggggaatgacgatatggaggatattgctcagagggtggggctgagaatgcaaggccagccaggtttggttcgcagagtaagagctaacgatttgagagaaggcgacgaggaagaagaggaagaggaggaggaggaagttaacgacaggctgttggatgaagatctagagggacttatggaaggtatgtgatcttttgttaatctttcctcgacatttggttatcttcgctctggatagcaagaagaaagagaattttttgacgattatgctgaatggtttctttcatggcttcagcggtgggactcagaggaccctttatgactttgatccagaacgtacgttcatatcaactcaaaacccctcgccatcgaacgatgaactgaataaccaacattctccttatgaaataaataaataaaataaaacaaaatgaaccagtctgctctcatcataatccttctgtctttctttattcacgtggctatcttcatacctttcacgaccggaaggacattcctccttgtaagttgaactctgcctcagttatcatgagatacgcgtcgatatcctgacctctcaataatgttattttaactttcttgtcctatagctcgacttcttatccgtcttccgatctcttctgtatcctatccgtctagtccgaatcattaccgatcccgctgtgaagcctatcattgcggttgggtctaagcacgtctcgccaattttctctcgagtattctctcccatcatccgaacattctctgcgtcaagatcaacccgacagtcatcgaccttggtattacagtcctcatcattgagcgcaaaactctcatccctgtctctcctaaaatctctagactctgctctggaaagctttttggcatccccgtccagctctgaagaagttctcccgatgtcccgacgaaagatcgtggagcttagtcgaccttacatcaaaagttgtcttctcttcttcaggcaattaggatccagtacaagagctatctatatcacatccaggacgttcatctctacgttaccccagcgaaaatctcttggatttgctgccttagctggcgaagacaaagtgggagatcgggtgcttgctacggctgtaggttacggttgtatcattctggggttgattttctttttaaaatctcagagcactcgtacaggctggagaaaatggttcaaggacggtttgctccagaatatcgtggttatcaagctcgcattctttatggtatgtcctcataaaccattcaacaattacagcactccttcattcagaaaagagagatcagtctgatgaactgttgacgagaatttgtcgtttcaggctatcgagttggtcatcttccctctaggctgcggcatcctgcttgatttgtgcctcctccccttgttttctagcgatgctttctctttgagactggacttcatgatcagcgctccattcattggtaccttccttcactgggttgggggcacgctctttatgttcgggtttgccagcatgctctcgtactgtcgacagaaggtccgaaagggagtcttttatttcattcgagacccgtctgatcctgcgttccaacctgtgagagagatcatttctagatcaacatctagtcagttagtcaagctgggaatctcggcgatgatgtatgggttcatcatcacctcttgtaagtgaattgtcttcgctcagattcgatcgtcacacacatctctttaatgaacggttcaattgattcgtctgatattcgaattttgatcataaagctgtcggagtagtattgggtgtcatccggttgatcgcaagaggtgttctacctttgatatggataccaacgtacgtatttcatactttgcttcgattcccaactaggcctctctccaggactgattcttcttgttaccggccgcagccaaccactctcacaaattccggtagatcttctcttcatgttaatctgccttccgacgtggactcgaaagattgcgcctcagcgacgaatcaccgcttccctctttgcctggtggacattcagcatcaaagctctccggctgcaatcttacttctttggtccaccattaacaaccattggggctgatgtcgatgatcaaatcgacactagagaacgccggtggcttgattccatcgcgcttcggatgggtggggaggatttccagaaaggggccggaggactggctagggtgccgcattcggatcaactttcgatcattccgaggatgcgtatgttggttcttttgaatgagttccatgcacctatcgaccgtaagtctcaaatctctttcgaacatcaaacacggggtctgggttgacaaggataccatcttttatcgttgcggtgatcgacagaaaccgagatggagttattgattgctcagaacaagaaagcagtttctgtgggtcgacgacctgatcaagtcagtattcagtttcaaacatatacgatttccagagtccgttgaattgaattggattgaattcaattacttccgtccgtttattacgttctacaggatttctgcgtgtgctacctccctcctcgactgcgaaaccgaatcatcctcctcacgttctcgttttggctgtcgctagtggctctcgctgcattcgggctcgctcttcctatcttcatcggtcgattcatctttagcttgttcggattccctctcgttcacgatggttactcgctcatactcggtgctcttcctagctattccatattcttgaccctagattggtccgttcgattggtacttgccaaacagagtccgatgagaacgttggctagaggtttaaccgacgtgaagacgaccctacagcgaaaggtttattggattgcactactcagctatatatatgttatcggagccgtcggatcgattgttccgttggcggtgggccttgtgatcgagttgtattgcatcatgcctctcaaggtttcgtctgctgagccgccgatcatccgtataccggaagtgtgggctatgggagtccgtaagtatattattctaacctctttatctctatctctatctctatctctatctcttcactgtgctttgtcttcgttcgttggcctgatgagcgctcctgcaccttgcacttgaacccgatccacagtctggatttacctcgcataccggcttcagaactacatccctgcacgctatcgggagcgcacaataaggcctctcgagacggtgcgtctattttggctctgcttttttcctggaacgtccactgaaacagctgttttgctatccttcaaactctttcaacatcattagttcctttcaatgagcgcgaaagaagcgacgatcaagctgattcttcccacgcttatcggcttgttcgtccttacagttgtaccgtttgtactagctctatgcctcgctccattcttacaaaatccgactgtgttgtgtgagtgttttcaattctcgcccctcttcctttttcccccgatctctgactcaatatcttcatgtgattctttctcgggctccgctcgacctttcgtatcatgaagtccgagggatttacctggaagttcttgcagtggtcaccttgtttgcaaccatgggtgatgtccgacagttgatcaatagatgggttaatatggtatgtatttgcgctgccctttgcctgcattgccgtcgatgttgtctttctgtctgaccgcgtcatgccgacgaccggaactatcactttgaaaagcttcgagaacaggagtatttggtcggagttcggttaagcaacgtggacgataaaccggacaaaaaggtcgttgccaagaagcccgcgaccggagctgtcgacggaaacgtggtggcggaagggacgggggctgagtaaagggtcacaccggagacacatctatgattgtggttcattcgacatcttgtttcgtcattcatttaacagcatcatcatcatcatcattcaatttccctttccttcactttcttgcgtgtatatacaatgaaataaatctccaaaaaacgaaaagaaaagagaaaaaaaagagcaaagaaagaaagaatctaaagtcgacgtaatgtacagtgttggcagggagtcggattagagtagatcaaaattggtctatgcctgacatgattcatttctcgctcttcagtttcccatgtctgtctgaagagctaagtttgggtttctttcgggaagcgaaggaagaggtgatggcgttggaaagagcattctatcaacaggacattaattagataggttgaacatgaacgaaaagaatagagaaagaaccgttctatcagatttacttcttatatcactcgaccaatcaaccattcctcgacccagttccggcccccatttttctttctttttcttttgaaagtttttttttctcctcctttcccccccttataaactaaaaatcagacactctacaaactcatgcccttcaacgctcttccgagcgcctccaaatctgccttgagtttcttcaactctccgacctcactggccaattctgcttctcctccttccttcttttctttcttcaatccggttactttgtctccctgggttttgatctgggcctcgagagcgagcacctcaggtgttcggggaagggatgctagagcggcagcagcctcggccttcgctttcttcgccgcctggttctttgacaagaccggtgtcgcagcatcgggcgtggaggattcaccaccgtatcgtttccgccactcatcaatcttttcctccttgatctccttgaacaggtgctctgcttggttgagcttatgtccaggtaagatgtcgatggagaaagcctcgggcaaggccctcagaggtgcgttcaattgcttgcagatcgagtcagcggtgacgggcatgaaaggatgaaccaatgggccaagggcgtagatcaagttgatagtcatgaggatgacttgggcggctcgttcaggatcggaagcgaggagcgcgttgtccagcttgttgtcttgaatatactggtttccacgagcagagatcgccatgagctcgaatagacctgatcggaattgagtgtgatccatagatttaatataggtgttaagacgggcgttgatgtccgagatgaatacctcgtcaaccgcgttgggggcgtcggtgggagctagtggtccaccagcgagggaagaaggaccggggacgacagagtcgaatttggcggcgacaaatttgatgatctgtcatattgtgcatcccacaaacatcagtcaggggcactgatttgaacaaaccgttcaaaagtacggaggaagaaaatcgcatgcttactcggttgacaaagttacccaagttgttcttcaactctgtgttattttttgacacaaactctttccaagcaaacacggaatcaccggtttccggtctgttcgagatcaagtagtacctccacacatcaggtggcacgttcgtatctctcgcgttgtttccgaacacaccgacgtttcgagatttcgagaatttaccagactcgtagttgagatactcggtactcgaaattcggtgaagcatggtccaatctcgtccgtccgcaagtaaggtagccgggaaggcgacggtgtggaagtaaacattatctttacccatgaactggtagagattaacgtccttcgggttcttccaccattgctcccagtcgtcggtgtactgagcggtcaaagacaaatatcctataggggcatcgaactggtcgtacaaagagagagaaagagagagatgagttcaagatcaggtcttgagaatgaatttttcatatatcgttttcttcgggttgtgacgacttacccaaacatctagaaccgcgcgattcaagcaacatattctcatcagctttgagcgataaacatgcaagggaatatgatcagtttagacaattcagactcacacataaccttgccgttcatagccgcgtcctcctcagcatcgcctgtctctgggacggcaactccccaagtaagatcccgagtgatcggactcggcctgagaccacccttcattctggcctcgataatttcacccttcgcgttgacgacgacgtttccgtcccattcacccttttctcgggcagacttgatccaggcttctaatcggggctggagctcatcgagtcgcatgtacatgtgggaggatggtcgaacgaccaaagtatgcttggaatctcgcttgcaccggggcttgagcaactcgataggagaggcaaacgttcgggtacagctgtcgcattgatctcctcgagcgtcctgaatgcaacaaggagaaaagttgagtactcgtgtgcctaaggattagataacgaacaagagaacgtagagtgcactgacatcataaccacaatccgggcaagtcccctcaacatatcggtcggcgagaaatctgccaaggagtcgaacgaattagtcagacgaccttgcttggaacagctcactaaaagtccacatactcacctcgagcagccttcacagtaggtcatgtcggcactcttctgaaggagaagaccgttctttcggacgttgaggtagatgtcttggacgattctaaacagcaggtatcagcagataatggttagcgcgcatagttctgacaagttctacagctgaaaggaaatggagtcttactcggtttgcttctcggtcgaggttcttccaaagtagtcgaaagagatgttgaaccatctagagagagaatcaagcaggcgggtaggtaagatactttagaatttgaccaatgtacgaattcactccgaggactgacttgtagatctcggcatgaagagcagagaacttgtcacagagctcccggggagtgattccttcgtcgagcgcctagaaaaagaagagagcaagcaagaagcatgtcagtcggcctggtcaagccttgagctcatggtccatttggactcactttggtttcagtcgcagttccatactcgtccgttccacagatgtagattgtcggcttattctgagttcgggagtaccgggcaaagacgtctggagtagtaaatatcaaagatatcgatgagccgtgctatctggtgagcgaatcgatgacatgctacgaaccggcagacaaggtggacccgatgatgtttcccaaatgaggaacgttgttgacatctaataggaaaggtacatgaagcgttcaagtcagggagaaggtgcgtgagcaagtgggtcagttggtgaacgaacggattaagctgagcgagccgaggttgctcttcagaattgaaggacaggagactgcgactcacaaggaagagcactagtgataagcgtgttcttctctcccttcttgggaaggctatgatgagattgatagagaacaagagaaggttggtttgttagacgaaacgtgtgcgaaggaccgaaagaaggcaagaaagaagagagaagaagaaaaaagacgaggaaagagcgagaagcaagcatcaaaacgtacaccggaggacttcctggctgggcgatattcataaagagcccatcggctttcctgatattggaagaaggaccagtggacatgatggaggatgccaaagatgatggatgtatgcggtaggtgttgctgtccggattgaacgaggatggattcgagggatcctgcccgaaaagagaaaagatgactcggaggaaaacgaaaaacgattagaaaaacgtgtagtctgcctattagagagctttgtagtgtccaaccaagggtcgccttcaccttcgacccagtgtgtgtgtgtgtgtgtgtgcgcgcgctcttgggagctttgtcgtgttcataatgaatgtgtgtctgtcgaacaacggtcgagtagatgtctgtctgtcgctacaggtcatggctttctggtctacgcaatctttcttgtgtgtttgactcccatcgatcgagaggatctgtgccacggaatatctcacggagagaaattctttcggccgatacagggggatgcgcatacacatatgacaatatgataactttggaaaaagaccagacggtgtagaactgggtagcgagagggctctgagcacgacatacatacagtcttgttgattgattatgaaccagacagatgggtatgctgccggttggtttcaatatccgatatgatcgagtcagttcttaaagtggaggaaaag

SEQ ID NO: 2434 - DNA, 9226 bp, Xanthophyllomyces dendrorhous
tctctggtcaatcagtctcgtcagatctgtccagacggtctggaagggaagacaaccagttgcctctgaaggagctgccaacgttgtgagtggtctggtcgcatacacaactctggggatcattcgctttgtctgggtactctttgtctgctcgagcaacaaaagctgagcccttcatcctttgcatcatcttcatccatcgtttctccgttctctttcttgttctcttctttctcttcttcttcttcttcttcttcttcttcttcttgcacagagcctgcggttgcatataccctccactctcgccctcgaggacatcgcttagttcgatcctggtcgattctgcatcttcccatcctgccgataccatccgcatccgtctatattgaactcaacaacagatacacgtacatacaccgcgtacatatatccatccccaccttttctgttcattcttgaagagcttttcttatggaacccccatccttccaccaaggaagtgccgctcactcgggctatggaggagagagtagcgagggcgaaggctccgcccgtgggctcaaagaatggtgggggaggttcaaagtggggaaccatacaggaaaggaacctctgggggccagcaaggagggaccatcaaacaaagactctggttcgtcctctcaggtttcgtcttctttgctcgttgcgtctggtcctcaggatgtccagctacatccatagggagactcgtatgcttatctgccctgaaatctgcactttccgtcggcttttgatcccggtctcaattcctacctcaaacacgaccctcctcttctcaatcttctgcttgcatgtcgtctcttgtattcccatctctgatgcattcagaatcacaactaaagaacaaaccggtgttcgctatgcctttaagtgaggctatcacttacgcgtccatcacaatatcgaccccagcacccgatggagagtattacgtgtggggagtcgtaccaaccgttgtggctagatggttggtccccctttattacagaccaaggcttggtctccccatagtctgcaggatcatcaactgatctggctcgcttgtcttgtcctaccttcttcgatcttggaaaactcaatcgaacgctgggcggatctggttttatctatcttgaacgaggtgaacgattagtgggaggtatctgaaagagactgcgacagaggttgagggtacattcagagtatctgggagctcgaaacgaatggccgagatacaagcgatattcgactcgccgccaaaggtatgtcgcgttaatcggttctgttcagaatcgacgtctgttcataaatctacgagtttggatgtatcttgatctgatgagcgcgctctctttaacggtctactgacaaaaagtacgggaagaacattgattgggagcagtgagttctcttatcccttcatctcaagatttgccaagcccgctgtctctacgattttactaaggaggagggggggggggctttcatccactaacatctctcgcgctattcttgtctggatctcgtgtgtccgttgtaatcacagagttcaccatacaacgcatgacgttgctaccatctttaggcggttcttaactcagatgcctgtgagtaataatcttatgctatcaaatcggtcttccgggtcgtatcattctggagatctcggacactgatgaagtcattctgcctgaaacttgaccggacaatcgttaggaacccgttattccagattcagttcgtctttgtcttcatcttctcttgttttgtaccatgtcaaatatgctctaatcactcaccaaatgaatttgtcggtcttaccccagttctatcaagatgtacgtaccttacttcactcttattttatccattcaatcagcaaatgcaggcctaaccagatgctattgcttgatctgctcagtttcgaaacacatactgttagtctgtcttcttaagtcccgggagtctgaattcatacgttacgactgacgttccgctgttcttcgcgtcgactccatgatagcttcgcaaagtcatacgccggacgtggcattgaagacgtacctcgaactcgtagaacgactacctataccaaacaagtatttgctgctctacgtgcttgacttgctgagcgtgtttgaaaagatatctgagaagaacctcatgaatgctgctagtcagtagtcgttctatctgttggttttaacgaggaagaagaacgctgtcgctcataatgatgttttctcgtttttgttttgttggctgtcacagacctagccgtaatcttccaaccaggaatcctatctcatccggatcatcatctaatcccggcagagcacgctttgaatcagaaagtagttgaatttttgatccttcaccagggggaagggttcgcctcattgttggtcccgagattagtcaagaacccgtatcgaacagaagtatgcacaaactacctaatttctcttcgcgacgcgttgtatttcgactgatcttcttgtaatctcatcaccgtctaaccacagtcgaacatggcaacatcgtccactaaatccgtacccctgcgccctgtttcccctccaaaaccaaaacaggtggtcactcgaccacctatcccactcgccactcgactgtccgacatctttaccgcctctgattcagacgaagatttcgaaggaggcgtcgtcgtcaagacgaacgtacccttctacaacactcacacacttctcaccagatcgaaaacgacggcaggagcaggaggtaccaaacgggtacctagcggaagtcatcgatccaagcaacaaggaggaacgacgtcgaccgaaggcggggccggggggtcgaaatcgaggataaagatggcgacgaaggatgatctggcaacgacgaccaaggcgttatcaggagggatgatgaaagacaatagcatcaacccgtctggtccgtcatactcaaccccatctggacccctaggttcgcagacaccctcggcatcgggagcaacagtcagaaggagaagcaccgcaccatcgagaagagtcgtttccggccaaagtactactggtacaactgaagggttgggaaggagaaaggtctcggggaaaactgcacagccaacattggcatcgacatcgccagtactttaaccccaagagccgcagcagcagcaacaaccaccatcggagaaacaacaagattccacaaaactcaaagaaccaacaaagaaagtcattctcatctaatctttcactcagtgacatgttcttcccttatattaccaccttcttccgtcgtccagttagtatgacaccttcctgttcgtggttgaatatatacctagcctgaagatttcatcctgtttacacgatgtgaatcctctgccaaaggactatcattctagctcagctcgcttatgaaaagaacaccgatttcctagtcttggactttacttttcatttaagtctctatctaccaagtctcacttaatcttttggtcatccgtactctatctatttccccttttttctcatatcgagttaaatccgtttctctctttcgacttctttccatagatgtgttgttcttctcactcattggtcgtgtcttaggcttttcgttctatttctttttccctctatccagatcgcttgttccagtcggttcatatatatgctcatcgacgtttgatcctcaatgggaaggagaatcccaacaaacaagaaaatcccttacgaaagaccgactctcatgcctcgtctgatccttgttctcaccatcaagttgaagactctaggctttgacgactttggtccattttctgggaacgcccaactcgatcaacaaatcaacgatgagtttgtcatgcgttccctgaaccataacttctgaaagggtggctttgggtgatgccgattgcagaggtgagactgttccgtcaagtgacatcagcgatcttgtgtgccggaaggaagagtgagcgggaagattcgtttttttacgtacctgacgttgagccggcacataacttcttgagactttccgagaacgctattcaccaaaagccaaagcgaacaacaaacgtgtttctaccaagtcagcgtgtcttctctgagctgcagcaaaaaagaagaagaaaaagggtataggattcttccttactcttgggttcgatagagaaagtctcgagaccggaaatcaaggtgatatgcttgttggctcttttctttttggtaatcaataccggacggagtgaccctgccctgtgatgatggttgaatcatagttggttgtttgagtcgtgtattcagcgagatagttgaggtagagacgaagaaattaaaacgaacttgagagccccatcctctcctagagaactcagagcggtcattccatctctgatccggtcgaccacatcaaccttcttcatgaaatcgactttctctcccttcttgagacatgcttgagcaagcgtttcgtctagattcacaaacgcctgttgaacgggatgcgtcaagttggcgatagtgatatagtcgaggacgtgagtttttatctctgggtaggtgagcgtctgactggatctgtatgaagggagatcaaaggaagcacaagaatatcagatcagattgcctcggacaaagatcgagaaaagagagaaaaataagaggcctgacgagatctctcgtttcgtccaaaacgcgacgttcttccctgcaggcctgaaaagctctttcacagtcatcgttccggcctgcgtcgtgcctgaggatccccctggtccagggatggcggcagtagcggcttttttcttttctctagcttctagttccccggtggtccggtggggagcgaacgtggagacggccgcgtggttgacgtcgacggacaaaataagatcttgatccttctgagactttgtctttaataaagactccttctccatctgaaaatttgatgcgacgagacgatagcgtaagtaactcaacgatgtgaacggtcgttcagggactgaagattagatacgaaccgccttgacccactttgagactttcttgaaagtcgacttctgaacgatggcttggctcgaaggtgcccataccggtctattaggcagtaggtgtttttcgtaaaatgtcgaactcgcgataggaaacgtcccagggggaggaggattttctttcaaaaccgtgatcaattgaagcagcgccaaccggagaattgtgtcgacctctactccgttgtgagtgtatagtacggaccgaaactaatggttagcttatgagattcgcgcaatatttcatttaaccctagaaagaaagactggatggacctgtggctgttagagtcggttcagaaggcgctggttcgtctgttttcgacgggctaggttccaagctgacattctgtatctgagagacaatctgatcagttccactcgagggaacatcttcttcttcagattcgaactcgtcatcggatcctggaagttgaaacggaacatctgccggtgctttgcataagttccaaagactattgatttagaagataaatcagaatgataggtgagacagctggaagtgtatggagacgacctggtgtaaacgaagagaaaatccactgacgggtctttccaacagtgaaccatctctactgccttccccttcgttcccctcttgattaactttccatcgagcgccaggtaaccgattcccagcggaactttgcaccctgtcgcccagaccgctatgagatcaccttctttcaagtcttcctccttcaatgagtcggccaatccaggcatcatcagatcagctccattgataagtcgtgtgatgacatggggatgcgtatagatagcagggagaagagaagggtgttgaatcaaggtgtgtaacgatgggattagcttgtcgaatgacggggtctttccaaagacaaaccacaggggagtggaaggggtcgatgaaggggagaagtaaagggtctttgaatcgatgaaacgaagaacattgatcggataccacataaggttataccccgagtcagccaaaccctcttttaaatatcataaatctgatcggaggtgaagaagaaagtacttacccctggagcatctagatgggtcagaaacttggccgcctggattccttccggaacgagactctttgcttcgtccggactgatgtcaaattgactagctacagcggacacaatgttccttcttaagctggatttgataggcgcatgagtggagatacttgatggtggcttcttgaacgacatgctgtgaccgttttgaggcagtaagatggtcaagggaaacattcagaactgtaaatgaatgttcagagagcgttgccatggaaacaattactagtggcgactgctttcttgattcccaacgagactcagtcgcttgacttctccatcgtttgactagtacagacaagtatagacatctacatcaactcaatgggcacattgcagggaaaaaatgcacattgtccgaaatatctttcccccgctcaggccagttttctccgtcgagcaacatacggaagccctatacggttgaatcgaatgctaaacacagactggccaacttccttcagtgtaagtatgatcactgaagcaccagttatacacagatacgctgaaagggcctagatgaacagtatggttgggcaagtggggacaggacatatcggtgaggtcaacttgaagtgatcgtggagaaaaagagaggaacttacggtcaggatgtgccctagaaaatcaggcaaagttcggttagacccaaaaaaatcgcgctcggtacatgagtagaattatgtacatacaatatccatgccctagttgattcgatacattgggaaaattgaagacgagatatgactgatcagatgaacagatacaacagcctaaccgttgccctgatggagggatcccaagcgcaccttctagtatgaatgccgaaggtagaccgagccgagctttccaaggcttcagcagggtctcacatgccaagcttgtatccaacaagttatcaatcgtagactagtcatttagagatgaaactagtgttacaacatgacaaacattaaacacgtacttgtcaaagttccagattataaaaccaatgactcccgaaatgactccaacagcatacagcccttgagcttgacctctgatcgtgtcgttcttcggaagtcgctcatcgctaagcaagatatagatgattcgtccagctgagccaaaggcaagaattccgaacgcgatttcatgaattgtcggcgaaagttgatagacacttcgaaagaggtacagtttaacgtagataaagcatgaatttatatatgtgagcttgaacataaggacaaagataggcaaagatagagagaaagaaacgaaccaagtgatggtgataacgatgttaaaaagagctagaaggatagtgaaggagttgacgattgaacggccgtaccctggcgctgtctagtagacagcggaagtcctctcagcacatcagttcgagctgtatcgtatcacgcacaaatcaatacggtgaagacaagatatgcaagcctacctcgaatgagcaccagaaaagaatggaggtcgcccacatcataggaacctcgtctaaaatctggaagcgatgctggagagtagctattcctcatcaagcaaccttcctgagctatgttttgaaaatatggagccagagagtagcgaactaaccatgaaatagtgcgctaccaaccccgatgatggcaattccaatatgacagatgtacgttcgcttaggcattcgttctttgtaagcatggtaaattccgaccaagggaagtagaacggtcggagcattggatatggtatttatgaacctttcggtgaagcatcagggtcaatggacaaacccaatgagataggcggtcaaccaacatggttctaagtacctccaggatcgcagggggaggaaggatttactctgctatatacctagaaacctgataattctcttcgcaaaagtcaatggtcccgtcatgattcccccagtctatgtgatggttgaaaagacagaggagaaacaagagcacaataagctaaggtgaagctatatgacatactcggtgctcatgtgtctgagttgatttgaagagaagaaaaaagctttgtccagatgtgaaaggctagcgaaacttacatccggtctgattgagcatcatgaaattcaagacaaatcgatgaacatcatgtttgtatggtcagaaggtcagcgccaagaccagtcgcccgcgtcgtcagtatagagttcggcgagggagatagtaaaatcataacgtgagcgtttctgaccaggatggagacatacttgtagttgacccggccgggccgaagggagagaatgcatgacttgaggtcaatcaaattgtttctatatctaagagaggtatggtgcgttgtctgtagtgctcctgagtcttcaagaaggggaatggataggaaggagtcgagggagaacacagaaaggtgagaagcttgactgtttcctaacgatagtcggcatgtccattttcttaccgtgcattgagcggtgagggtcaaagtaactaaccatgcgatgtattctaaaatatatgacgtacgtcattacacaataagatggcagcagccgtttccggctcaaagtacatgtccactcacacactcatacactcgtatatatcccttctcttctttagttgatatgacatcaaagctagcagctatctatcggctggccaaagcatactctccagatgctacaaaacagcctaatgcccagtgagctttctatcagatcctgagtagcatcgtcgaattggctatattgaaagaaactcgtctgggatatgtagatcccgggtcgaccagcagtttggaccttttaagccaacatacatttccagtctagcctggagacgtccacggaacgatgaagaggcccaaaggtcagtttcttcgcggatggtatgcaaacgactaccaaactaatcaggatctctactatctgaagcttgtataaccacttcaggacaatggcgttcttcatggatgcttcgcctcttctctcagatcttggtctgcctttcacagcaggattcgatgatatcatctctcttgttcctctgttagtgttttacaacctttttttttttttttt

SEQ ID NO: 2435 - DNA, 4484 bp, Xanthophyllomyces dendrorhous
tccgttaaagctgaccatttatccactcgaaccgtagatatggagatgctttggctgccatcctaggtctctacggaatttatctcgctttcctgatggggtgtggaacaaataccatggcccttatgcttgttaatgttttcatgtaagcttcacaacacaccttacagtccgttcgagatatcggcattgtcgaatcagtctgatccgttgtcttcaatagtgattttgtcgttggagtgatcccaatcattggagacattctggataatttattcaaatcgaacttgtgcgtgtatcttgggctcatttgacctcagacgtccttcaactgacaggcttgatgacttcacacttcttcatgaatcaaggaaaaatctaaaaattctcgaagaccaccttctcaataacacaaggtacaacatattgctgatgcctgaaggtagagatttcatacccaagcagcccaaaggcggttggtttaactcaaagaagaccaatggctctgggaagaagcctggtatcaaagggagcagaactagaagattggaagtgtgggaaggggtggatgtcaagcggacggaaactggtggggatggactggatttagactaatcccatacagcactgctccaggtcgagatcttatagcgtttctttgatacaaatgcttgtctcttgttgttctccgttgcgttctgtagaatggccgaacatgtgagctgcagacaattgaggatgaacttaagtaccaccaagtggtgaagtggccggatgatggttatgcgtaacttatgattcacacgtgaccttatagctgtgcatactttctcggccgcgaaccatgccttgccccaaatttcgattgaactcagaaacaccaacctcccttcacttcaaccgcctcagcctctcgagattcatctagttttatatatctggatcccaggcctgaagacagatgagtagtgagtaatgatcccgttcttaactttcagttgaaatggtcgaccgagaagaagacagcttatcttaacatcaagctcgcaagacgcatttgttaatcaaatcttgaatgtactctaacctattgcttatacttgcctgcttctgcacaaacccacattatcattgaatctctacagaactcaccctcttagaacagctatctcaattagagaacccaacgcctgtggatgtcgaccctgaagaggcttactcgtcgctctctgcaaagcagaagggtaaaggtcaagctatcgatggggcagaggaggaggatgggtcggataacgaccaggatggggagggcagagatcattacctttctgttgggtgggtctatacacaagttactctttatgcgtggttggttctaatcggcttgttcttttttgttcaaacttcgttctctctttggttgtgtggtgacggcgttttgagtgtgtttaggatgagtgatatgcgaaagaacgcggatgcccgaagacgggaagctgaagatatggaaaagtacgggggtgttcgaagaagtagagcagagatttttggagatagtaacagcggaagttcagaagaggacgaggacgaggacgaggacgaggatgaagctcacgagggcgtagaagacgaggaggttcagccgttcggccaggtcgcaaattcttctgatgaggaggacgaagatgatgaggatgagccctcaacattcccagaacgtacacctgcctctcctccagccgagtcgactccgaaccttgaaacgtctcagattctttcttctcttcgaaactctcgatcagaagagcagaacaagggactttccgtcaaacggcagctcgacctattcgagaacttcttgccgcttaggatcaagatgcaaaaggcaatttctggactgaccgggcttaaagttcgtccattttcctcaatcatgataggaagagttgtttgtgacctgtcgagtgcctttctatatcctaactatccttgtacgcgtttaggatcagagcgcgcaggttgagctcgctaacccttcaccggaacttcaagaatccgttaatggctgtattgatcaaattctcacgctgtcagaaggacttttcgagctacaggaggtaagccccctcccagtttgctttcagtttaattttttatgtcagagtctcagctgatagtttttgtttctattatttagggtctcatgaaactcaatgaaccatcgatcgagctccctccttcgaagcgtagaaagaccgaagcctccgacgttgtgtcgtctgattacatcttaccagcaaccgaagacgcgcttgctctatccgacctgtgagtctcttcatcagtttggcctatccctcatcttcctaagaggtttctgcactattttgttcgaaactcattttctttcccttcctctccctgtatccgtgccaacagaactcatccctctctcctccagacgttggcaaaatggtcttccaagattatgaccgctcaaggccttcagaatcttcgaggtgaaaagtttaaatccgtcaagatcggagtcgtcgagcaaattggagcttcccttgagggtctagagggtaggaaaaaagtagatcggttcatgggactcgtctctcaggatgaggctgaatgtgaggccgccgtttggggtgatgacaaagagttttaccagagcttggtcagagacgtcatcgagcgaagaggtggaggtgctggagtcggcgctatgagtggtaagtagtctcttcctaactcccttgtctgctcaaacatcgatcggtatatcatcgtccaacacaaaatcctgaccagaaacggtctacggcggtgtataatcatcaatttcgtttattttgaaataggccaagcaaccttttccaattacggacccaaaaagcacaagcccaccctcgatacacgagcttctaaaggtcgcaagcttcgatataccccccaagaaaagatcatgaacttcatggttcctgagcgaacggaagacttgtggcaggaggagcaggtcgacgagttattcggcagtctgctgggcaggacgatccgggaggagattgaggttgatgagaatggagaagagatcgaaactggcgatgcggctgatcatggactgggtggtcttagagtgttctgatcattatcaatatatgttgtgcaacttgtttcgggctctcacgacatatcctagtgaactctgagtcagacattaacatgagcatatgtaaatgcgaaggagaatatagaatcccaagaggcgaaagaacagaagaaaacagaacagaaagaacaaaagagaggcaggtgaacagtcgacgtgtagtcgaaatataaaagcagaaaaaaatggaaactcgtatggaagtacataaaaacgggtgaggaaataatatcaatgtatgcaaggaaagatctatgaaggatattcaaaagttaatcaaagactaaagataggaagaatagcatcgacaaaaaaaattaaaatttagagaccaaggctagaaacaagggccttcttgtcttccgcattcaaagtgctcaagacagcgaccaagccctgcaacgctccagctcgctccgtctcggcgaagctgataatcttattcgacacgtaggtggatcggacttcggcaacggcagcagcaatctcttctgcagactgctcaatccattcagcggtggctcggtcatcagtgaggtcagtctggacgacagagtcgagaatgttttgtcgctcctcgagagtaagatccgggttggcagcagcgaacttagacaggatgtgctgatagataaagaaagaagcggttagtactactgaaccttgcaacgaaagagtgaatgggacggctcacctcatcgttgagacgtcgtcgaagtcgccagtagaagaatcgtcgagcctcagcccagacagctcgcttcgcgcaacccttggcctccattcgtccgacacgatcatggagatcagcgtaaaggtgtgcaatctgcaagtacgtcggttgaagtagagtctctcttgccttgagtagctcagcactcttagctcgctcctccgcagacttggttgagtcgttcgaggcagctttgagagaggcataggtctcgtccaatcgctccatggtagcgatgaccttgtctcgtcggaacttgatctcaacgataccttccggctcgagaattcctcctcgagcggtttcatcagcgtacatctccatcttggcaaggttgatagtaggatccaacacgacccaagctcctccacgaagctctccgttggggacaacatagacgaacactggctgcttgaagttcgagagaccgtcaacgatcttagaaccctgcttgaggatagcgtcaaacatatcaccctgtcctccagagaaacctcggatgttggcaaggatcatcaaaggaagaccctccttgttgatatcaaagatggattgagcggtcttgtaagc

SEQ ID NO: 2436 - DNA, 10713 bp, Xanthophyllomyces dendrorhous
cgaaagctgcagggttggcaggatcggcagcgatgatcttctcggtcgtcctggtttcgacagcaataacacccataggaatgcctcccagtcgggctcgaccggtgacgatagtcttggcccaatctccaagggtctccatgaaagatcccttgtcgaaaagaccagtcaagccttcatccggctttccttcaagcaaccatcgaggatcgtaaggacctcggggaggctcgtaggtcacagttcggtcccaagggtcctcggaaggccagataggaatggccttgccctttcgctcgggcacatacgagagccactggatgaccttgagagcaccatcgagatcagattcagcgacgagatgcgtggtaccgtttcgggccataatctgggttcctccaagctgaaggttggaagtgtaaacctctcgtccaagcaccttgttgagagactgagctccagtaaggatcatagggttgccttcaacctgaatagctcgctgacccaatcgaaccaagtaagctccgataccgaccgatcgggcagtaacgagagagatggtgaagattccctcctcgtaagctcgagtggtggctccagcaataagaccggatcctcgaagagactcaactcccaaaccctctgcaagaccgatgatggcggtgatcttgtgtcgtcgctcgccgtcatcctcgatctcctcagtggtgacgctggatcccttcttggcaagagtggataaagtttcaggggtcaagtatagatacttaatacccatggaaggctttgcggggtcaacgaaggccgccttgaagatgtgcaagagctcctccgcgataccgagtctagctccactgttggcagagaggtaaattcgaggaaggcccagcttcttggcaatttcagtagccttgaagaagtaatcgtcttccttaggaccaaaggatccaatcttgaaggtgatatcgttggcaatggcaactactcgtcgacccttgggatactcgggagtgagcatagtgaagatccaggcgaccataccacacgagttggaacccggaggtcgctcgacctcctgaagctcgttgttctcatcgagaaccaactcggtagcggtaagaggctcgctaggcacccggaggtgaggaatcttagcagcagcctcagcccaaaccttgcgcaaactctgaacgaagagatcggggtagtcgtctgtgacgccaaacagaacgtcaataaccagtgacggtcagaaaaccagagcatgaaatgtgactaacagacgtaagtcgttccaaccaagtgagcctggtatcgtcggggctgaagactgttcttggtctggtaagcatggttgacaggctgaaggtgaagaggtccaaggtctccgattgacttcaagatggtagtacccttctcggtctcaacctcctggtaggcgtggtacttcacgacgaaacctaagaacgagaaatgcatcagttacaatgtctagactgaataggattatcagttattttggactgcttaccagaaacgttctcaatgcagcatcggatgggggtgacgttaccctcgtcgtcctcaagaaccattcggatttcagaagctaatataccgaagaaacccgttagtcacagctcattgctgaattcaatgccgagagaacacttaccggtcactcgaagtcgccaaagcctctttccgtgcctctcaatgaacccggcaagggcctcctggacgtcgtcgaagtcgacaagaacgttatagatgaagttaattccaacatggttgcaatcggcgtttcgagtctcggctccaacaacctccaaggcgtccaggatatcagtgagcagtcgatcgcactcggagatgagatactcggcagccttcatcgatccctggacccgtccaggtcgaaccaaagcccggataaagaatcgaacatcggaagagttctccttacccactcccttgtagatgtggatctgtctgttgtctacgaagataggggtgaccttgaaattcgagagtcggttgagctcaagctgactggctagagcaggctcgatgtttcgaatcttctcctcctctctccaggggccctgggcaccctcttgtctgaaggtgaagtaggaggggtaaacgccctttcggcaaaccaagaaggtaactcgtcgaattcccttcttctggatctcggcagacatctgcattaccagcgactcaacactcttggcccaatcaagatcagacatgtcgtccttctcctcgaaagcccggatagcaatgttgagaacgttgggcatggcactgtcctgaccatgtcgttgagtgaaatcttgatgatggtaagcagggaagaaagacagaacattcaagagtccgtcctgaacctccttcaagttgttgaagctcgtcatgacaccagctcggaggggctcggtctgactctgcttgatcttgtaggtcaaatcagaaagcgaaccgactcggtaaacgtctcgattcgagtcaactcggggagtagaagactcagcgatgggctggttgagcttgaatcgccaagtgatgactccagcagcgccatcctgaccttgctcatgttgcatatcaagaatactgtactctcggtaactgcagatggaatagatagaactgtcagtcattgtttgggcaagaggagaagaacgatcacttacgctcgaagaacgtagacggtcaaactagcaagaacaatccaaggatcatcgtgcttgaagaaggaggacaggacatcgtagacggtgaatcgagagtttgagatctcagtcagaacatcaaccgaagggtttctgttgaaaatcggatcagagtcagcagagagctatgaactagaaacacatgggagaggacaaacctgtgtccacctccagtctctccgtagtaagaagtggtgacagaagagttaaggatcttttccatctggaacaacctctcctcgtaagagggaagagagcaagagataagaatttcccgagccttcaaagacaccttgctggccaaaggagccctatagatcggaaacagagtctttgtcaacacatcgcaacaatagtttgtaaactacaagaggaaacctacttggtgggcatgtcggcaagcgctttcatagtcttatgaaggaaagaaccctcagtgttgttgaggagctgcatagacttgatcagatcaaagacggagagaacaagcttggatcgagcgctgagacgcgagtgagccaggacgagaccaaggacgtcgttcaaagattctcggttttcatctcgaagttggagaacaatggcctcttcactaccagtagcaaaaacggcctcaacggccaagaacttttgaaggatggtagctaagacgtaagaggcgtaacccttaggaccgccaacgttcttctcagcaataccaacgatgggttcgatctgagttcggaccatagccctctcctgaggtcgcaaattatcgatgtaccgctcgacgactttgaggatctgtgcacacgaaagagatgggtaagcttctggtcgatgtatacagtcataactctgcgatcaactacacacctttgatccagggaactcggcgtgaggcttcgactgagcttcgctgatgacctctcgaatgctctcctcaagatcggcaggcattctcccagaaaggacggaaatgatggataaagcctctccgaaagcaagatcaggatcataaaggttttcagagaatgatcggaggattgttgcagtggagtcactctcgtatccatccaagaccgagtatatcgactcaagctggaactgtagccgctggtgaggtctgttaccgggcaggttagggagaccagtcacaggcaggagaccctcgaagggcttcgccttcttcactcgcgtagggtcatcaagactcaagatcccaataatcgctccaggatcgacggtcacaccggcttgcttgacaaactgaacgtgaccggactcctgggcaatcaagggcaagatcatcttcatgacctcaacctcagcatagatatctccggaggagatgtgatctccgctttcgaccaaaaaccggatgatctttccaggcgagggtgatcggagctgagtggggtcgttctcctgctcaatcaggcaagtctttgcgtctacctgaattcggagggtaccgacttcctccctccagtagagagtgtgggatcggccatcgagaagaacgagcattccaccatcggccaaaggtcggatggacaccacggtctttcctccgtttagatacaatcggtaagtgttgagggaggctcgagcagcggtgaaattgtaccgaacaccctcatagatgaaatcaagagtgaacactgtcttgagagtgtccttggagggaacctaaaaacaggaaacatgtacggagtggtgagtgcctcagtcaaaaacttcatgagaaacagagcttacctgtcccttgtccaatactcgtcggtattcggcccaacagttctcagaagccacgtgagctttcacaattgcaccacaaataacggccagtgatggatcaggcctctcagatgtaagcttgttagtgatcaacccatccaaccaagcggtggtaatggcgttctgctcgaaatcgctcgtctcaagaagagtgataagactagattaaacgtgatcgagacagatcggtcagttcatcgtaagtgattgaaaggagatgtaccaggctatacgcactactcgacagtggttcggaagtctcctcgaatggaaagctctttcaaggcgataaccatattctttctggcagtcgttcggtcggagccataagcaaacacgtgaccgaattgagaatcggcgaactataacaagagataagccagttcagattagatagggatctagtgtgattatattgttggcgaagaaacttacactatgaattcctccagtagctccaacagagaagtcttgaaagtcaaacacaatttaagagtcagagatttgttccacataagaatctttgagaagcctctgtactcacatccccagacgttagtattacttctgaagttcaactcttggatatctccggcagacggcttgaacccctcatcggggttttcactcgtgattcgacaggcaatgacgtgacccttgggcctaggcttcctctgagtctggacagactccgctctgctgctgtcgaagtcgatctcggaaacagtgtggggatcgagaccgtagaggactcgaatatcccgaattcgagaaagagggatacccatagcaatctgaagctgagcagcgggaaggttgacacccgagaccatctcggtagtagggtgctcgacttgaagtcgagggttgagttcgaggaagaagaatgagtcgtcggcgtgagagtagaggtctaaagaaaatccggcaaaagaaaagtgatgtaagttgactatctcgaaaaaacagaatgagaggtagctgtttgttccttacattcgacggtaccggcactaacatatcctactaacttggccaacctgacagcagccttctccatctcttcgaatctctctggacgagcgatcgtgacgggagcctcctcaatgatcttctgatgtcgtcgctgaacagagcaatctcgaccgaacaaagagatagcgtttccgtactgatcagcaaggagctggacctccaaatgtcgagcagatccagccaaggccatgatgaaaatcggagatcctagaggtcaagaacgcagtcgtcaattcatgagtgggtattccttcttgaactcccatggtagagattgtgctcaaatctccagtcaaacagagtgaacttacctggcacctcggaagcgacggagttgtaggagttcttgaatgtgtccatgctgtgaaccattcggataccctttcctcctcctccctcagaggccttgatcataactggcaaaccgatcttctcggctcgcaccaaaccatcctccaccgtctttacacaagcagcctgatatggcccatcgggcacagtcacgaagccctgagggctgagctctgtatcagtgatgcctgatccagaccaggccatacacggcacctgggcagactgggcaacgatggtcgaagaaatcttgtctccaagggatcgcatagcggatccgggaggaccaatgaagacgatcttgttctttgaggcggcgagagactcgggaagtctggggttttccgaagcgtgacccctgtcggatggaaagaaagcgcgtttaagtggacactcttcttccaacatgttaaggtcctattttacttaccatccagcccaaacagcatgtatattgaatcgctcggcaatgtcaacgatgaggtcgacgttagagtgattgttgttgttagttcctccaggaacttcgacgactcgatcagccattcgaatatagtcgcagttcaccttcctgtatggcgctcaagttgaattaattagaggatgtccctgactcaaggaaagcttatgtgattggtacgaacaaatcttctggagtggccattaccgtaaattcgatggctcgctcatctccaaacgtctcgtaagcccatttacgaactgatcggatctcttttacagcagcgattccgttgttggcaatgaggacctgagaaatgatacagaagcaatttagctccttggccctgaggctacgtgaaggaaaaaatgaaaattactgactttggtgatgaccgtgtgaccatcttgacttctaacgaaatcggtgacgcttgacggaggggcgttctcaagtgcgtttccacctggtaaaggggagggaaagagcaaaaagaacaagacaaaagagatcagcaaccgatctccgatcacagaaaggcattcttttgtccccaaggaaaagagcgcggaaaattgaccagatgtaatttccctctcttcctagatcgtttaagaaaatgcagggagccagacaaggaaaagaacaagaacgcttaccgatgaaatgccttacgctctcgtgatcgacaaccatcttgtgagctttgttggttgagtacagatgtgtgtgaatggaggaagatggatatagggttatgtgtgagggcccttggatgcaaagttacccacagatacgaaaagagatggaaagatggaggaggaacgagaaaagtaaaaacccaaaagaaaaccgaagaagagtagatggacagggaggcgagttcgttcagagaataggagggagtgggggaaggaggtcaagaagaaaagaagtaacaagtagagatgaagggtttaagaccaacttgacgggatggggattcaaagccttgagaatctcaaccccctggggaatttcggatgaggttggttgggggagcaaccgctgcttacctaagctatatctttattaatgaactgcgtattcttcggaatttcacggtcttactaggattttgccaatcattcaggcttagggttagatgcgtctttgtactttaagatatatgaacaatagtctatgaacactttatgtttccccaaccccatatataaaaggcgatcgatgtgcgcactctcaagatttaagcgttatcggttatcatgaagcatggatgtttcgaacagactttcgtaatctcatttatcactccaaacgaggttcacttcccaaattcctcgaagtgcgttgcagcacgccactcgacctccggagttcagccacagacggacatcatccaaggtgatggtctgctcagctatttctcctttatccaagagctcctgacgcattagtccaggcaagaacggggtagatgattctattgatggtgtaatccacttctcagctaacggtggaaggaataagatgttcgagatcgcggtctcagtcactttatgtgaggtcgacgagctgactgggctgtatagaagaacggtcatcgtagtcggaagtagttgatctatgaaagcgcatcatgttgaatgtcagttgccgttacattttaggaagtgatcaaagaaaacatacgagctatcgatgtatgagtgtcatatattccccgctgagaggtcttatggagcaaaaagtcacgatcgctgctttgtgcgcatactggctgaggagaaatcagaacctgagataaggcacacgttccagagggagttgagtcaagccgactgagtgatccgttgaacagcgctagatggaacgaaaggcaaagagacaaagacagggtgaaccaatgtatatcagagttgaaatctggtggccataagaaaatcggaacagtacatacgagcagagtcgaatgcgaatacctggatgtcaatgattggaagatcttgatcaatttgaacagacgccttcaactagggcagaataagagattcgattgtcaagtattgttctagttaatctcgacgccgcgacattggaaagaccagtatgtacacgtaagttcctttgtctgtctgttggaggtatggatgcttctagcgcggcacaaagagaatcattccaattgaattggccaagtttcgtgtctttcgaaaagtgggaccaggaagtagctaggcgttgaacatgccgcgtaaacaggggaatttgagcagaaatgtgatcaccaggcaaggtgccatcgtaacggagggtggtaaagacttcaaacgattcgtccggcggttggagaggacttgatatgttattaatacactcgatagaggttctatgttgcacaagaaagggagattagtaataaggctatgggtggagtgatctcgagatcagctatcaagctatcttgttgctcacgacatagaatgagatggaatagatcggatcgaagctgacactaagagaaatagagggaagaaaggaaaaagcaatagagaaggaaaaataaaaaattgtgtccctgcgtgattgactttgtgggaaagcgcgctttgatcttttcctttgccccttcctctcttgaccttgtcatctttgatcccctttccttcactctgttcctcttttctcttggtcaccttacgacaccttaataccccaaactacatacatactgcccattgtatagataatgcgtgaaatcagtacgttttctttctattcttcttatatataaatcatcgacaaagaactataaaccttcgagatgtccatcttttattcctctgtctgattccaattcttttctgctcatccccatcgcccaatagtcaacgttcagtgtggtcaggccggtaaccagcttggaacggctttctgggaccacatcctcgtggagcacggacttgatcaatcataagtcccctgcttgtaaactgccatcgccttttaattgcaaagcttaccttgtctttgttgtgtgttttggtgtatgttccttcttcgttgttattctccgatctagcactggtcagtacattggaaacgacccgtaagtctatgctgtcaagattcaatggcttgtaatggacgtccgcctaatgcctggatgttattctttcttcctctgtcttgcagccagcagctcgttagatcttcggtctacttcactgagggttagtttatctctgctcattttatacttcgattagatctaacagtacctttacaatatattcttttgttgtacggtgcatgttagccgctgccaacaagtatgttcctcgaagtatccaggtcgatctagagcctggaactatggacaacatccgaggtggacctcttggaaaggtatattttgatctacacctcgatgttttcccaaataacatatggggctgattctgagcaaccgcatattgtagcttttccgaccagacacttttgtctccggacaaagtggagccggaaacaactgggcgaagggatattgtaagtgcaacatgcaccagtttattaccaccatcaagggctgataccgaggttatctatcttacgtagacaccgaaggagctgagttggtggacaacgttttggaggttctccgacttcaggctgagcggtgtgagcttctccagggtttccagcttctccactctctcggaggaggtaccggatctggattgggatctctcttgttgaccaaaatcaaggaagagtaccctgacagaatgttggcctcctactcgattcttcccagtcctagggtatgtctgattggtaaaacccatcatcggttttgattatatgctaagatgactccatttttatctcgcaggtctccgataccgtcgttgagccttacaacgcgttgttgtctactcatcaattggtcgagaattctgatcttgcttgtgagttgaaatactttgtgcatatagtcgggtttgttgctgatgtatacgcgatatgacacgtatagtctgcatcgataacgaggctctgtaagttcacttcttacttctgatctgcgtaagaccgtaacctgatccgtcatcatcctgactatgtcgcgctttgattctgatgatagctacgatatctgcatccgaacactcaagacaccttctcctacctacgagaacctcaacggtatcatcgcccgagttatgagcggtatcaccaccacccttcgattccccggacagctcaactctgacctgcgaaagctcgccgtcaacgttcgtccacgtccgctgaatacatggctttgccagagtgtatcgataa

SEQ ID NO: 2437 - DNA, 3474 bp, Xanthophyllomyces dendrorhous
agagtgtatcgataaagacttatttgatttctatgttgcttgggctcgatagatgatccctttccctcgactccacttcttcttgaccggttacgcgccccttgtggctgcaggaagccagcaatagttcgtatcctcacttggtattggctcattgaattcataaactgacgcatatatgcctctcttttctgaacagccaatcgaccagtatgattctttctttcgcatagtcagcaaacccgagcaaaaatgctgatgattcttgttcttctttgttctctaactttgtttctctagacgtggctgatctttgcgcaagtgagttttcgcctttcaagatctcttactcccgtacgtccaccaactgttcactgatacctctctttgatgttgtttttgttaggcatgtttgaccccaagagcatgatggctgccaccaaccctgtacgtgtgctcggacctggagacttccgtccttgatcctgatcggacctgtctttctcgtgggcgcctacttacctgattcgtcttgacgttttatttttaacaaaatacctccagaaccacggaaagtggctgtacgtttgtattttgattaattaggcacatgagcttgggaactgacacgcatatatctgttgatgtcctcggaatcatcgaaatcaaatgatacaggaatgttgcctgtattttccgaggaaagtctatcgctatgcgagacgtagaggacgcgacttataacatccgactcaagaactctgctggcttcgtcgagtggatccctggatcggtcatggcctctgtctgcgacggttagtgttctcgaggcgatatttgataggaggacgatacacaaggcatatgatcactgacgacacaaacgtgctgcgatggatacagtccctcccattggtatcaagcagtccgctaccttcatcggaaactctacggccattcaggagctcttcaagcgatcgcactctcagttctcggccatgttccgaaggaaagcttacttacactggtacaccggagagggtatggacgaactcgagtttaccgaagccgagtccaacattcttgatcttgtgtccgagtacgagcagtacgagcagtctggtgtcgaggaggatgaggtttacgaggaggaaggtggggaggagggtggatacatggatgaggagcagcagtagatttgagtcgtaagtctttggaggactgaccgtgaatgaatggcagatgtcgtttgttttttctttccaacataccttttcaccgaaaaaaacaagaaagcgtttgctccttgggtctactctttctgcctttttgaccttatgtctcaaacataatttttccgtctcttctactatttcctcatatctgttcgtttatcctttacccgatctgctttctatactctcgctctctattgcttttctcgatacctcaacacaaagagatttcagtgtttgaacgggccactcattcagtttgtctcaaagttcacggaaaagctatagacgtaatcggtaaccctaacgaaaagaggctaaaagaaaaacaaacaaggctgcggccagtggcgcgtctgaaacgtggacgcgtctgtgctccgaagaaggtggggaccgatggctcggtcaatttatgcggcaccttccttctgggaatcaataaacttgaaaacctctaagaggtaatcgtcgggctcgatccgtcctcgttgtagtatccatctttctgagctctttgctttatcgagtttgacagtctttcatttatattgcgagctgtttctagtcatcgtctttttctccttctcaactttcatcgtcaaacttcattcctttcttttttggccagatcaagttcccttgacattccttatcggactgtgtcattcctttctcttatcacatccctaccggaaacttctctctttgttcaccactttctttctattgtcccgtcaacacacctctttttgcatctagccatcatctcaggctttagtttatctacttaaaaaatcatggtccagcgaatctcatcccccattaggtcatccccggtcagatcattctccctcggtctctgttccccaataaaggtgccaacgatcgtcgtcacgccatgtgagccatcgagagagccttttctatacatgtcggccgagaaagggccagtctatccatatcgatcgtcagagaggtgggtgtcaaacaaagaacctaagggaaaaaccatcagatgggtgctgatcgtggtcattggaatgctggcgctactttctcaggtggtcactaagcctgatctctttccctataaagatgttcgttctgtttcgtgtttcttcctcttctaccgtggttgttttttcacttgtggcttcatgagacaaagttttgatcatcttcctttgctgatggtaatccagatcaaaatgtcaattccctcacgcccgatctctcccacgtttcttttctcgtcccctcatccctcccctataacaccatccgatgacttggcatcctcctcctcctcaaattctccttcagactctttctacaaaagatcgttctcctttccgacctcattcaccacttcgttcggaaactggaaagttaactggtcaaaggagaacgagacactaatgatcggttcggttccggcctctggtcttaggaatgcaggtttattgagatttctggaacatgggaggtggtcgctgatggaaagaccgacttatcatacgtccgagcagatctcgagttcacatcctggaacaagttcgcatgcgtcgtcgtagatgatcgatcgatctatggattgttctcacgaaccttttacttccttttgtcataccctcatctcttccggtcttttctatctcattcggtcttcgtcttcgtctttctcttctgatctcttcaatatctttaggatttcgcttggaacatattaccagatctcgtccgctgtcatttcctgccttcaaggaagacagatcctgtttcgtacatcatctttcgtctttcgtctttcatcttttgtttgttatgtttattgacgacagggcatattctacatctagattttttcatatcacgctcttttcctctaaccatcctgacgactcaatgcagtcgtcctcatacatgtgtcttcattgatttatccttttcccattcctcctcttttgttcttactggaaccacaggcgggtatgttgagttttgatcgagaccgatgattactcatgacgtctcttgatatgatgaatgattcacccttgcttgatcgtcttttcttcttcttcttcttcttggttttccatggtagatatacaactcctcatattcctttctgacacaaaaaatcggtaacaacaacaagactagaagagacaaaagaaggaaaagaaatagaggaaagaagatcaaagacaagtgaaaaatagagaggataggc

SEQ ID NO: 2438 - DNA, 15950 bp, Xanthophyllomyces dendrorhous
aaaaatagagaggataggcagaggcagatggaagaaaagaagaaagaaagcgaagcgacgcaatctgaaggaacaccgagcaaggtcgacgaattaatagtcgtatttgatgtccttggaaggatcgatacccaattcgttgtaaacatcttgttgggtcctgatcttgatgtttgagttgtcgggaacagttccgggcaagttgttcaactcattgaattcctcgaaagtcctgttgatttagagagatgaaatgtgttaggaaattagccagatggtcatgcccgaggaagagggttgaagtagaagcaagacgtactccggctggagaatcattccaccagaggatacagttggatacttctgaagagagatccgcatcctctcagcgagttgtcgctcggtctccatcgactcgaacctctctttgatgatctgctcagacgacggagaccagtactgaaccagtcggaccaggtacggtctcttatcatccggaccggtcttggcggtcgaatcatgggctccccacgaagggtcgttaggcttgaactctcgttcagttcgggcgggcatataggtgatccctagataagctagcaagaacactgcggccgtcttgaggtacaaagggttagagaaacctgttcaggacatccaggattagattcggttgaaagtcagtcccaaaacgaaaaggatctcggagatggagggacagggagaaggagtacacggggaggagagaggtgaaaaaaaaacgatccagtcagaccggagggaatagccgtacctaaatactcctgttcgaaaggttcctgttcttctccaggataagtaaagtgttcgtgtctatcatgactttggaatccataaccgcttcgtccatggttgatatcaccctccggagggacgctatgagcagcagaatgtccgtgtacggcgtgaagcttaggagatggggttgtgaacctggccgaggtgagagcgatagatcggtttagagaaacagaggacagagatagtctagaaaccagaccagccgtcgaaagagggttgagcaagggcatgacaagacaaatgttaccagagagaagagagagagtgtgtgtatgaacgaaggagaaagagatgaagaagagagagtatcggatggttccagagatggaaagtggaaggagaacaagctcagagactaagagggtgattaggaaggtgactaggaaggtgactaggaaggtgactaggaaggtgactaggaaggtgactaggaaggtgactaggaaggtgactagagagttattagaaaagtcatcaggcaagtgattagaaaatctactagaaaagctattagaatcgatccaattcgccaatcctcttagtacaacccggccagatatcttaggcaattcatctggcgctcacgcgtcagatcaaggagacgcgtcgaaaatacgctgttcatttcgttactcaacgttctcaacatcacctgcttgaatcctccttcatactaaacaaatacatacacacacatcgagatgagcgaccaagaaggcctttcgtccattccagactctcctgcgccagcttcgatatcagctaagaaaacatcgaaagcaccaccaaagacaacaacctcgaaaacaggatccaaggcgaatccaaagacagcatcgaacacggccatttcaaagtcgacagcagccaaaaaaacaacatcagcctccaaggggatatcgaaacctgtagcctcggtagcgaagaaaggcaaaggatccagttccttcccgatctcccgagttcagaaaatcattaaagctggtccgtcggtttatcttcccgacgtctcgttacactctgctcattcgctgcttgacgctcaaatctaacctcattcgcctcgctcaaattgatccatacagatccagaggtcacaaactgctcgaaagaagctagcttcctgatttcgcaggctaccgttcgtatatcaactgtatacctgttaaaagtcctttctgtctgatggcatctcgctctatttcttcaacaggagttctttgtcaagaagtttgttgatcaaggctatctcaagtcacgaacagacggtcgaaagacgatccagttgaaagatctaagtacgaatccaaatcttacataaaaagagagaaaaaaaaggagtgaacgagaacaaaatgatattaatcgtggctatctgagcaatggacggctagctgatatttgtggaattgatcggttctctatattttctgtggtaatccttcagccagtgttgttcgcgctacaccagatttcatgttcctagaaggtatgtccttccaagatgacagcttaaggagtcttcaacatcttgcatgcgccgagtatatgcaattcttgaaaaacaagactgaattacccattcaaaccgactctacccatcagagttgatccccgaccccgtcaccttaaatcaagctctagccatgcgtgccaagaagcttgccacagacgatttgccagtcggtatgagtgaatcagatgaaccggaaggatctgacgaggaatctatcgatggagaggaacagaccgctacgacgagtgctggccgacagacgttctttgccccaaccggctcggctgttgccaaaggcaaggggagaggaactggagtaacaagggcaagaaagtcgttaaagaaaggagaatcgtcggctaacggtacttcatcgacggctaagaagacgttagtcctatttgctctctcgttctttctttctgtgtatttcgaccgacgaggatctgtctacctatcagtcgagaacgtgctgatcgtgtggattgtttttgcttttattcgctgtgacgaaaagttccgaaggtgttgccgatggtgaggcaacagaggatgcaccggctgccgaggatggcgcgaccagcactgatgtaccattggtcgaacaatcctcccacatggatgttgatacctcgtcgtagattcgattcaagttcatccccatcttatgagtgaaagaaacatcacggatacatgtatatgacgaacagaccaatacaatcgtcaactgcttatgtgtatgctgaccaggcatctttgagtttatcatatatgtgtgtgtgtgtgtgtgtgtatatactcgtggcgagcaacacgttgcaaataaaagaacggacatgtacccaatagatggccattatcatgtccgcgcggaacgaaaacgttgtggtcatcagcaagaatattccgttaacattctcatctcctttttttttctcctttttttctcctttcctctccaacactcggaacatcacatctcttccttcttctggtctcaccttcctctccagaagtctcttggccgaattatttgtttcgttcggttcaaccctagactccagcggcggccgtcaagcgtccaaacagactcgccacctctcgatcattctcatcaattcttgttcagagttcgattcggccttctccactctcgttctcaccgatcatctctgctccttagcccggttgaggctacctgtactgaaccatcaaacacgtacacaagtcctacctatcgctctctacaatagagttcattcagcctcaagagtctgaggtcatcaatcttacttgatcttccttctggctggctgactcgcttgctcttgcctctgttcttctgacttcctgatccaatacatccgatcttcatctctctcttcggacaaatccctctatcatcatcacctgccttttttttttgagacgagcgatcagaaccattctaccaagcaccaactgtcagacgacgagaacatgtccagatccttgtctcaggaggatagacagctggagcaatctgaagctgttggtcgggatcaacaggccgtggagcctacgacctcgaacttttcgaccccatcccgtcagatagatcttgatgaccgaccatctgaatctccctctcagtctactgtttcctcatcgtcttcctccacttcttctcctcatgacaaacatactcaaaagtgggcagctcggaatcctgcgttaccatcccctttgagaaatcaacatcctaatcaaagccctcaaactacaactgactcatcgctttccagctcgtcatcagctgcttctcctgcccttgattcatcagccaagccggatcaatcatccttgggcacaactcactcctccgccagggcggcgaaaccgacatcacttccttcatcttctgtgccttacacagcagcatcgagtccgctaaaatcaccatgcttcgtccacgagtatctaaaccagtcggctaccctgtccgatttcctccaacgaccaacacctcgttctagcgaaaataccaaagagaaggattcactcaaggaacacgttcaacagggattgcacagaacgaagagccaaattagacttgaaagaggagaagcaggcgaggatgcgacgatagccctggccgatgacgacgaagatggcagtgaggaaaatgaacgggatggagtcgagagtttgacaaagcagctagctgaaacggccgttggagttcgagagatgtccaaacaattgggttcgtgatctatcgtttatatcctttgctttgtcggtctgacttattcacaccttcctatacttatatgttgatgttcacattccaggtcgaacccgagtgcgatcgaacatccaaaacattcttatcgtcacaaaggcgcgggacaatcgactcatcaagctcacgagacagcttgcaatgttcctgatgttgaaaccgaggggcaatggttctctgggagaggtccgaaggggtcacacggtgtgagtgaagcgaggtcttcgagttcctatactacatctgatacgaatgacggacgctaaccttctcaatctgttctgaggtgttagttatgttgatgcccaactccggacatctaagcggtttgatgctgcaggtcagttgtttcatctcctgatgtgttctatctccttttgaggtattttctatcgattgcaaatatccagatctgaacaatcaatcttttaccattaatcgttcagggatggagagagattatccagaactctttgctcctcttgggcgccgacgatcttcttcctcggctagcatcaacacgatgaacggatccgtctattcggagggatctggttcggtttctcctggggagggacagcttaggtattggacgagtgatatgtgttcgaagagtccgcatctgtttgactttgttgtcactgtgagtatacgttcaatcctacttttaaagtcatatgcctagacgcgctgacggtttcttgtatatgcgcgcccaaagcttggaggagatggtactgttctctttacatcttggctgttccagaagattgtgcctccggtgttacctttcgcactcggctctcttggatttttgacaaactttgactttgccaactacgagtccgtcatgaactctgcgattgataaaggaatccgagtcaatcttcggatgaggtttacctgtactgtttaccgagccatcactccggaggctagcggaaagggcctcaaagccgttcgcaaaagtggaggtgaaatcttgatgagtgagcttggaaaaagtgggtgggaagcattggaggatggtaaccagccaccggttcaaggaaaaggaaggaaggacaaggaagtcatctgtttctcaactagaccggttgaaactttcgaggtgttgaatgatctggtggtcgatagaggaccaagtccattcgtgagcatgctcgaattgtttggtgcgttttttttgtttgccatgccaagctctcggttccttcttactaactctatttctttctccactatcccggaatgttttttcacgaaggtgacgaacaccacatgactacagttcaggctgatggactaacagtttcgacccctactggatcaacagcgtattctgtaagtcatataagtcttatgattcgagttgatgtatactcgggactgaccagagtctggcgtttcttctgccgttactctgacgtctctcagctttcagctggaggatcattggtccatccagaaatccctgcgatctgtatcacccctatatgccctcacacgctctcgttccggccaatgttgcttccggatagcatggagtaagaatatagcgtccgcttttctttttctctcttgttctagttgagaactgatctgggttcttcccttggcgttctattttgcttgaatcaaaaagacttcgaatctgtgtgccacataattctcgaagtaccgcttgggcaagtttcgatgggcgcggtcgagtcgagctaaaacagggagatcatatcaaggtcgttgcttccaaataccctttcccaaccatctgtgctgacaaacagtcgactgtgagcagaatttgacccgctttattgagattctgttcaacgaactatgggagctgacgcttcaatgcgatttctgtttgtgtcttagaactggttcaatgctattcagcgaacccttcgatggaatggtatgtcatctttattcagttttacggattctgcgaaagtatggctcaatctagatatggccattttctatctccaaatcttcagatcgcgagaaacaaaagtcgtttgtcatcgtcgaagagcctcgagcgccaaaacctttgagaccacctcaggatgcggttagcaattcaccggcttctgatgctataaagtcgcctgaagatccggagattgatcttgatgatgaggatgaaaagttcgatatcgacgagtaagccattctcattcttcttggcctcgagtgcctgccacctggagttgtactgacatcgatatctatcagttcatccacagtgaacgcgtcgattgcctccttttccggatcatcagaccagaaatctacgacggatgcttccgctgcccctctatcaccgtcctcctcgaacgacgactggaccgaacctcctgacccacactcgggagtctcaacccctggcagatatgcaggttctcgttctcacccgcctacattgaatgctcgccatatcataggtgctctggccaagatccctcaatatcaatctcaatcgctatcgtctaggccaacatcgacaagccatcatatcccgcccgtcgagccgatgcttcgatctaagtttacaacaccggcaaatcttcggttgacgcctacagacggctctcgggcatcgaacaaacctcaaccggccagtccgtctttagccgaaagggaaaattccgtcgctgccgggtcaagagataagtcgacagtcgatcaatcagcaacgtcgtctttaccggcagaagctcagacgcccaaaccgacggatagatttagaaagcctcatccgccaccacattattcacatcaacaacgccttcagtcatccaggggcagtcaatccggttcttctcgcagtaatcgacagagggacacggctgaaggaacgcttaacgcgaatgagatgagtcgggcatttgcatgtgagttcaattctctccaacattgatttaacagggctaggtgctgaacctttcgtttgtttcattgtatagtctttggccaagacgagtcggatagtgggatgagtgaatctgataacgagtaggcgtggctttctgtgttatccctgtgctttctttctttatcatccatgctttatatcatgcaatttgctactcagtgtcccttcgttcatctgtttcttctctatctcatcagtagtatccttacctattgttcatccgtcaaagccattactttgtctctacgcagaacttaaccatcttgatatctgcgaatgcttcaacgagataagataaataaacagaaagcttatcatcaattttggaaaaaaaaaccattgaaatccactgaaattcaacagatagaattattcctcttggcctgttaagttgaccaaatcaaacctacaacacgaccagctctccaccaatcgatagccatgtctaccggtctccctagaaatcacttcgtgcccgcacggctaaagccagctgctactgaagtcccggaagtatgaatattcttctgaggctgcttctgttcactgaaacccttgtgcttaagcttctttcccttaccgaatgtctgcctttcttcttcttagaactacaagaaatcaagtcggcaccaagcaggaattaagaaagttctttgggtatggcttaacaggtggtatgaatctgaaggtcaagctcgatacaaatcccaaggcgcgactgagaaggatgagttgagtgaagagaggaagaaagcattggcggtggtggatttggcttgtggaaggtctgtttcagtcttctccttttgcctacaacaggagccactcaaacttattagggaacgttttcatatttggcgaattattcagtggagagatcacagagttcttgactcaatggtatcagctcggtcggcttggaacgaacgtttcctcctccagcgacagctcttcttccgtgacttcaacccctacgactggacctacaaatctcgttccctccatccatcccgctcttcaaacaaatttgaaagctccactcgcatctcgacctgctttcatcccacccgctcgtcgaaaaccagtgtctagcactcccggagcctcctctcagacggatgcctcgaccggtagtccctcccctcaggtgccgtcttcgttcggccagtcgtctctgaaaggaggtcaatacgcatccctcgtcagaccgcccgctctaccggcatcgttcacatcgcttgagatccttcctaccgatgcgtatcctactactcacaacccgctgtaccaacaacggctgcctgctggaaaccctgcttacccgacggatcttgtcccattaacgttccatcagatcgctctctctcaactttctttccctcgatcgttcaccgcttcggaggcagaaccgtatccaaagttcgacatgatcatctgttcgtttgccttgcatatggttgaagaagaagacttggctgtcggtgcttatggaggcgaagcctacgacaaggaacgcaaggaaaagaagaaatcagagttttgggctctgctctgggagttgagtttgagggcagaatggttggtcgtgttaaacacaaacaaacgaccggtcattggagaatctaccggctgggctagatgggatctggcaaactggagaatcgccaggcaggaagggtttggagggaagaaggaggacgaagaggatgaggaggacgaagaaccggaggagggagatgacttggagagagattcagcggttgaggtcaagcgagacaggtgtgtttttcctcccctttaatcggagaatttacttaacgatctgtcctattaaaccttggtttccatttcgtttgttctttaatcttcacgaaattcacacagggtccgaatgagagtgtaccgaagcgtaggagggagcgcatagattcgatgaatacgcttctatttgagaagagaggaaattgaaatcgcattgcagataaaacatgtctatggaaagcaaagcgaattttgacaacgcgtagaactacaacaaaagacactctgattaagaacaagtaagaagaaaagatgatggttttgatatcgaatgagataaaagatgagtgatgaaatatccagattgaagactttgagcaactttaaatgcggctccatagatatataatagtcaaagcagggacaaaggaagaggcttagccttcaaacgcggcggtttcatctaaatcgattccaaattcttctttggccattgcctcaaattgtttttgcaggcgttcttctaatccaccctcagttttcccagtaacgagttctgtcacccctgttcaatgagaaaaccgaaatgtgaaggcatctgatcagcggcggaatagaagtatttctatgcgaggaaacaacacagaatggaacgaacattggtacagcttgtttgtccagaagccaatatcgatcaacttaagcgtagcctcgaacaaccagatctgttgcagatctcgaagataagcactcaagccgacctgatagattgattgattggctgttggagaggtaagtgcgtaacccttggcggcccactattgggcgagaaatcaaacacgaacagaaagaaagtcagtttcgaaaacacactgaagtcgattaaaagattcgggtttgaagaagagatgaaagtacggaccttggcagtgatgttgactctattggacggagagccgaggccttggttagcagcttgaagcattcgctgagctcggaccaaaaagatcaattccttcattggttcagagtgattcagccaagaagcaggatcagtaatcgatatcaaaagagaaagtgagagatagagaagcaatgaaaacagacgaactcgaggaatgagctgctcattctccaaaagtgccttcaaccgtctcttcatgtccacctgcagttcgtattccgtcatctgctctcgcttgaggatttcctcactcttcggcgctttcttcgacgctcgcagccgcgttggtctcaagaggatggccgaggcgaacctgtcggcggagacaacacagtaagaaatcgtaagtcttattgatcaggagaaaaaactattcttgacgaggagagtactcacatatcactgtcaaaggtcacaccccatgcccgagccgtcttctcaatcgttccaatatctagtacaaacaatgagcgccaaagtgcagagtactctgtcctgaacttctcagacaacgggatgtctattcagatgaagcataccgatttcagagaggttgttaattgattgattgagggacgtctagaggcaaagagaaagacattgaaactgacagagaccgtgatcgatcaaaataacctgtgggtatcttgggttctcagggttgggtctcacgaggatgtttcctggatggggatcacaatgaacctgaaataagaaatgatcagaagagtcaagtgttagtgaaagacctcaaaaggtcaagcgaaagcatagatccattaagccaggcgctcacccaaccccattcgaaagtctgacaggcgaacagatccaacactatatccatcgtccttctgagtccacctctgaagtcccacttgtcaagttgttccctgtcatttattcgacatccgttgacgtattccatcgtcactgtcgaatcagaaaaatcgtataacataggcgcgaaaactatgtcagcgaatatacatttgagggcacaagcactctgaaggatgattgctgaatctgaagcgaccgaagactacgaactgattcgctcgccactgtattgtgggtatactttaggaatatagacttggccttgtaaagagggtgttttcgacaaaaactgatcggttcttcgcgaattatcagctgccaatgtcgaacagaaatatatgatatgaaatatgagttaagagaacttgatatgccttttgattatcagagaaacacaaaccttcgatcctaaagtctgtctctctgcgcatttgctcagatacgtcttaagatgtcgagagagaaaaaatttgagaatacgcgagtgggtgatacgtgttgaagaatcaagccaactcacaactggctacaaagtaagtgggataatcgaatacggcctgcatacaccacatcatcgtccggtaactccacagatccctgagagagaataagaacaatgcgagtactgaattaatgaaacttgttcgcgctgagtgacagaggacaatcttactcaccactccacctgtttctcgatcgccggtttttggaccttaacggctacctctctgccatccttcagcttggccttgtgaacctgggcaatactggcactggcaatcggagttctctcgaaagagtcaaatagctcatctgggtgggctccgaactctttgatgaataccgggagaatctcatcaaaggagacgacaggagcggcgtcagagaaggatgaaaagggttttcgataagctggcggaagaacggcggcttgggtaccgagctgttgacctgttttcatacatcgatacgagccaagatatatgtgtgtgtccataagaccatttgttctctatgagacaaaatatttagtagaaggttaggggacgaacctagcttgatgtataggcctgcgttttcattgatcaagttggacacccgggtcgctgtccgttcatgaagctcgttgattttctctgactttccaggggaaaagttccatttgactgacacgaacaaatcatgagtcgtggtgagctgagagaagtaaggtcaccggctgacaagagagaattctatgacttacagtccaaggtgaccaccagtctggatcaagaatcgaccgattaatcgagaaaagtggtgatcgacagtcagctcactcaaacagcttacgctagagatgattgaaacaatcaaagagaaaagaaatttttgacgtacccagtccagagggttctgatggtccttactcctgtactcgcctggaacttgttatcgtatatgtacaaccctgcaaccgttcctccgatgatccagccgatgctgtatggcttacgaaccgtgtactttatccacggaggagtaggaaataaatgcttctgcgagggaagcggccggacgacctttggcaaaggtctctctggaaaaaccatggaactatgagaaagacaagttcactcgagaacgtatctactgggaccaaaggatgagatgctgttgaggacaagaaagaagataaagagaggatcaagtaagagtggccgatagaaggagttgatcggacgagacggaggcggctcatcggaagccgatgacgcggcgtaaccatcagccacgtgttaggtttcatgtcgtgaggattacaaattgacgcgtaaccagacgcgcttcgaactcttcctccgacggtgggcagtaagactcttgatatcatcctgacttgatcactcaagcatgtcccaactccatttgcagacactgtctgatctactggctccgaatgagagtgccatacagaaagctaccagaaatctgagcgcacttctctcttatacaggtagagatcttgatctcggtcggacggctttaccggctgttgccgccttgttggcttgtgaagcgtatgtgcaatcgtttcttggggtacgatacagatacctatgtttgagacctgatattgtttatcctatcaaccagactggagcgtccagagctgctcgattttaacaccgctcagaagaaatcgagcgttacaaaacccatattcaaagagaccgtcgaagcttctaggcggatcctagataggaacaaacatctcaccaaaagcacaacaggctctccttcgagatctttgtccggttcctcccagcaacgtccctttcaagatttactctcgagtcttaatttgtatctttcagcagaccaggttaaatacgtgattagacaagcagaagttacccaaaatatcttgatcgactcgaccagggactcgaacgaccggtctgttgacctgagctcggctcgctcaataaagtccatccttagctttgctctgaacggcctgaaggtctgttttcacgtattcatcaactcgagcactggaagatgacatgagatctccccttcgatactgattctctgtgcctcgatcgcctctccctcctcagctaccgaccacctacctggtggaacctcatatcgaagacctaatcaaacttcacgcatattcactgtttgaatccacgtttcgaccatccgaatctgacttccgacgtccaggctcccaacctcctatgtcttcttttagtccagctgcctcacctgcccaaacgccgaagaagaaagcgacctcggcgttccatctgcacacaccctccagaccctctcccctaagacagggatcatccgcctcatcgtctcgtcacaagtcctttttgagcgatgacgctctttcttctgacggagaggataagagggatctagaaaagacaccaacaagaagacttcaaaagacaaatgcgcgactcgacggtcaaataccctcggccggacggacaagaactttgaacgccacgccgagaggtggtcgagtgacaaaacggcggaagagattgagaaaacactacatcgaaggagcagatcagatcaatctcgaaacgtccaaacaaaggtatctaatggtatgttccctttcagtgtttatcaacggatctgtgtactcttgccgagtgtatactgacagtccgtcgttcctttccgaccggtgtgaatatgttcagtggagagagtcgttcctccgagcgcatcctgtgtctgtagacgacgaacctggcacaaactaacatgtagaagttgaacgagatcatcattgttttgataatatgtgaatgagttgtataagcaacataagaaagcttgttctctcttgcgcaagagtgatatgctccccttaatgacgcgcctcatgaaaaagaagtcgacgcgtctgttctttcttggacgcgtcaacaaaccttccactagattaggttaatcctttcctcccgactctcgttgctcaacgagccttgtccttaacgacatctcctatacgaagaagaccgatccaatatggattcgcctctgctcccttccttatcgaggcattctcaaggacagccacctccgagtttcaatctgtttgacacgtctcttgaatctctgaagcttcaggacttgtccttcacggacgatcatccgtctcaacaagtcggatcggctgaacatctctttaatcccccttcatcttcgggaacgggcgacgtctcgttcgatacacctccgagggtcactcgcttggccggtcatcggaaagcaggtgctcctccacctgcagggtctaatagagcaggagctggaaaaccgaggttcagtctattcgctcagcctaaacccgaacccacgccgccgtcacctgtcgaacaagttgaacggagatcaaattcgcttgcggagaccgaggaggacgaagaagaagaagaagaggaagaagaggtagagaaagcaaacaaagagacggagcaggtagaggaagatgtagaaactaaagaccatagacatcgatgggaaaatagccatcagggccaatacacagaggaggaagacggagaagacggacacaaaatcgatggtgggggtgaagaagacgacggacagacattaagattgtctgaattggcctcctcgacaggtctagcggaggaaagagaggcaacgctcaagaaaaccttgtttgacctgcaaagattgaacggtgtgttcgaaggctatatcggtgctctagaatccaacaatgcgttccattcggtcagtcgttatgttatctttgtccaacgtgttttcaccaaccttgcccaactcatatgagctgtcgttgattgttcatctaatacacagagaatagccgatcaaacgatgttcacaaactctttattggacgactacatccatatcctatcggcctctcagaaagtggcttctctggttcaaaaccctcaatgggaaggcgcagaagcagttcgttcactctatctcacgatgatccctttctcctgatcgttttaatagcagatcatctaaaatctcctttttctgtctttttttctcccctctcccacatcgatacttgccaacttaataggacgagagagcgggcatggcccgacagatggcgctactccaagctcaggaacaagctatgcgagaagcagcaattcgagctgaagccgaagctgccgagcttcaacgtcgtcaggagttgagagcagaggaggtcagagcggctgcgatggctgcttctatgtctgaaggc

SEQ ID NO: 2439 - DNA, 6080 bp, Xanthophyllomyces dendrorhous
tcgtcagggattccgacctcgtcgtcatcttcggcgggtgggagaggaaagataccaacggtacgacggtctctttctttgaagtcaacagttactcataaacccttgatggatttcctgacctcttccttcgctttggtctttgtctgatgcctcgtggggggcattcttttgttctattctatttttttgggggaaaatacgaacgtgtagtattcgggagtccgttcttcaggatacggtccaccacccaaaaagaaataaacacacatctcaactacccggaccacttttctctctcctcttcacaccgcctttctcgaacatctactgaaccgagatcgatcggtagaccagcgcatgctgatccttcacgtttggtctccgagtcttacagacctttgagggttcatccctaaagctgacaacaacgaaagaaggaggagagggaagagagaaaagaagggatggagcgctcgcttccccaggctggtggagcttcatccagatatgtgattcatggatttgtaattatcagcttgtatctcgcattgaaggggtacctcgagggatcttagggaaaggaaggaaagaaaaaacttggatatatcaagatcgaagatcgaaaccatagctgaagcaaagatggaaagccaaactcatacgcaagagaaaaacagagacataagaggaatttaaactagatgagaagcaccgaaccgttgtacaatccgacacggttcgacgagatgcgactcggtacgacgagacagaacaaaacgaaacaaaacagaaacaaagaagggtatgatatgggatggtttctttgaaatagtgaaggggtgatagaatgatgggtctgagggcataccacatcactatagatatatcgacaaaggattcaaacaaaacggattaggagcaaaagagagaaactaagagaaaaaggagaaggagaaggaggagtatgtacgtatagaccagaaaacctcgtgttctgtttttgttctgtaaagctgagggcgcaagtgaagcgcaacactagcaggagacggaaagagagagagagagaggggaaagcgggaaaaatgagaacgaaaagaaagaaaaaggcccaaaaatcatagaagaaacagacgatacaaagcagaaaacgagagaagaagattgggtaatgtgtacacagaagcgaacttgatcttggacttgggctcgcatcaaggttaggactcgaatatgagtctattattgctctccaaccaaggagatgaatcaaacggactctagccagccctcttcaagtacaaggagaaaaaagaagtcaccaaggctacagaaagtcaagaggagagaaggataaccaaaggaacagggtatggcaggaagcaaagaaaaagtgataggagaactatcaaatgaaagaggatagagaaaacgacacaaggaaggaagggtagacgtctacgcctcgtcatgctacccttacctgatcggccgatggacgaatggtggtaggctagggctatggctggcgttgttcgggtatcgactttggtacgatcttcacccacatatctcttccccaacgacgcctgtttgatccgaagaagcaagtgaaacgtgagctttgcctcaccgagaaagaggatagaaagaaaaggaagaaggaaagaacaaactttctgagttgttcccaaccagcagagaccttgttccttgtcctagcgcccgcatccagatcctccagaattgatcccaaaaggcaatctctggtgtcaaactcgaatgtacgtaacgtgtctagagtggtcatcagcctattgatcaacttgtggtgaatcgcaggttcttcgtccgagatcgttgagggcacgcagaatatacggccgaggaggtggacgatagataacccgatcatggaggtgtgtatgtcgagtgtgtaggaaagcatcggtctaagagatgaggacaaaaagaggatggggatcagctcgactggccagagaggcctaaatcaagaggagacatttcgagagcaagaaccaacctctccttccatcgctagaaagataaaaagactgatgagcgacaagttcttcaaaggaggtatggaaagaagaaagggaaaaggaaaggatcttacttggagaagcatcgtcaacagaatatcagctttgtccgtggcttccgagacttggtaagcgcctatcgaaatcccgaggttcccaacagtcagagccaattggaggatacccaacgtcagtgcacgtatcaatgtgtatggtgcatcgattgctaggcatcaacggacgaaccttcgggataactcatgatggacgtccagtctgtcatgttgtgcatgataggagaaaacacaagtagtgtcgagaagaacagggggagcgcggtaatcctgttatgtattgagggtttccgatcgaataggcagaaggcggtaaaagtagaaagatgagtcagattcaagtgtgcgagtagatgagcctgaagataggagacatccgatactgacagatctatagagaagaacgagatcgatgaaaggaagagaagagaaaagaaaacaggacgacaccaaaggtgcagattgttaagcgaatcatcggtaaggtgagatggataaacgagagaagaacgcaaaacacttactgtgttgagcctgatgggcgacgttccactctacaaatgaggcaaacagtttccgggaagtctcaatccgagtgaccgtttctatgaccaacccgggctgttctgggaggattagtttgttgtagactgtgtacacgtgaaattgaatttgttcggttttcgcgagaaatgttagtgtatggaatcaacagtagaaagatagtatcggggagttgatcaaagaagagaaatgacttaccatcctctgtgatgaattgatatgttccgttttgaagtacgtgatccaccccaccacaccaaagcatagagagattattaattatggaaaacacgacaaacataaccaaaaagaactataggagaaagaaaatgggaacgaacccaagcgatcgctcaaactgagataagcgaggatatacgaatccacacccgtgatatctgtcgagagcctcatgcattctttccaagcggccgtcatagaatctctcattaatggcgggttcccgttaaggacttggaaacttttcagtcgcgagttgtttgttgaccgagtataaacataggcatgagcatccagtctaggcatggaagcaaagaaaagagcaaagaagggagcaaagaaagataagaagaagaaaggacgtacatatgatcatggatgtacaggattgagtacaatctagagatctccaagagaaagataccttcttttgagtgtgcgtcctgcaagctggtgtaatgagccatggcccgagggaagtggagtgagtttgccacttgaagagcaaaggcgtgaacaaggaaatcgcagtgccagactgagaagatcaccatcgctctatattcaggcagagcacgaagaagaagagagccaaatgaacaccggttcgaacgagtggctgaagaaggaacagagaaaatttcgcaaacgccagaagcttcaagacaaacctaacatcctccatcccgacaccctcaccacaggcctcgacaaatctcccgatcgccctccgcacggcttttactccgagaaggtaagtctttttattcaaagcccttacgctgaccgtgactggaggcaagtaggttcattgatccgcaagaaaatgataaccttgtggtcagaggcgaggtatatgaaacaagacgggcgagtgcacgaagagagggtgaagggaagctaacctgtgacgtcaaacaacaagggcgacgatcttctgatagccttcatatgatccctcgtgaacggggaaggcaagaacgggatggacggcgtgtggagtgcgaggtctgagatgtagctatgaaaaaagggggaagagaaagtaagaaagttagtgtggtagcgtagaagaagaagggtaagtgataagaggaaaagtatgcctacaattcgattgctgcaggagatacagacgagagagagaaagaagagagagagagagggaaagagaaagaaaaagagaggagagaacacgaagtttgatcaacgttagcactaggaggatcaataagatatattctcccgcgcactcaccttgtctggcttcttcctcagagatgatacctctgtcgactaggtcgccctcatcgggtgctctgggggttttattatcgattggatcatgctcgccatacatccaaccgtctgaccttgtcttgtccatcaactctgtgaggccgggcaaggtttctctcttttcgacagcctgaccgaatttcggattttccttggagccggaaacaatcacggtggccggggcaggcggagtaccatcactgttgctatgtgaggagtgtctgacgaaagaggatgggtatgtttgatgtgtgggcgatcttgagcctcttccggtctgtgatgggtgttgtggatgggttgatggatgctggtggtgttgctgctgatggcggtgactgtaagaaacgccgggatgattcgggcttggctgagctgttccggcgttgggagaaaagctggcaaagatgcttgaggatggaccgggcggagggatcgagccgttgatggcttgatgagggtgcgtggccggatgggaagaggaggaggaggaaacgaggagggagtgtaaggaccgtttgagctcggcaacttgttcctccaaggaaaacactctgtgttcgagaccgtacgtcggttgggtcgggaagagggtggagattgagggaacagctgtggcggaggaggatgaggaggtcaatgtatttatcggtcggtgctggttggtaaccgggtcggctggtctggaggaagccgaggatggggacgatgccgtgatgaccgggttgatgtttgagctggtcaagtttggagtacctagattcgaggtggatgaagggaccgttctaaaaggctgtggatcggacagagtgatgggaggcaggaccgaccgacggagcgagagttcggcttctccgtggctattggcgggggtgctagcggcggtggtagcagaggtggtcgtggtgggggtagtggtgacgggagcggatgctctcggtctacgtttcggcgcttcgtatacacagatgattccggaggacagacagcctctgcaaggggttgtgttggtggatgtaccgtctgggcctagttctcgaacgcatttcattctgagccaagagtaaagagtgaggagagaacgcggttaacgagtgacgaaaagaaaagaaaaagaaaaagaaaaagaaaaagcggaagacgcgattaatcttacttttgacttcgacatcgggcgcctgtataaattgaagggagtgaaagcgaagcgatgttgggtgtgagcaaaagaagaaagtcaaacacacacatacaaagagggagagaggaagaagaagagtaaggaagaaagcagagtaggaaagagagaaagaccgtggagacttacaagcctggacggttctgttgatctttccgttcgcacttccactcccaccggcgccgggcataccgacctggatgacggacgaaagggagtcgatcggttttgccgatttgtctgctatcgaggctttagcttcatccgaggcacctgcaccaccaccggtggatagatcattttcagcaggcacatgatccgaccgggtatccatctgctgatcgtctccgtcttcgtccggatcttctgatcggggtctctttgcgttggagggatccatcttgatggatgcggatgtatttgttggatgtgtgtgagaggatggttgactagggtgatgtgtcgagatggcagtagatggtcagatggcttgcgtgtgcgtgtgcgtgtaggtgtgagtgtgagtgtgaaagagaggaagagcagaacaagaggagcgggaaggaagaagggaaagagggaagaagggaaagagagaaggaagagagaaagaaagaaaaaaaaaaagaaaaaaaa

SEQ ID NO: 2440 - DNA, 869 bp, Xanthophyllomyces dendrorhous
  misc_feature (418)..(427): n is a, c, g, or t
aaaaagaaaaaaaaaaaaagggaggaagcccggatccaaggaggaaacgccgacgaaacaagccggaggaagaaagcgtaaaggaagaagatcagtaaagaatgacgaccgagctctgatggatgacacactaactctggaataacagatggatccgactcgaacacgagacagagaacagagaacagagatagcgagagtctttaccaatcaagtcgggagcgatacacgtcgtgttcactgattaaactaccgaccgacaaggatgaacacagagaagactgcagaagacggacgatgcgaatggagaacacgcccttccgtgtgctcactcggaagacaagatgctcagcgaacgggaaagcctcaagggcagccgggaggatggagggagagaaaaaaaaaaaaagtggaggcnnnnnnnnnngatgccgagcgatcgcatcacaatcggcccggctaatcgatcattcgctaccccgggcggcgaacgtgggcgtgggcgtgggcgtgggtcagggcaagggcgtggccaagagcgtggaagtataggcatggcgcggacggtctcaggcaccagcccacgcggcgggttcaggcacaagtccaggcaaacgcccagagacagcctcgggcacaggtatcgtagcggcggcggaggctgtgggggtcatcgccgatctctagactggccggctccagaccagacccagtcgttgtttagctctcttttctcgtcgtctccttcgtccgctcaacattcgctctgtctcttcactcgctcgtagttcactggccgtgtttcgatttctctatcttattgatcggcatgtgtttatgtgtatgttgtgtgtgtgtgtgtgtgtgtg

SEQ ID NO: 2441 - DNA, 23616 bp, Xanthophyllomyces dendrorhous
tgtgtgtgtgtgtgtgtgtgtgtgtgtgtgtctcgtgcgagaactacaacccgatgccgagctttgttttgccttctcattaatatcaccgtacggccgcccgtccgcctgttccaccggacgcttcggccttctctacctagactctgtttttctttacgccctccaacctggcacgtctcgcgccgccttacagactttgggcccaggtgctgaaccggaccctttttcggtcatcgtgcggctgctattgttcgctcctgcaactcgccgtcttttctcctacgcaacgcttatcctggaagagataagtaaacatcattggatattccctgattgtctgttcgtttttgtctttgtctttgtctttgtctttgtctttctcccttcaagacgtcctctatctattcactcccaaagagccaaatataagaaaacaagccattttaggcgaacaccttggtgacgcccaactgatcctcatccaaccgcctgacctccctccttccttcggcatccctttgggcgtcctttctgtccttgtactttgtgccgagctcccggttgctggctgctcggattgccgcaggcgtgacgaattctgaacaaaagagaaatagagaaggcaagaaagttaaagaagaaaagcgaggtaaaaagattctttgtcagttcaatccaacaaagacacaagaatacttgacacacgcgcccaagttctcccaggcatccccgcacctcgcacctcacacccccacgccctatactcgacaccggagaggaaaaaggggagaaaaaagaaaagaaaacgtgtgaaaaggatctcaccagcattctcgtaaacggtagcaccagagaaactaccctcgaaaattcggatgggcgtcaacacgaaccgaggtccgatctcaacgagtgatgtctgaggcggtccgttgggcaccatcgggtctttttccacaatctacaggttgcgcatcaagatgcgttggtgtgtcccgtttacagagtcagcaagtcgcgtcttgactaccgcaaagaaaagaaaagaaaagagaaagtaggccagcaggtttggaacacccacctggtagtttcggaaccaaatcttgttgtcgagaagagagaacgtgaggacatgatcgatgaacggctttgtctttctcgatgactttggcacactgaagatctgtgctcatagccggcaagaagcgtggtcagacatgtctctgtttccaaatctgtaggcaaacgcaagaagcatcgactcacatgggtcaagacctctcgcatcaactttgactcctccgaagagtcccagcctccatcgaaactaacgatccccctcgaccccttcagacagtttccagtcatcttcaattcgtccatagtgtgaatgttcaacacgtgaaacttgatgctcggtccgttgggcgtcttggaggcccacatgtagagatcctcgtgtctcctggcttcaaagtagagagcgttgttgcaagagtgcaggtccgcgagctcgttcaccaagtgcaaagagtttttagagtccaactttgcgtctagagagggcgtgtgtagggaaatgagttggtaccacacagtcagctgggaatccctctcgcttcttgatacatccgaacctctgattgagtagcagacaaagggctcaactcacccttcttgacatgcggcaaaagaacctcgagatcacccatcaagtgtctcattcgctgggtcactcctcgagagctgagcatcaagacctagtttcaagcattgtgtatgaccctcctgttcagtattctcgtcccctctctctctctctctctatatgaagccgagtaaaaacaaagcatacgaaccttgtcctttcgcctcttgacgacctttccaccggtcgaggtcgaagaagcagccggcaaagcggccacactgtcatcctcccagtcttcttcgtccgctccttcactggcctttcgtttctgcttctgggaagcagagatcttgttggctgacttgtgaagcgaggccatgtttgtgggctgtgttggagtgagggtgagtgtgtgtgcgtgtgtatgtgtgtgtatgtgagtcgaggtgtaaaggtttgaggttcgacaggcgggaggatttctcaaagattggagagtccaaattctttcaattcgatcaaggaacgtagtgtgttacggggtttgcatagcaaccgatcacgtgacatagtaaccaacatcacacaaaccctcaccactcgccttcatccagcccagccgccacaacagagggacgacatccttcgagcctcacacggttgtcggcaactaagattgaccgaccggagcgagaatgtcgtctcggccagatcagttgaccttggaaaccttcgactgaccttggacgctctgctcgctcgatacaccatgctcttccaggccgatcgagcaagagagtgtgagcctggggttggtttccagtccctcaaaggtttatatatgttgcctttctcattggatccttctctttccttcctttcctttgctttctttcttcatctttcttccgtggtcttgttcgtcgctaacaggagactcatacaagcaagcaaacaagcaaatacacacacacacactcacttactcatccacacacacacactcacacctacagtcacacaaatgtcctcaaacaaggtcatcgtagtcggagaaggactctccggtttgacagccgctcatactcttctcgaaagaggtgcatccatccttttgttggacaagatggggtatgtccatgaagtcttgccttgtatcgtgtcgtgtgtccagccgagtttcctcttgcttaccgttcgtttggcgagatcttgtacagtttcatgggaggttcgtccaccgtttaatcctctgtttggactgctgccaaatccatcttcccgaatggtgctgaccggcgaaactcacgtcttcttgttgtgttcttttaggtaacagtacaaaagctaccagtggaatcaatggaggtaagcacaatatcagagttcatctctctatcgctcggttctccatcatggcctcggtttgtagacctcttgttctgacccttctgttctctctactctctttgatcgatcgatctttatccagcgggaacacagtctcagatcgagctcgatatgtttgtctagtctcctctgtctctttcccggacgctgtgagggtttcctgctaacgtggggttctttcggggagaacatagtaaggacaccgccaaaatctgtaagtctaacatgatctgtgctctccctttcggctccctctgctgacaactcccctgggcgcatccaaagtctttgacgacacaaagctgtccgccaaagatctagcccgagatgatctgatcaaggtgttgacgtaccgatcggccgatgccgtcctctggctacaagagaaatttggactcgatctcagtaaggtcagccggctcggtggtcactcacaacctaggactcatcgaggaggtgcccaatttcctgggatggtcagtcccttctttcttgtctgagattacagtatgtctgcgcatcggacgtctggctcaacatttctttctctccgctttttcgcctcttttgtacagacgattacctatgcacaaatgggtgagtgttcgcttcgccgttcgcaccgagttttgcctgctatggcgcaaagctcatttttcactattgtctgatggcttaacagaaaaacttgaggactacgccacctccattccggatagagtcacaatcctgaaaaaggccagggttactcagctactcaaacaagacggcaaggtcatcggtgtcgagtttgaacgagacggtaagcttcacaaggaactgggacccgtaattcttgctaccggagtaagtcgatccgtatcgttggttgtcgcttatccttattcctctcaagattcagctaaacctgaacctcatatgtttgcttgcatcgtagggttatgctgccgatttcggagacaattcgctcttgaaaaagtacaggccggatgtctatcacctccctactaccaacggagaccactcaacaggggatggtctaaaaatcgctgtaagcttctcgttcagtctttgttgctttgaaaaagaacccactggactgatgaaaacccaaaatcaaatcaccaccttcctctatcagatggcaatcggcggaaaaggagttgacttggataaagtccaggtccatccgaccgggcttgtggaccccaaggaaccagatgttagtttttccgttcgactggttcatccaatttgttctccttgctgatagaagaaaagtatacactctcccctcttctcaatctaggcgcatctcaagttcttggccgcagaggctttgagaggtgtaggaggtatcttgctcgataacgaaggacagcgattctgcgacgagctagggcgaagagagtaagtcttgtcgatctttctgaagcagtagtcatgtttctcctgttctcacgtatcgtctttcatctgcagttatgtgactggggagatgaacaagaacggaaagttcccgatccgacttctcctcaacggtcaagcttccaaggagattgaatggttcgtcatcggttcatacatttacccgcactggtgtctgccagaaacactgacctcggatttcctcccaaccaaacgtatcatacacacaggcatgtcaaacactatgagggcagaaagctcatgaaatacttcaagacgggtcacgatctcgcaaaagagatgggtatctcttctgatgttctgaaaaagacttttgagaagtacaatgaggttggcgcgaacaattcggatccttagtaagtatcgttctctttgtgtttctagctcgaaaaccaccgtggccgaaccaaagaactcaacctctcgttcgttgatggctttatagcggcaagagattcttcccaggtggaaagttcactattgacgacgagtatcacgtcgcccacatgactccagtgtgagttcctgtctcctcgtcaatccatcggcctgtctctttcaagattaatgttcaaacgggtaccctttatgcatatagtcttcactacactatggtatgtccaagcatgaaaatcagacctcaacatcttgttcatccggacgctgactgttttgctcactgtctgttctcttacagggaggtctcgagatcgattcgtcttccagagtcatgaatgaagacggcgaacatatcgtaagttcgactgatcagttatctttgttttttttttgtcaaaatcatcgaacgctctgttgattcttttctcatcatcttgtgtcggacagcccggagtatttgcctgtggtgaattggctggaggtgtacatggatccaaccgattgggagggtcttcgttgctgtgagtgccaaccgggtctgccatttgcttcgaactccttctgacatagcatttccttcttgtctggcgcagtggctgtgttgtatttggacgtgttgcgtgagtgatcatctctcgccctaatcaaattctttccgagtttaggacaatccaaactaagcaccaacctgggatgttactattgtcaattcaggggagataccgcggcctcataccttgtttcgtccatggcaaacgaaacagccaaccaacgactgggagctgttgccggtcatctcttacaagcgaaggtgacgattgcgcctggctcaaaggtctctatcgaagtacttgacggtgatgccgactcggacttttccaagttatcctcaaagtcttcgtcgccatcagcctcatcctctgccgctgcgcccccgccggcttacaaagcacaagaagagccaaaggcacagaagggaatcaatccgaaggagggagacaagatggtagctgggtcagtagtctttttcatcttcatgcttgttcatttggcgcaactcttctcatcggtcgtcatattttggggaaccttcattatctgtcgtctatgcacacatcagtaccgagcaagaggaacgtgtcgactctggtaacgttcccaaggaaaagaatacagcaaaggggtcatactcgatcgacgaagtcgccaaacacaacaccaaagaagattgctgggtgatgatcagtggagaggtcctagacgttaccaagttcttatccgatcatcccggtggagagaaggccatcttgttgtatgcaggtcgggatgcgaccgaggagtttttgatgctgcatgatccgaaggtcattcctagatatgcggccgacaccgtgatcggtaaggttgcttaaacttggacaggagctctatccgaatcttcttccccattctcttggtctgtgaatctatgacgactctctctctccagatcttgtgcattccattttcttctaaccttcttgggaatctcttgttgttaacctctttatccttttctatttgggattctatttatctagtcagtggtctagtttatcaatgttgtaaaccctcactccatgtttgtattcttgtgattctatgtgaatttaaatggcattcttgaatcattcgggacagaagtttgcaatccagacaaaacttcatatacatacatttgaccttggttgaatgaagaaccgaacaccatcgttcatcagaccagtcttgcctttttcttgtcttcctcaccctcgacaggaccgtccgacaaggccgagtggtcttcgtccacagctcgttttcctcctttgcccacctggctttccacctcgacgctcttctcttctaccttttgcgcatctccagctttggcatccgacgcagttggagccgaagaaggagcagcaggcttcgctttcttcttgacgattacgcctacaggtagtttcgatttccccttggcttttcctttcgacgccggagggagccccgttggtctaaccgatgggttcgtcgacaatgacgtggcggcggaagaagaagagggcttggcggtgctcgtgttggaggcagaggcaggcgcaggaatagggataggtggagagagaagtgtcgatgggggcgaaggcgacctacgttgagctctgtttcatttttgattcaacacgagcccaggtaagaacgcacagagaagaaaaagcggagacacatgttgagaaagggaagagatccacatgtgaagcttgaactgtgaaggactcacgaacgaaaagcggctaggacgtcttcgtccgcttgtcgacgcgctctttcttcttcttccgatttcgtctattttatcgacccacaatccaaacatcagtccaagaccattgtgcttctttccattgaataacaatgaatctacagaggctgtaaaagactgaccttttcagcagctaggaagtttatctcttcgctatctaatcctctgaattggttgcccatcttcattctgagacgcaacaagtataattccttgagcctcatcagcttcaactgatggtcagacaaggagcagggtgaacgcacttttcgtcccattcttctctcttgacatcctgttcgacacatatcgtcaagaaggaaggatgatgagatcagtaacatcctccacgtccatttacgcgcctcctgccgattgaacagaacgctagatgaaccttgttatgtttgagtttctgcgtatgcacagggttggtaaaaaaaaatggtttctgtgagccttgagactcactatctcggcgagagagtttgatgagaaatgatgcaaggatcatacctcgaacaacgatctaggatcatactcttcttcttgaggtctcggtggaggttcttgcccgattctgatggcccaagaagattgatcagcaaattggatctgcaaaagtacgatgcaagagctttcgttaccttgcataagccgctttctgcaagagaaccatccatcagaatcaatcatatagttttaagaacaaatgaatatcgaaaggtagaccaatcagtctctacaagacggtcgatagagatcgaaacgaacccattcttcatccttattcgccttgacctggtccagctctgtctgggacacgaatctacttgcgactcctcctgttgtgttgagtgagaagccagacatgatcaataaatcgatggatgtgtccagcaatggttgggtcaaacgctgctagctcagcaccgacggctttctcggtccacgccgagacggctaaagaaaaaaaaaagaaaaaagggccgtgcgtttttttcttcgccccaacaagacattccaccatactcccatcaacacactcttctatccaccatgttcgccatccgatcgatcgtcaaacaggtatgtgcaatggtgatttggatgcatgcgacgttctttagctgtctggcttgctgacagttgcttccttttgtatttttctttcgttcttcgctatctcctttctggcacgaacttctagccttccaccgcccgagtgggattgatcaccaggtcactctcggccaccccaaccgttcactctccacttgccacagcgtccacgtctacttcttcttctgcagcatctacctcctcttcgccaactccctcttcatcctcttcgacaggttccgtccgtaaagcgtcttcccgaccgaggccgtccaaaatcttcgatgacggcctgactctcggtgacttcatcgagggtaatcacctcgagccagttgagccagagaagctgaccttgggaaacacctcacagtgcgtttgtttcaatcgatatgtttgctctcttgcttgtcctatgtttcatcttcacctcggcttaccatctgttgtgtcttcgcatatgtcagacctcgacttccatcttacttaaaacactcgattcccgcaggaggctcttactcagccatcaagaaagagcttcggggactcaagctgcacaccgtgtgcgaagaggcccgatgccccaacattggtgaatgctggggaggaggaggcaagactggtgaggagggcaagaagggagctaccgctacgatcatggtacgtcctcccctgtttcaggctcacgttgttgaagaaaccccgagagtccaacataataacggtatcgatcggaatgttttcatgcggatcgagatagttgatgggagacacatgcactcgaggatgtcgtttctgttctgtcaagacttccagaacgcctccgcctctcgacgtaaacgagccagagaacaccgctgaggttagttcctagagcctttttggtttgattagctgagggttgaacgctgactaaaacgctattggtctattcaaacaggctatcagccgatggggcttgggatacatcgttttgaccagtgtcgaccgagatggtacgtcattgttcaaatctatcaagatgtataacggagggcgctttcagtggaaaccagtgcagcaaagttctcatcttatcttcaatgacactcaacagatctgctcgacggaggatcggcccactttgcttcaaccatccagaagattaaacaaaagtgtgtcattcttcttcttggatctctgcctctcttccttgtcattaatccaatcctctctctccctatctcttcttcagagctcctcatattcttgttgaagctcttactggagatttccagggatcaacaaaggacatcaccaacgtcgctctctctggacttgatgtttacgcgcacaacctcgagactgtggaagacctgacgccgtttgtcagagatcgaagggcaaagtacagacagagtctggaggtcctgagacatgtcaaggaggttacaggtggtagagtcgtaaccaagacgagtttgatgctgggagtcggagagcaggagcatcagctcatgcaaactcttaaaggtccgtatcgtttctttctcgatttttactttgtatataaatcactgatcaatgtctcttgtccttcctcctctatcatatctttcgatcaacagatcttcgagcaaatgacgttgatgtggtcacatttggtcaatacatgcgaccgtcaaagaagcacatgaaggtcgatcgatatgtcgagccagcagagttcgataaatggaaacaggttgctgaggatatgggattcttgtacgtggccagcggaccgctcgtcaggagtagttacaaagctggagaattcttcatcaccaacgttctcaacaagcgtagggaggctgctcgagcaaaagagcttcaggctttgaacgaagacgtccggctcgcgcttgatgggcagattaagaaagaggcttccgccacgatcgaggcatagtctttctcatctctctcttgacgttttccccacttccttgttctttcactctgatatctcttccattcacctttagaagctctgcccatatgttttctctcctcttcatccaatactacatacctcgccatcactttctttctttccctggctactcgatatctctatccgctcttgtcttatgtcttttgtgctttctttcgactttcactcgcatttaaaaaatttagaaaattcccattctctcatctttccttgtttctgctttgtctttgatctgagtttagttctggttttggtctttgttggtctttttttttcttttgatactacagtctttgtccattagtgttattcaaagattttctatccccgcgcatcttagaggtttactcaatctaattttttttcatcggtttgaatgcgcttgtacgtgcgtttgtcgaacaaatgatcttgtgatcataccctgctgttctagcttttcgtctcttaaacatatccgttccatatataaacaatgatgtagaaaatagctcaatctagcctggtacaagaggaacgtacgaaggggaaggaagaagaatcaagggaatatgatgaaagaaaaaatcattctgaactcttcatccggatgctcctggggaaggattaacccaagtaccgttcggccagaaagtacccgccttcgtgtaatccccagatacaccagatgcctgatactacggattcccatccgatgatattcgttgttcgtagtttgacaaatttcaacccgttgacggatatcagaatgaaatgggcagaagagggcaaaacgaagaagaagaagaagaagaagagaaggacgtacggcaagtcggaagaagtagggggctgaaatgttgagtgcagttgccgtgtagtctgaataacgacaagaaagaacaagatctttgttagtcgcaagcttgaagagtttggaataacataaggacaagactgctcagaaagataaaaagcctcacttgttccaaccccgacaaatcgctctacatcgtttaacaaaagactgaatccgtcccaaacattcaccagatccgccgggatcggttcccatgcaacagtcaacgaccctaaccccgtttggttgagtgagaaccgagtggaattagcgataaacgatggtagggtgcttcctagagctgcatctcttcgaagctattcagtcatccgatcatggacatgttgaggcacgaaagtgagaatgttaggcataaaatcatgtgagcggatgaaatgatgtaagggaagcaggagataaaaatatcttacgaacctcactggctgtctgtaatatagaatcatacccaaactttgccactccatctgagaaaatacctaacaagagcgcctgtagtcctgcagaaactcttgtggcaaaccctagggcaggcatgaacatgatagcgaatatgtagtggtggagtctaaaagtcagttctggaagctgagaaaggacaaggattgtaagacccagggcgacagtccttcgaaaaagagatttgaattaagaagggacttctgtcagcggcctacgctttctcatcaacattaatctgacaagtacagataggaataaaagagagagaggcagaagagcacaagcagaagagtaactctcaccatctgaggtaaaatcctaaccacccagtcctccacatcaccctgatctgatttcctgcacagatgacgataaccactatcaaaatgaccacccatatgactccttctggccgaatgtttccagctgtaagggtatcgattggaattttggctgatacaacgttgatgagcatacccgggtagaatgggcctagatagaagagagtcctttcgaaaggagaggagaagaaggaagggagggtgaaccgataggcaactgaatctcggtagaaaattccaaatatatcaagtcaaatcataagaagagattcaatcaagaggagatatgattagttcaacgtagaaccttacctcgccagaaaaagtaaccgacgaagagcgttggaagaaaatcttgagagcctgtggaaaacgcagggggatagtctctcggatcagacatagtgtacacatgccagaacccctgacagactaaggtccaaaactaaattgagacaagcagaaggatatgagcgatcttgtaacagaacgagatgatgagaaatagacacaagaaagaaacagaacgaacaaagacgagcggaggaggatccaagaaaagactgaggaagcttgtcatgagaacgttgaagactagtacattccatcgaagatcttggcaataagatgtctgaacatgggaaaaggagaatccgagcgggaaaatggaagggaattcgattgattgaactgaatagtgttcacgcgcgtatagtcgattaaattagaggcagacatggtcagtcacaacgacagcgcagtgcgctggacggcgatgaagaaactcacgatcgtttcgaagagtagcagggaaggatgacacgttggctcgcatattgatcaaaccgcaacctccttttctgttgtctatgaagcctgcgtgaagagctgcggaacagatgaaagaactggaataaagaaaagcagatttcataaacgaataccgatacgccatctcattgagtcaccatatatctaccatgtatgttcacttagtaatagagacataacaaaccatagcaatgaacttactctcctctatataccaattcggactcttccgattgaccacctccaatgatgaatggcacgtagtctggctgtaaatctcctacagcgcgagtattatagataatttgagaagcgcatccggctggacaacgaaacccgataggctctgatatgttagaaggcatgcactgtacatcaaaggagttcgcgtttttttcgtgagaacgaaggtcaagttcatgacaatgatgttaaatgcgaaagacacgcgcaagagacggaccgtagcaccatcaagtccacagctatcccttgatgtccaaaaagttgaggtacaactaagaacttgaactccaccagacgcctccggttctgtactgggcaagaaactgttcgcccggatcaagaaactaaaccctatgatccaacttgccagaaacaccgccaagagagttgcatgtttccatccgccatgaggaaaccgacggcgaaacggctgtagatagtgagctgtgaaccatgtatctggatggaaagactgtcgagtggcattgataggtctgtttcttgaggatgatggaagggatatggatacagtgagaagaggttgaattgacggaagcggatgaggcggacttggacctgcaataaacctctgggctcgtcctatccaattctggactcgaacaaatgaagctggtacttgacgaaccggattgtttgatatgacagaagctgatgaatcggttctggagaagggcatgatgggaactgtctcatcgaaaaaagctgaggaggtagaggtggaggatgcagaagaggtagataacacaaccggtattgttgacgatgggactatctttgtagattgagcagatctagagggcgatcgttccgtgagatgattgatctgaccgagctctatcctatcatccctactgcccagcagctcgttgtcccccatggatggaaactggatggatgatggccttgatcgtacgctactgagtacgatgatggttaggagatcaatagagaggaatcaaggctgtgcctctcacgtgacaacgaaacgtcatcgatcaagccctgccttcactttctctccgttttcgatgacttcaactttgaaccgcaaccaaagacatcatgaacatcgcagtcatactgggctcctcttcaggaggaatcggctctcatctagctcgtatgtaacatgtataggtgtatctctgtctggtctttccaaaagcttatcgatgttcttttaagaacacatccttcgctcgactgcccttcaggtcgtcgcgctttcctccagacctacatctcaaacacttgatgctcttctatctggatcttcaaactcgtcgcagtggaaagaccgagtgattccattccaggtggatgcccttagtggttctttcgatgcgcaacttcaaaaagccgcacgtgacgttgagcaagctttggggaagaatgttaggctcatagtctgttcaagcggaattgttcgttctttaccatctacttgttcttccctttgtttccagtgttctggtatgatgagcctaacaagtggtgtatcaaatcgattattcctccaaaccaaagcttcaccctgagaagtcaatcagtcagattgacccagcccactcgatcgagtcttacaaactcaatacactctctcatctactcacatacaagcattttactccgctgattcctacgattaagcaattcgagacaaaatcatcgtccgataacttcgaagatcctgctaaaggccttctcaaacccggactgggggcttgtgtcagcttgagtgctagggttggaagtataggggataataaaatgggagggtacgtccggcctctacttgtctcttgaacatcggcgagctggaaaatgagtactaaaatgccaacttttatatcttctctggtctatcattcaatgtatcaaactcacttcagctggtactcctatcgatcgttagttcagtgcttctctgtctcctgctcttctgttgtaaccctagctgaccttctgctcttggcatctctaggacaaaagctgctgtaaatcaaaccattaagactctcaaccttgaggtctgtcttcttcatcatgctttagtttttgccttgaaatccatcaagaatcctgatacagtctcataccaaacatgatcctatgtcatactctagttgaagaataagaaatcatcagctatatcactcgcatatcgttcgtcctagattctttccctcttttgatacagattgatgttgatggaaaccaatgaccggatttaacatttgattgacatcttcagatccaggaacgacgaaaaccactctctcgtccccattcatatcttcctcgaccccttcatcgcgatcgaaagggcttttcgaaccgacggaagcagtggaggaactcgtcaatgtattgagtggactcgaaagggagaaagatgggggtggattcagggactggaaaggggacgaggtgccgtggtgatgaagattcggtggttagaacgaatgaaacgaactatggacatatattctgtgtgtatgtgagagaagtaatgccacggacgcgtaatctgcgcggtatgctttcaaaaagaattcttgcgcaggtaaaaaacaaaggcatcaaggctgtgaaggatgggcaatttatcaatagagaagcaatattcaagacaaaaataacaaaacagataattaacaacataagaagaacaaaagggtaaccaaggagaagaataagaataccatgcaagcaaaaagaagaaaaacgcgtatagcttaatctcggttctggttattaagtaccctcaatacctggaggaacaagttgatgatatccaagtataatctgagagctcccatgatatactcatcaggcgagagcttgttcatgatggcatgagtctgattgggacacgcatatgaatgttacagaatgcgtcaactaaaaagacacacatctgtgaataacacctataaagggaggaacttacatcgaaaagaatgtatccggagaagactagacaaccgacacaggccaagaagagatccattcctcggctgaaagggaagaagaccgaaaccaaggaggctgaattgtaaaacaaacagagtaggtactgattagataagaaaattcgtgtggatacaacggtccatgttgcaagtagaggaaaacatgaataactcactagtgaacataaccattattccaccgaaaagccatggagcaagtccatcaaagtcccacttggactggagcgtaaagagcgagagcccgacgaacacgcccaaggtgatcaccaaagcctgaatgacgactttctgatcataatatctatgcgcatttggagagttgtgaggtgttaagagcgtgtgcttactagccttgaaggtcatcaaactgatgtgaaatgaaataagataaatgacgtacgagaccacagtcccaatagaaagagactcaaacagggtgaacgctccgaggaggaacaggttgagcgggtgtgaatcaatcttccaaaacaaggtgaacaaggaggcgaatgttcccaccaacggaagccagaagaaccaggtgctatatggcgcgtgatgtagacgtgaaagtcagtgggaatctagcgaatagaggtgttaaatatagagatgtgaataacctacttctcctgagtccatcgaatggcggcaggctgactcatacctacagcaacaatagcggtgaagaggagctgaacggccaagatagagtagacttttcggataaagcccatcctgatgaatgatacagaagaaagcttgtcaggactgatatcacaggtggaggcaaaaccaagatgatttaggaagaaatcagatgcacaaaccgaatcgagacgtcactgctgctaacagaagttccgaacttgaaatcgtcctcatcgtcatcgtccagaccctgtctgggcacattcgaatgaatgaatgcattctgggcagcagccgaggaagacgctagaagaggggcgtttgcgtcggctgtaggaggagcgggattgatagcatcgtaggattttggacccccactaggaggattataggcggggggagcgctacaaagtagattttgaaccagagtagtcgatgaagtgaataaaaatcccttttcctaacagtcaagtggaagaacttactaagacatcggacgaagaacagacgagtatgatgatgatgatgatggtggtgctattgctggtgggataagtatagagctggtggttaagaagtacaccaaggtcggtggcggtgaggctgtgctgtctgatgaggtcagtgcttgctggtcactcggctgccttgttacgtaatcatgccggttacgccggttacagccgagcgataagatcaagagaactttccgactttcattacaaccacagaccacagaccacagacgacatacgacgatggatggatcacaacatacagagtgtgttggaagcgatggaagcggtagcgggaagaaggaagagttcgacacaccagaagagttagaggaactgaggagtaatcggtcgtggatccttgtgtcgttctggacagccattgtgctttgcctgccgtactggtggatgtcgacctcaatagaaaggctcgcacttccctccttggatccttcttctttggcccggctttctgttggtctctttctcttctgaatgatttcactacagtcgatttgagaagaagcccaaatccttcctgagctcattcaattatgtataccctgcaccagccgccgacatttgtggaacatgtctgcctgtcttcaaccgcgagggacctgacggaggagtctctccaacaactcatccaacagcttcaatccctaatttcagatagaggtagaggtctggaccaagataaaattcttgtctctcttgcaaatacaaccacttcatcttgtggtgtatcaggcacgtcaattttgacctccatcgcattctctatattcatcattaataacttatcggttctgtgttcgatgccggctatgtttatagaccatgttctttctttcccagctcatattcccccagcaaccgaactagctcaaataatcgatgatctcttgccgtcaactcaagcgctgatcagctcaacttccgagcacgggtcgagatacatcaagtacgcatcgcgacttcgactgagcttcacattgcttctagaagatgttacggagagcgaggtcaccgactggaatattgaacaaggccttgaaggtatgtgtttggcgacttcatttttctgttgccttgttgatatcatctcaacatttttcgatacagaaatttttgagcctttcttgagatcactttcccctatacacaacgtcactgttcgttctcagatccaatatcactgccctctatccgttgagcctatccctctttcggtcttgagaccaggtagtgaacaagaggaacatgaaagatgggtcgtcagatcagacgatgcgagggctttcgtgaacactgaaaaatgggaggttgatacgggtgatcaaagtacttacggagatgaagaggacgtcagcgtgttaaagatgatgatctttgtgccgagaacggggagaaaggatatgggattcgagattgaacattctggtatgtgttatgtttccacttgtcttttttcctctataaccgtctcttatgctgacgagctcaatcttatctgggttatacggctcatttgaactgtcaaagatgagttgtcagacacgatccttctaccgcaacaaggagcactcactatccttccttgggccacaagcgtcggatcgtcaaagaccctttctcttgataaccttcgtcctgttcttcaaactcaactccaaacactgcacaccctcctttctgtcccaccctcaacacatgttcgttatgcggttccatccggatcaggcatcacatccttccaactctcgacgatgcgccgtcaacgagcgatagagaatgtaagaagtgcggttgaaagtctgatggcgttggagagattggtaatcaagattggagaaatgagggtgggaaagaacgtcagagagaacgtggctaatgctgtgggtcagcttgagaaggtttgtctcttctcggatccttcaggcctcatctatgcttctgcaagacgtatattgacgcatgaaaatcaacttgtcaatttgattttacacatgtatatttctatcatctgtctacgcaaatctcacgttagattgttctctctacaagtcctcaagagatattcgaacgatcccgaacggcgctaaggttgagctcgaatgcgttcttcaatcctactatgcttggtcttttgtatttcgtacgtctgatctttctctcgagattggttgcagattttacgaattataaactgactctatctaccataccgtgattttgttcattgatgctggacaatatccagcctgacgagcataaatacgcagtctgtaagtgtccatcctatcgctcccatcttgcccgttcacgactgaccaactctcttgacttctccttctggcgttgcacaatctgtctgtgttccttcgttatcatgcgatcaaaatgcaaagatgcaccgctgtttgcacccgtaggcgtacctctcatcgtcagcgtctttcaagcaattcgtagaagaaaacgaagacgtgcgttaggaaaagatcaagcccgaacgtctgttaatcagactgtcaatcagggtaaagagcagaagaaatctttcggaatggaatgaatctttgttttggccggtcgtccaagtttaccattcttgacacaaagagaagaacaaaggaacagaaatagagagagcaacaaagggatagcgaaggtttggtgcgcatatagaacgaaacacatatggacctgtccggtctaaagagaaagtaaaggagaaaaccaaagcaaaaggtaacgagaaactatttccgaggatagagttgtgtatcgagagtgaagcgaacgcataatacaaagagatgaacacagaaagacactttgaagaaagaagttggtatggaaacgaaaaggaaatgttaaagatacgaaagggaaaagaatgaaaacatagtacagatccatgcgagcgattcagagagtctattgtccaagatgaacagaacaaaaaaggagaaaaatcctgacgatctagtagtgattgaaaaagaccataccttacccactcagccctaccaatctgccaagaactccccatgcatctcccacccgcattcctgctcctgtgctcaatcctcctcctaaactattcacaactacatccgggactaaattctcatatacttcccgtagaacaaacactattgtcgccaaaacaagcgctttgagctcagacgagcttaagcctgatggttgccgacgagttatcattcgagagtttgctagttgtgaactcggtctgaaacacgaatgaccctggttggatgaagacgacaatgaaaatgcatgtcgaggagaagaagaatcagacagcgcaaaattcgagaagccgagaaggagagcaaggcgcgttctgatgttttttgtcttgagcataatgagaaaaatgattgtccgaaggatatctcgactggttctatcacgaggtgcaagttcagagggtgaatgtggtcgggcgctgatctctgtacatgttggaaaggctattggggaaggcgaccccgatcgacaagaaacatacgacgtgactgagtgggaatcggcggaatcagggatcagatcgtctggttggtctatgctagaagcgaacaccgaatggagtactgtatctgctggagcgataggctcgagagctcctagatgatgtgttgttatttctttggcgtacgttctagctacgaatgggtcgatctcaaaaaggttaggcgttgaaacagtactaatctcagacattgtcgtccgacggcgcgtcgcactggaagcttgagagtgggaggagatttcactgccgagaggagactccgctgagctgtgtgtagatggaaacaaaattgacggtgttgatagaacatgggacgtttcagagccgtcaaacaaacgaaattttgggagagtgagctcgatattagtagggaagtccggaattatattaggcaatccgactaagcgatcgtcggcgctttgaccagagctacgaggacttgatcttgtctcgatttcgggttcgaaaaatgacgatgatcggctgtgctgttggcctttgacgcaatttggctgatgattgcccgtaggcttgccagattcgtacaatcgagtcgtagaagaaaactcggggcggctgtaccgaagctgaacttcgttggatgactcgccatgcgaggagatatatcttccgttgaactctggtgtcagcaaaaccgacaagatgaagatgagttgagttgttgttctttgatcttccagagatagctagcgctcaccaggaggaagggaagatcgctcaaagtatagctgaaacagttctttctccgacgggaacgtgatcttggccaaggttgatgttggaagcaaccgtttgagaatagtccaagcactagcccaccaccagccgaaccgcagaatgaacactgccatgcaaatcgccagagaaagactcattattagcagacagattcattagataaagtacataatgacataaagcttaccattggaacataaaccagggtactgattacgccccatgtccagcaagaaaggaaggatttccaattccttgagaaacaaatcgaagtcaacacctaggccagtacgcgcgcggagattgatggcgtatgcgtactacgttgctcattgaagctccttccaggtctactaatactgtgaatgttaagcatggagactgctcatcaagcttcaggtcccttaaatatcttctagcacactcaaaactccatctttgggagagcaatcaaatgaagacttttagcaagttgaaccgaccgcttcaagacaaaccggttattctgagaagacttgcattatggaatgttttaaacgttccagacctccatcgtctgatcgcttgactttattgagccgcagtacagccaccggtcgatcgagtcgatcacaacactcctctggcataaatttgaagaggttgacataggacttgtctagatgatcgaaatcaatcatttctggcttggattctactcgccagagtaggtgagcttgaagagcttcgattgtttttgtttgacattgatcggcgcgctgttcgattttcatccaagacacaagtgggtcagcaaaaagaagacaggcacatcttctggtgataagttgattttttcgatggagcaaccagggcatactttgaagaatcgaaagatggttgctacataaggttgtaagagccagtcaggaaacaggaatcagaggtatgagtaaaaactccggtttctcggcaatatccgttcagaagattgaacgcaccagtgtcccgaataaaagctttggctctttcctcatccttctgatcccatccatgtagttcagacagatgaggaacaacttccagcaagacacgttgctggagagtttgaacaacagaaaaattctgtctcaatgccaacaagtctgcttgaaccagggttgaatccattgatagttggaggccctggatggactatatatctgttcagcagggtgaatatcgatgggtgtagatgtcttctaggatgcccaggacgcttttaccactcacaaactagagttgtggatgtctgtcgaccgtttgttcggccgtaagaataatgatactcgagtggatgacgggtgtaggagaagtagcagccctcactcagttagtgctcgaggtcggctttgtcattcaatcacatgcacagaaaagaaacaacaagttttttgagagcaggacaagattattttcattcctacatcgttttggttttaattcgatcgactccacgtcctgtactctagattgatgaaagctcagtaacaacatatatactctgctctatgatatttcactcgaccctactattctatgtttgttccggtcttctgagcttctgaaaaggactgcttcaacgacgtctggtcgaccgctgctgctcctctagctcatcatatggcagtcgcatatccaccttgtcactaacatcctggtgtcgagcgaaagcacctcgctcgtcctcatgtgccacacgatcgtccttgatcatcctgtatgcatttagaaaaacacaaaattcccaaaagataaattgtgagacctttgtcgagcgcgaaagaaaatcagacagaatcgatcgagacagactttgagtttactcgggcatcttctccctctactccaagaacagcttgcggggttttggcttctaggacctggaagaagaagttaaatgaggaggaaggaaggaagaaaggaaggaaggaagttgtatcgaaacatcagcttgcctgacaacacatgagttattatagtaaacaagacacca

SEQ ID NO: 2442 - DNA, 35865 bp, Xanthophyllomyces dendrorhous
acataatggttgtcacctgtaccaagatgaaaacaagcaagaccatcaaagggcgtcaacaaaactgagagaaacggtgtctaggagaatcgagacggacagttcgggcagtactcatcggactcctcatacaccgtcatgtcctgtttgtttcattttatggaaaagaaatatatcgaacagaagagatcagcaaccctagttatcgtttccaagaatgatgacagactgacctttcggaacgcctttttacattttttgcacatgaataccatctccatcgttcgagcaaggttgtggtccattttttcagcatctaaaggttgtcagtttacaggaagacatcacgtcgatacaccaggacaaaagagaagtcagtaagacctgaaagacggagtaatagaataagaattgaatttgaacttacgacactctgggcactgtcgtttcaaaaatatgtgtgtttcgtacgaataatcagagaggggcgttgcattatcagaagaaatcaacatgacgaagaaggtgaaacgaaaacggaaacggaaacagataggatgtgatttctatacgaacgtcaaaccatttggagcagcacggcgctcggatggcaacctgggcattaagaacgtgtttgctgattgacccggtgaaccataaagagagtcagacgaaaaccaatacaatctaatcgaggtgccgagctcaccacgtgactgagtatgagctgttcttgctgatgcttctgctattgctgatggaatgtatgctgtctgacccagttggtagtgaatgttgttcgtgcacagcttttgccggttgtaaatcacgtgcgtcataatttccttttcgccaggtaggatttctcaccgatcctacaacccaactcaccatccgaccttaaccttcaacctctttgcctttgtgaagttcaggatgaagtcaaacttccaggtaggtcgttactcgtgcgaggattctgtttagcatgcgctaatgctctttgtgtctcgaatgttaccttcaacgatcccatcaatgacttcttcgcctggccttactttcgtctcaaaagttctcaaatctgataggaaccgtctacaggcaaggaaatgtcaccttcaccccagatggcaactcggtcctctcccccgtcgggaacagggtatccgtatttgatctagtcaagtaagatctctcttaataatatcatctctatttgttctcatcaagacaggcagaggtccactggctgccttattatgcaaactcctatggatcattcttcctctgaacatcattaccattccattcttttcttttctacagcaataagtcgagaactctcaactttgaaactaggaagaacatcgcgtgcgttgctctcagtccggatggaaatgtcgtgatggctatcgacctcggtaagccgaccgctctgttaagcttcgtttgccgttgaagattccaggctgacccgtaatgatgggttgaaattcgactgatggctcaattcagacggccgagctatctttgcctctttccggaagggaaccgctcttcaccacatgaacttcaaggcgcctgtcaatgacgtctcgttttctcccgatggaaagtacgtttcacagcccttcctcttgagcttttggagtcttatcgtcgctcgtaatcaaattcttgaaactgatctgttcctttttggggacgtactttcaacagattctttgcaatcactcaccaaacgcacctgcagatctggaagacgccttctcatttggctagagagtttgcgcctttcgctcttcaccgaacctacactggccacagggatgaagtcttgactgttacttggagtccttgctctaggtcagtctgacgaaaatcatgcgctagacttctttattgctacttacttactcttaattatcctctgtttgttcttacgtaacgaaatagatacattctcaccacttcgagagacatgaccgctagattgttcactctccaccccgtagaaggattccgaccgaagactttttcgggacatcgagatatcgtcgtcaaggcttacttctccaaggatagcaagaccgtaagtcacatctacgcgtcaatttctcatgccgaagatgtgcttatttcttcttggtccttcatcgggtctgcctaaatatagatctatactgtcagtcgagacggagctgttttcgtatggcagggaaagactactggcggagatgaggcttctgaagatgaagactttgagccggagacaactattctggacgctcctgggtcttctacctctgaagctaagctgaatgaagttgcctacacccgatggggagtcactggtcgacattatttcgcccagcccggaaccaaggttgtatgcaccactttccaccctggctcgtccatgctcgtcgttggtttctccacaggtgtatttggattgtgggagcttccatcgttcaccaacgtccacactctctcaatctcccaggaaaagatctcctctgtcgccatcaatcagtctggagaatggctagtgtttggagctagcaagctcggtcaacttctcgtttgggagtggcagtcggagagttatgtgctcaagcaacagggtcactacttcgatatgaacgctctctcgttctcccaggatggccagaatatcgccaccggaggagacgatggaaaggtcaaggtatggaacatgaactctgggttctgttacgttacgttctcggaacatagctcttcgatctcctcggtcgagtttgccaaacagggccaggtcctcttcactgcttcgctagatggaaccgtccgtgcgtttgacctggttcgataccgaaatttccgaacattcacatcccctacgcccgttcagttttcttcgcttgctgtcgatccgtctggtgaggttgtcgctgccggttcactcgattcattcgaaatcttcctgtggtctgtacaaacaggcaaactgcttgacattctgaccggacatactgcacctgtctcggcgctcgcttttgatcctacgggaaaccaccttgcctcggtttcatgggatcgaacttgccgattgtggacaatctttggaagatcgaaaaagtccgaagtgttctctctttcgtccgacgcgctcgccgttgcgttcaggcctgacggaaaggaattggccgcctctactttggacggtcagatctcattctgggataccctggaaggaaagcaaacgggagtgattgaaggcagaaaggatattgctggtggacgaaaacaagatgatcgggtgactgcttcaaacaactcgacgggcaagtcgttcaactcattggcttacacggccgatggaagttgtgtattagctggaggaaactccaagtatgtcgtcttgtacgatgtccgggacggagtaatggttaagaaattccagatctccgagaatctttctttggatggaacgcaggagaagttggattctagaaagatgaccgaaggaggtgtttctgtcgacacgctcgacgaacgtggaaatgagagcgaccttgaggataggttggacctgacgttacctggtgctcaacgaggcgatctttcgaagcgaaaatacaaacaagaggtccgaacaaaagccgtcagattctcccctaccggtcgttcttgggctgccgcttctaccgaaggactgttgatctactcactcgatgagacagtcacgttcgatcctttcgacctcgctatcgacatcactcctcaatctcttcttgccacacttgaatccaaggattatctcttggcattaatcgtggctttccggttgaacgaacgacatttgattgtcaagacgtacgaatcgattcctcctacggatataagattaatcgctggtcaactcccgaaagtctatgttaaagcactgctcaggttcatcgccggtcacatcgaagaaggacctcacgtagaattcgatttgatctgggtgtcggcagtgctgaccgctcatggtcgatggctcagagatcgatctggagagtttgctagcgagttcagggccatccaaaagggagtgactgatttctcacagagtatagctcggctgttagtacacctctcttccttcctggttcttcttcctgtctctttggtttctgaagaagattgctgactttggttttgtcttcaaaacagatcggacgagaactcgttcagtttgtcctatatcattcaccaacaacaagcgtttgaggctcaactggcgcagggtgaagatgataacagcgacttaatgtctctatagacgctattctatgttaaattgtttcttgtaaacacaacatcgaaagaccaacactgtcaataagttttctgagcaattctttggttctgggtcttgctgatctggggctagatgtaaaagatttcttcgcttcaagtcgcgttgttacatgtatattaatttacaaaataaagaaaaacgcttcaatgaatcgcccaagttaagaggaaagatagaagaaaaacaattaagaatatcggactggcagaccgcaagttaggatgtaacaggaagacagaaggagaatgaagaaagaggtatagagggagaacacgacaagagacggaaatgatctactctagatcaggaagagacataacactaagcatcaatcttagctttcttgggagcacgctttttgggagctgaaaccactggggactcagcagctgtcgattcatctttcgacctgaggggtttgaaaatgatataactaagtttgtctttcttgctgatcgtaaaaaattggtgaatgtacttacagcttcttgtaaatgcttttcagcttgtcgtgcttgatccctttccttggccagaaataactcgcaaagacccaaaggtgttttgaccatctgtcaggttacacatgaagcgcaaacgttcttatcagtcaacaagcttccaaggcaaccaagaaggaagaggtagtcacatacttttcggcatcttcgcccttggctcgcttgtttgcaacgacaaggtcgattcgggctccaaccaaagctaagcaatccttgagaaccactaacttttcctctcgaggaagatcgtctgttccagtcttgagttttttctgaagagggtagaaacataacgggcagaaataagaagcgtttcataccattggcaataaaatcagccattcaaacttagcacttacaagagagctcttaacgggacgaagttcttccttcgtagcagcctcgtccattgattcgctattgatccgacccgaagaaagcttacttagaattcatacctagcgcaacacaaagaatatgcctcaagtacttactagtcggagctgtcggactctgtatcggtgtaggtcggcgtcgccttcctcttgacctgagcggctgctgcttcagcagcagcaatagcggcagattgtgctttggccgaaggtttccgtttcgatgcagcaccttcaggtactggggggtatgatccagagctctgggaatgttgaagcccttgggactgcgccaacgcggattgttcggcgtagtacctagcattatcctcaaattcacgaatgagaccacacaagtaatctcctcttctgaccaagtgaaccgccgtaggtgtgcttttggtttggccttcttccagcggttttcctttttggtcttcaaggaagaacttgccggcaagctcaagcgaagggtccatctggatcgcttcccaagaaccgaacccgtgcttccaaattccaacgaccaaccgagcatcttcatcaggaccccattcgaccgtccagttttgggtcggacggatgtggtctgtaggaattcgccagcggatcagatccgaaacggtactaagaagctggtggactgctttcaagtcaaagtgacgagataccatggtctccgcattgatgctcctgagaatgtgaccgattgacgaatcttaagtactgctcgaaccacgagagaagacaaaaagaagaaaaacttacgagatgcctctgaattccatgaggaccgccttctgacgcatgttagatgtgatcttgaggagtagaagatttgatttgattcagatagtgattacgttcagctactatagaaaactgttatcacgattacatcagaacgctgtacttaccacctctccggcttcctgtttctttttcatctcgcttttatgagcattgatggtggcgattccgccctggatgagctcatcacaagcctgcatgatgacagctcgatttttcgtttcgacctttgcgtctttcgcctgattcgaagcaacacatgcgatgagttcagccaaatttgagacgagtgaagtgagatactcaaagcgataacaaacgagatgcgtggacttacgatcaagtcgtatcgtaatctgatgtctccccacttttggagattacggataagcattcgaagatcccgatctggatccgaaaagagtgaatatttagcgccagctctttcgtctcagagaccaggggatccatatatatctcaaaagtatcacagataacatacctttaagctccaacgctttctgagcagccgtcttccgagctgatccagccttggccgctcctttacttttcggtgggggagagtccctcgcgggtgaactaccctcctcatccatcattcctgagtacgtccctgggttcgttggtgccgccgctcgttttctcgatttcgagctcagcactgtagactctctggagatcgcttcgggtggctcaatcacgtccacaggtcgagcttccacagggatgatttcgtcccatgacagatcggtctttacatcctgaacggcggcgaattgttggaggaaaccttcgccaccaagagaagttccaccaccgtccataccggcggtctcatgatcttcggctctgttcaggatgtcatctaagtccatctcgtcgagtttcttattctgaattgtgtcgtccgttttgaacatattctgagcaccgaatctggttgagggcagggaaatttggtcaataaaactagctccgtaaaaaggagagtagtgttcacagagaggaccaatcatcgaggaagaaacgtacttcagaatagcgctaagctcttctttactaaagttctctgccttggctccaccagcagccttgggtcctagagtagaccctgaagtatccatctgactgatgactgtacattgccaaagcaaaacacggattagcgttggcaatttcaacgagtgcatctgaataggagaaaggaagagaagatagcttactagcatgctctagaaccatctttttctttgctctttccaatacgtcttcctcaacggtatctttactcaatagcctgttttgaaaagaggagaagaaacagaggtcagtgacaatctgaagacgcgcgaaagagaaaggcttggaaaatagctttacctatacaccatgacgtgcgacttttgaccgattcggtgagctcgggccattgcctatcagtgtgagaatacaaaggataagagtatcaggatcgaatcaaagcccctgccgcgatcttacatctgatgacttacctgaagatcgttttgagggttcctgattgagatcgaagtcattcccaagggtaacaagaacgtgagcaaacataaccgaaagtataggaacagagaaaacgtaaataagatcgaagaccgaccaatcgctgtcgaagatgatgaccgtatctgcggaagcaaggttgataccaagaccaccagctctggtagagagcaggaatgcaaagtctggagagttgggtgcgttgaaatgttcgatagatttcttacgaatatccgatggtaccgtacctacatgtcgagacaaacgagaacagttgagtgataccgtggaaaagagagagaaagatccgatgatggtgaacgactaaccgtctaatcgttgatggatataacctctgatggacatataatctgacatgatatccaacattctaaccatctgtgagaaaatcaacactcgatgaccgtccgctttgagcttgttcaacagcttgtccagtaacaccatctttccactgctcatcacaatccctcgaaggatttcatcggttgtgtttgctttgacttcagctccatcgaataagaatgggtggtttcttttgttgaagaagagaatgggaagctatgtgtttagaccttgcgtcttacggatatcaccaaagtcgaatagactcacgaagctttcttcaactccatgactacatgtaaaaataagaacgttccaaccgtggatcacagatagatgagaggcatatccacaagacaagtcgctgattcaacgagagggtgaaaacacaaaccgatgttcaatagactgaactgctggccttgagcaccttgactaagagctgtaaaattctacaaatagaaagcaagacaaggaaacccgaaagcagcgagttgagcgtttcttctttgctttgcgcggattaaacaaccaaggaagagacccgggtcactgactcgtgttaagatgtctgaagataaacaccggttcgagaacaagactaatcagcacacgtctttcttgccgtcacaaagacaccaacacgataacgaggccgacgtacttttgtaatagtgggtctgaagcgccgacatttccactctcaaaatcctctctgattttgtcgggagagactttacaacgtctctctttaatctacgaagcatcacacccgccagactgacgtggagatctttgatctttgcttcctgatcggcgtcattcagctcaaactcgttacctgccaattggactattgaaatattgattgagagtgaggagcacgaagaattcagatacttgaacaagaactaggcgacattacaaaatgcagtactcacatttctctggcataaggaagtgcatcagagccaacagttctatcgatagagagatcaagataaaaggctcggtcagattgagttctcacaggggagcagccgaagcacgactgacctttgacgttgttttgtagaggggtaccagtgatgagaagtctcgaggcagaagagaatcctttaagggcttcgtacaactgagattccgaattttttaatcgatgtgcctaaatcagaaagaaaaaaagatatttgtcaatgaccagagaatagagcgggaatcaaagtcaggaaaagaaattgaatctgaggctggaaggaaaagtccttacctcatcaacttctaaagcctgccacttgatactacccagatcaagtttatccttcagaatgaactcgtatgttgtcaacaacacgttgaacttcagttttcttgccggtccaaactcatattgtctgatgacctctctgctcttcgccgatccctggtaacagatcacgttcatatcgggagcccaatatttgaattgcatttgccaagcggggattgtcgagagagggacgacgcagaggaaaggaccgaactgttgacgttcgtggaagaggtacgagaggaatgcgaccgactggaccgtctttcctagacccatctatagatcacagtaaaagagaaggaaagagctcgttgagctcttggacactaaagatgagaacaaaacgagagaaggctatcaacgaacttcatcagccaagataccgttttccccccgactccataaataggccaaccagttcaatccagtcaactggaaatcctttagttcaccaccggttgctttaatgtaatccggatcgtcctggatcttagtgaataacggtcggccgtttgtgtagttcgtcgatcgccagggaacggtcagcgtggcttctcgttccatgtatgcatcaatttcggtagaggcagccggcggaagatcctcggcgcactcccaggtattatcggcatacaccaggtcttttcgagcatgacaggcgtaagacgcaagagacagagcgagggtcagaatcttctgctcgggcgtgcagaaagaagaatgaaacctgatgaagagaatgaactcaactggtccatttacaaaagtactgaacgtgctgatagttgtgggcatcatctggcggtgcatcccgctgtgccaagattcgttctacgattttatgtgattcaagcatctgacaagacaaatcgacctcatcattagttgttgaaactcacatgagctagacaacatagagaggggaagaacactcacttcgttgattctctctttttcgatatggaacgcttcgagatcttctctagagaccttagggctggtgaggatatgcctctggatagagtacgttccctttatgtaattgtcgactcgtttcattccccgataatttttctttcgaagaaaatcgtacagctcttcggtgttgtgcaggtgagagaatcccttccatttgatgacgaaacgctgtgaacggaccggaagagagtaagtgtgttgtgtcgtgagtcacatagagagaagtgaagactgaccatattgacatgggccacatcatctggatcattcagatggtcctcatctcgaaagtgtccgcacacaagctctatctcgtcctccgctctctctgtaagaggtgtgatatccgttcagaactcttctcaagactagaccatgatagagaaggagaaggaggaaaggttcactgacgatcgatattggaagctgcgtaggcctccatctggtcctcctcgctgtcgagcccataatcaacggcagcctcgttgtagtttggacctatccgtctcctgtcttcttcttcagaatctagaacgacaggcttgacgcgcttgtttccttttttgtggactgtggtggcataatcgtcatctgattcggaagcggattttaccttggatacgtagagagctgtagctgttgaggaccaggagaaaagaagaagagaaggttagaaagagacaaaggaacaattccgcgcgcttaagcaagatagacacgagaacggaaagaagcagataggtggcactaaggaaatcagaaaggcagggaacgtactggacgttcgaccttttggagcgccacttgatcttggcttgaccggcttcttcttctttttgggtcgctcatcataatcatctgattcgtcgtcctcggtagtgtttccctgatcctgaaaagtaagaatagggaacatggaaggagagatgggcaaggtagttccaggagggcacaggctttgatcagtttggactgtaatgaatgcaagaactactatcgaagcatacgaacagattgttttgcctgacgtatgaaagaggtaagagtagaagtgagagggaagcgtagaggagaggaggggaaaagagggtagatataaatcaacaggggagataaaaagagtgaagaagaaaaaaaatccaatcagttcaaccgtgtatttcttttctcaactcccatcttcccatgtcgttccaagacctcgtagagaaccaaaagagcaagaccttcttcggccagaccgaaagagacagacaaaagagaaaccaagaagataagaagagagcagaaagaaggacgtaccgatttccgggcgcctccgttcgtgtttgctttcgctttgggctttccctttgttttcgaactctggttggattctctgtactcctctccttcatcgctttcgctttcgttttctccgtccccgtcgtcgtcctcgaaatcctcccccttttcgctctcgccgtagtcgtcctcgtcgtcgtcttcgggcgagactgagcgctcgacgtaggactgcctgggtacggtctgagtcgaggggaccttgcctccgacgacagctcggtggttcaccggttgtatcggggagtaagatcctaagccgttttccatctcttttcgaactgagaccgagataaagagggatgtaacttggtgtttttttctaagagcaagaagagaggagaccactgttgaatcaaatagaatggcaaagagcggtaaacgagctggcttgacacttttgactctgggataatccgagaggagagcaagacaaggagactgaccgagagtgaaaggacttttagaaagagagacctgatcaaggaatgcaacgtccccgaaagactcgacaagctttagagagcttggattgaaggaggaaagagggagggaagctctgaagggggacaaagagggaaggtggccgtttggagtttgggtgctcgccgtcattcgagatgacaagaaacgctatttctcgcggtctcttctattggacctgatctcttttcgttcttccttctttcttcttcctcttgcttgctcctttcattcatagttcattctttcttttctgattttctctttctcgcctgtgttctctctcgggtactcttcgtatctgtgtctttgtccttgcaacatgtagcatgaatgtatgctgtttgcgtagctcgaggagcccaagaggcaccagataacaaagagaaggacatatgtacgccagtttggtaggagtctgcttgcatcctctcagcaaatgcatacattcaagacaacaaactcaaggtgaacacaaatgaaagaaagaccggcgttctggatgttctggatatctggtttggataggcttgtatgcggtgtgtaatccgaacgaaggctgacgcaccgagagaggaaacaactgctggaaaggtggatctgagccgtatatactggatgaagagtctatcgctgacgatgtttcaacaacagagacgttctgagtgcgtgaacgagacgagagaagaaggagagagcgcaaccgatggtgatggtgaaggagagacgatgaacgagagggtggagaaatgtattggacgtcctattgaaagttgtatttgtttgtattcatttgtattggaaaagtgtattgaatggtgtattagaaaagtacattaggaaatctactaggaaagataataggcaagtctactacgagcgcatctgcaccaaagcaaacactcccaccaaacgtcgcccttgcgctgcctctgtagctctctgttctgatcctccgagtagctatatagcggcttgaccagagttcgtcattgaaagtctttcttgtcttctctgatttcgatgtttcttcactcttcttcaacgcatttccttcatttgagttgtgtcgggcgcgtttcgtccctaccatcgcttctatcaggtcactatcactaccttctagctgtagtggagatattgggtcacaaacacgaaaactcgaaaggtaaaagagcgaggtggagatgaaacacatgcgctcttgagacagtatatgtacatgagtattaacaagcagacaaaacagaatacatggtgcgggaaagagaactgtatcaagaggaatacgagaccgtccacttcttcgactcgtttgagttaggtacgaagagaacaattcctacaatgattaatatgaaggcgagacatatcgagcaaaatatgaggacagctatttaatcaaacaccaacaatcatttcagtttcaatcataaggcttgaaaacgggcggcagatgagacaaagaagagaggagaagagtccgttggggacggcaaagaaacaagattgactaacgtttcaatttctgtcttgatgtcaagataagtctcaccctgatctcctcgaaggtttgtccagctatcaggtcattccaatcagattccgacacgtcagcccaatcttcgcctaccgggatctggaagaccattcgttcaacggatcttcgactgaggacatctggaagggccaggcgaagactctcaatagtttccttgaagagtcgacaagttgaggagaaggtaaggatagaatgtcagtgcacgtcgaatgcttttgtcgtatagttcacgccgccacacaagaaaagaacctgggtgcagagcgagagaacgagcgaaggctatgaactgcagaagaacacgaaaaacgtacctctttggtgaggccccacgtacacatcacggtgtgtttccaatcactcgatggccagacaaccttgaaagccctaaagcgtctacctgaaggcgttggattcagggctgtaggaggataagatgttgggttcgagactggtacatcttgtggaactgttccctcaagacgagaatccttggagtacaaaggaagagagctttcggctgactcgtcagtggagggcagaggtgtgtatggattgctggtcatgatgatgtctggaataaagatagagatgtgattagtgaggtggacgcatgggtgcgagttcttatgaagacttagcaccactactttaatgagcaaaaccttatttccgagctcgtcgtcagcgcttcttggtcaacgtcagtcacttgggcatacttcgaaggatcgatttgacagagatgggcaatactcttggccataaggcagagacgagcacagatgtgcatgtatgcttgatggatgtataagagagagagttctggtgagagctctagtacaaagtgcagtaaaaagtgcagtaaaaaagtgtagtcatcgttgtagtctgcctattaggaaggtttgtattgtttttccggaatacaaaaaaactacagaaagactacaaactttcctaatcaattttctagtctctccatagacgcgcccttgtttttctcctcgctctctttcctctgcatcgtccccttgcacctccatctcggccatccaccatcagcacaggcaactgcaacagcagcaacagcagcaacagcagcaacagcagcaacagcagcaacagcaaagtaatcacagagaacctcaccatggaccacaggtcacctcgttcgcctcacttcccatcccctacatcaccattcgtcccaccaccaagcgagcaagacgaactagatagactaggcgcgttcgacgcaaagtcaacagctctacataccaggcgatccggtggtcgtccgtcggatgcttcgtcttcttcctctgtttctgccgtatcgtttccttcttccttagcagaaaacgtgattataccatcatcatcatcatcatcaccgccaccaccatcgtcctcatcactactactacacctaccctcgtccgaaggatcccttgcgactctcgagaaggataccgacctggactcgccggtcgaatcctcactcttcctcgtcacagaacctcaagaagagtctcacacagactcaagcaaccatggcgacagcaacgacccaacaggtcggaatgctgcacttggtctgggtccttcagccggacaactctcgtcactatcccatccgtccacgtcggctcccatcataggtctaggtcacggcccgagatcgtcccctcagccgatcatcatccctcctctgacaaatcaagcgcctggttcacctcatccgccgcagacggaacctcatcaatcacctcccactcaacgaaagctccagcataatcttcaatcagactcgcacgacatagatccatcagcaacacaccctccgtctgctgttctgctttcctcaccaccggtaaaagatccggagagtcacccgatacctagtccaacagacgcgttcagtctatctcaatctgttcatcctcctccatctcctcggtcctcttccgtcaaggacgaagaaaagccggaagaacaaacgcccgccgcgtttgttcctccgcccaggacgacggatccagatacctcgcccctagacaacccatcggaatcaccagagatcaagattagagatttcgcatacaacgagtcgaacgctctccataggaaaccgatagaacctcgggcgaaccgagcatcgaccgctgatgaactcgaagatggatcgcaaaccgaggggcgcacagatgaatccagaacaaaaaccgcgtttggttggggtgagttcaaacgcggtgaggccgacgaagactgggaagacgagagtgactatgacgatgatgaagatggagatgaccaagacgaagaagaagcccacgacggcggcaatactggaggcggacacggagaggatgaggaggaagaggaagattgcacccctggactgtacaaagcactttacgcgtaggtcttcttcttcttcttctcttccttcgtcctctaccctcatactcgcacctatactcataacacactctcacacttcactcagatttcaatcggaagcttcgtctgaactatccctttcggaaggagacctcatcaacgtccaccgctcaggcggcataggctgggtcatcgccactctcgtctcgcccaacgggaaccctgtcgatcccgtacagcagggactcgtcccgagaggttatcttcggcaggttgataaaccatgagcatgtttctcgcttgctgtcgctttcttccggtctttgtcctcttgttttcttggtctttcctttttcttcttgctttgttttcgtttttgttcgcgcttgtcttcgtgtccgtgtccgtgtctcaatcataaaggcattctatatgttttgtcggaagtgtagtctacttgtctgcctttcctctcttcttccgtccatcacacatgtttatcgtgtctgtcgggtcttattaacactcatcaacagtgaacatacacttttctcttgcctcccttccgtccttcctcctcaatcttccctcttcgcgttgtctgatacaaacaatccgcctcttacgaccatcgcctcttccttctctcctcttctgctctctttgtgtcggttctctcttttgctcttgtttcttcgaaccatatatatatatacatacatatattcaccgaccaagtctcaattcatgtacagatgtatctgatcttgaacctgtctgtcgggttgtatatacgatgcccaagaagagaaaacataaagaagatcagaaaggatcttgattcaatcttgtacagtttcatatagatcccaaacgcgtttgatcagccaattcttgaaatacacataaagttactaccctctctctgggtttcctgttctgttctctcttgtgaatcgtccgctgctccccgggttcctctcctttgttctttcttttcttctttttcctttcagagggaagcctcgattttctcctcccttccatcagcccatcgggcggtgacagacccgtcctgtggagcccacccgaaaagcacagagcgaaaacaagatgaaatagaaaaacacaagcatcggtccgtcagagatatgctctcatgaaaacgacaaggcaaaaggaagaagaaagggatatgtgctcgaacctcatttccaaagtaagcggccttggcaaggtcaacaaatagcccgacctcgaccacaccggtgagaagcttgatgtcagtcaaaagctttataggcggtgacattccattcaggtcaagtaaagagacaggagaaattgcgcgatgtcagcatacatagatccgactttaaatgaaaaagtaagaggaaagagagtgggaaacaaacctgggcagggttgaggtagatctcctcagggaagacggcgtcgatgacaaaccctccattgtcagtcacgaccggtcctttaatgataaacaaagcgaatccagaatcaagtgatttcttcggtcagtctttccgacaaagaagttatcaaacaagaaaaagatgaacaggtcagactaaccagccttcatcttgcccattcgaagaccagccttaatagctcccaacttctgcagtcggagaagaacagcagagtatgcgaactgagcgacttcaatagggactccttgcttccactaagcagcatcagaaaatgaatctcgataatcaatcagccactgaaagataaaggtttcggagagaagagagaaactggaccaaccgtcgtgccgaggatcgacgagttctttcggtaatcagccacaatgacccaactgtatgatgtaagaccttggcttagtatcccaagccgaaagcagaagggcgagacgtccaagatgaagaagagctcagaaaataggttctcacgtctcggcggcctcagcgaggaccttttccctcaattgacacgctcctcctcccttgatggactgaaggttggcgtccactctattcaccaaagacagatataacccccaaggaagaaagagacattggggtttgccgtcagacaagtgtcccttcgatccagattgcgccaagggacttactcatcagctccgtcaatagtcacatcgatagaggggtactgctccagatcacctagcgttaatccagccgaaacgatcaactctttgctctggaaacctatcagttgctcaaaaccaaacggtccaaacagcagcaagtcagaccttgattcgtctcgacgaaaaaagaagagatagagagccgactaaccagtaggaatgaaaattcgaccgaggttggcttcaggaccctgctctttgatcctgtccaccacgtaggggacagtcgacccagatccaattccaatgatctatcataaaccccgaattgaatatatctggtcagtctcgaaaagatgacaacagagaaatagaacatccaatcaaccaacgaacaaaccttgtggtctttcctgatgtggttatcgacagcagcgaaagcagcgagcctcttggcagcctcaatgggagccaactgaacagtcgacgcgggaagggtcggtgcatttgagacggactcggaagtctagcaggatcaggagacgtatccaaagcaagagagttggagagtacccgaaaagagagaaagaatgggtctttgttgcaaagttcggcagagatgcagggagcaaccccaaaagaaggggcctacatacgtttttcgcaggagggttgatcacctcggactttgtgtgcaagtcggccatagtgctgaatgtaacttttgaagagacaggaaacaggagagatctcgaagaacgaagatatagtctggataagattaaccgactcagtttggataaggatgatggacgagagagacgaaaagagagatggcaagattcaaatcaggatgagaattgaaaagaggatgtaattcgtcactcgtttctgaagtttgacgtccgatcggctgtccaacctacccttctcatcttccccgtctctccagtggtctctctctgagaacgtgtccaaatgctatacaagattaaatttatgcaatccaaaatgaacaagcgcaaaagagacagactaataagaattatatgcgcagaatgatacaatccaacttgagaccgaagagttgaccgaagagtttaccaaagagtttaccaaagagacggaaaaaagcatttacaaatacaataggaactaaacaacgtagagaaccagtaatgtcactatagaacaaggaaatcttaacgagggtggcaggcaagacagtgtagcgatagaacatgttccttctggagataaataataaagaggtttgactagatagaggtgctggcctctgtaagtgatttagataaagctttgtaaaatggtcgtacgaattcatgcaaactgtcagatcaatgactccttgaagcttgaacaaactccaatggagacgattcgcagaatctgccgtctgttgttgatgtgtccaaatgtctcaacaggctaaggataaacatccgctctttgctgtatagtcccggtttaatgaagaactctcagatgtcaggaatataatgcgctaatgatatcagcccaaacaccgattgataaaaaaaaaactaagacgaacctagagttaacgaaatgtaacgggagcgcacgggcagaatctatggtagacgtgggcaagaaccgaggttgaaggagtgtaggcgcaaagatggttgcaaagtttctgaaaagcatagaacaagatcctgatgtcagtcgcaagaattgaaaacatcaacgccaaaaacacgacacccacatgtctgtcatcttggtctgtttagtcttggtcaagagatactgaaggaatgagataacaaaaaccaatacagtgcgattgatgctgctcatattgacgggcccgttaatcagaaacgatatggagagagtatattagtttcccgttagacaaagagagattgcttagtgggaatacatacacgggcaagttttctacaaaattccaagcatcgttcggatcctccgaagcgttgatcgctgcctcgtaagattcgaaaggaatcaacggttcttccagctccctcagccacaattttaatagcgaagcgggcacagcgggatcagtaaatggttgaagatcatataggcctattattgtcaggtgatagtgaatatggtgatcaattactagactctaagacaaacaggacagtcagaacattgaacgagcctcgatcaattctatctttgatcatagcaatctggtctccgtttccaggaaccctctacagtgtcaagaaaaggatcgatgatagagacaagagaaccccctatcagtaagacgtgcgtcttaacagccagaaatgacgtccgcaacttacaaagatcccctctagggtttccttctggcccatagacaggatggcattgctcaagaaaggcaagatgacgggcagacgttcggtcctataggtctcggcctgttttaacatgatatctgctaatgttgtgttgaagacagaagggttgaaagcaactccctatgatcacgacaacagggactgatgagttattcttgtttgattcggaaagaacagtttcagtaaagaataacgtaccatggcactttcgatctctaagagtgaaggcgctcgccctttagctggtttgtcggccatcagctttccatagcagactatagtggaggagaatgatgatgataattagaagagttcgtgatgttttttttaagatgtagaacaaaagaaaaccttgaacatacatcgcgccatgacctcgatctttttaccaacttccggctgatgcatctttgacgacgcttcgaaatgagactcaataaagtgtcgaacgtatgactcaaacgtcttggacgggccgaacgtgactgagagaacacacaacagctcccatcccagcaccatagaagctctgtgaaaagacaaccaagtgatttcagtcagtttccttcctagttactgcctctatcagaatgaaaggaatatcccaaatcaacatacgggccagggttttcggtaagctgtttaatcaattgacagtagacttcgtctctgagttctgatccagagatccccgctgtcaacagccacttgatctccttcaagatgacctctctctctgccgaccgtacttttgccttgcgtttggcaatgatatcatactgatccagtccatgagtggacgaacaggaagctgatactgaatgggaaggtagaacgacgggtctgtcacggtcgaacatgacgtgctgaatcaccttgaatgtccgaaccgagttggctttatgagatgagggaaggagaggagttgtgattgggagtttttgccaaaccgtcatctgttctacctaaatcctccacgttttcccagaataagtctcgattgagtatatcctagatgtaagaaggacaatggattttacgatttgaacaaaagacatagagtgcttaccggaacttttttcttcaagatgatacctcgcgtgtgcttattagagaaatgctgagtagcaaactgttgagtatctttggatatatttggacgagacgatatacgttgactacaagccaaatgaaatgaattggttaaccgttatctattcacaagattatatttgagagcaaaacggatataacatacctggaatccaactctatagtgtggggcgcaggattaaacggggtattctcgaaatgacgaaagtctgttcattcaaatattggatcaagaacaagagaggacaaggtaggtcaacaaaacgactgcctcaccaaaggaaacaaacagtgagcgtacctggtaccgtatcgctctttctcatcaatcgattcttccagcttccgagcaaggttccgctgagccccttcgactcggttccttccactggtgcacctaaaacgatcatatccttgttctcattctccaaaaggaccgctcctagagatggcgtactcaacgctctcgctcgcttcctagtcgttctctcggccgagagggtgttaggattggagatgctgatggccgagtctttcatggaaagagggatctgtaatttctgggcagcgctctgaaaggatagatatgtcgccggcacctttgatctggataatggtggggatgaatgagacagaaatgaaacagatactgagcgattccttctttgagagcgcaaggcagcggcacggtttgtagagagattcgtgcggttggatcgagaggacgtgtcgaaaaaccccaaggacgtgaactgggtcaaagccaaaggtatgataagtggaacgtctggccgacgccattgagtttgttttgtctttgtgtgatagtaatacacgaggccatcttgagtgtaatcagagagttcccaccattgaccttcggaggcaataggtagactataggacgccaagaaagatcgatcagttaagctaacgttcgccaattgttgaagtaggatgcaggcagatgagaagagacggagagaatggaaaggaaaaggaagatggcatccacattcagatacgtacacgtagactccacgaggaagtttccaggagcatgttcccgtctttgggtttgaataaaaaattgactgtgaaaggacaagcatccataatatatatcccgttagacaaaaaaatccctgcgcacaagaaagtttcacagataaactcacgttctcatcctggatggtaacttttatgcaatctcagccgagcgtcagcagatgtggcatcatctggttgatttaagtggtggaaagaatcagagtgcaagagtgaatgacgactcaccccagaaatgtttctgccagatctctattccatccaatttctcctgaacagtcggtaggtcgatattaacgtccttctgctcattgctctgagcagtaatcttctcaagtacagattcggcccaaccaacttctacgtcgataccttctccgattgtgcttgctccagcggacgacagtccggggcgaaaagtcgacgtgcgcgaccgatcaacgggatctgagccagacataagttttgtacttttttttcctcggagcgccacggctgagttccaaataagacctagaggaaacaagcggaccttatgaggtcgagctcgtttcactcctttgaaaaaggaggagagagcgagagcagaaaagagtcgagaatgaaagcaagctgaagaagggaagggtatcggggagactgaagctaaataacagaatctgatcggatggacaaagtcgataacacgtgactgatcgaggcacagccttaaatctctaaacttcccgcttactatgatttcaaccctggattcctactctgccaacaacgacaatgaccatgagcgatccaataaagaaacacacgatgtacagatagttcttctgattgtttgcctctctgtcttctttctacatgggagttgtttctggtacacttgactgatttagtcgtatttcttctcctgccttttctcccttgcctcgaatcaagtacgttcaactttcctattccctctccgtcccatgcgtccatcatcaaacggacgctcgaggtagatggcgaacgaacgcctcgagaagttaagactacaatcttagataaaggagacagtttggagatgtacgtttctaggtcgacatggttttctctggctcaatagtcaatctgacaagcggttcttttgatatggtttcgtgtcggcttgcctaactcccatctatgccctagttcgattgcaacgtccacgctgaggttacttcgaatgaacgtaaactcgatgtttgaaaagctagatctagttttaaggaccgtagatgcattcgagtctccggatctcatggcttgaccggattagtcgatatttattgtttataacagacaaaccatctcgagtgaaaaggatcaaggtgattgccaacgatgataacaacaacaacatgattgatcaaatgagacaagtaaaggagatagaaaaactacaaaggaaagacagaaaagcctctgaacaaccagtcggcttgattctcttcttttatttcttgggatgcagatgtctacttggcgccgaccttctctttcacatcctcaacagccttctttccctttgccttgccctcctcaatctttttctggccttccttggcaacctccttcgcctttcccttcgcctcatcgtactttccctctgccgcgttcttgccttccgccaatttggcctttccatccttgaccaaatcctcagccttccccttgacctcagcgtacttgtcctcgacctgggccttcaattcacccgtcttctcctgtgcctggtccttgagctcaccagccttgtccttggcctggtgagcgagttcctcagccttggccaaagctgcctttgactgaggcttgaaaactccaccggcaaggaatccaccggcaagaatagctgcgaggacgaacaatccttgcttctctgcagagctcaaatctcgactggtctcctcagcagaaacgagcggatcttcgatcccaagatcagaggtggtagacgttccagagacaggacctccaccagggtgggtcgaagtcgaagcggcggtgtagaccttgggaacgaaagcctcgggtacctgtgattgagaaggcgaatcgctagtactcgggaacttgtccgagtggaaggcgaggatccacggctattgaatagtgataaaagaatggaaaaacaggagacagaatgggttgttggtaattgtcgtgaagctgtatattacatgacatatactcaagactaacgataggggtagcagattcgggctggtctcgagaatcagggaatttgaggtccaatgtcatcttgctctgtccgaacgggttctccggcactaatttcaatccaagtatcatgtacacgaaaacaaaaccaaaagcctttgtcaaaatcaagatataactggagtggaaagaaaagaggaaagaaattgtcttgtaaaaagaggagatacttacagccaggagcgaccgtatcggataccaagatgtcaccacctaatgcaggctcgatcgcctgggatgcgactggaattgacggaggaacagacaacttctcggtcgagatcgccggtccgttgtcccgaaccttgagggcgtcctcggcactgacagtggtctctttggtagcggacgtcgaggcctgtcgtctagatgggacaggaggaatctgttgggcttgctcaaattcttgtagctttcggatcagatctttttttagcttgctgccaccgctgaataggatcaaaatgacacaacacaatacaacataaggaaaggaaacaagccgtctcttataggtcagtcttggctactcctacactcgattcatcccatcattgatctgggagacaagagataaaaatatcggataaagattggcaaggataggaaacttacatagcgatgtttcgcttgctaagctctcccttcagttgagaaaccgtttgtttctcccaagggccttgggagagcaagacagacgaagccaactggcgctgctgagcaggaagcataaagtgaggctgagcctggacctgagcgaccgctctgagagagccaagagatcgagttgaacggagcatcgcttgtgatttgttatgtgtatatggctttgagttgaggtctagatacagggagaaagagatgggtggttggttgtttagtgggagtggaaagtgaatgagcaaaaagaacatctcgtctagccattcccaccttaggtagattttcaacataaatatcaaattaaacaatatcaaataattttcatcgtgtccatgacattatcggttttccttcgatgaatatgcacttcaaagaccaacagaacttcctgccttttctctttactctagctttgatagtcatttgttatggagggatacatattattgctacagaagccaatcagctctcctaacaacagttaggaggggcaagggaataaattatttgaaggcgttgagacctctgttgatctcttcctttccggaagcaaaggtgttgcttttggactgagtttctagaccagcatctgcattggtagcaccagttgtagtggtggtagtggtagtagtggtactactccttccagcaatgctgatttatcaacatcagtcgcgagacaattaaggaaaaattgacgatctcggtgagactgttggttttcaagagaagcgatggtaagaacggaaactaacccgtcgcctagtccatcagccgccgagttgattgagcctcgaatgacttctccagcacctgttccaaaataaccatcgttcccatggttcagatcagaaacgaactatatcgaacaacagaaatgaaagtgacaaaaggttcagaacactcaccatgaaatacattccatccgcttttcacagcattggagatcgaattggcagtgttatttgaagtagacgaggtcgtagtggtagttgattcgatagggttggacatgtttatcaatgatagaggtgatggtgaagttgtgtcgacaggtgattcagtcggttttgttgtgtaagcaaaagcgggaaaaagatggaaagatgcggttagggttaggttgacgtcatcgagtacagaaggacgttcaggctaaccgatttatgatcaccattgatatcgacggaggagggacatctgatggccttctaggacaaatgaagaataggaagaggccccaaaacgaacatgaaatcgagaagaaaaaaacattaataggagtaatctgtgaatatgaagcaacaagagagcagacaggataagagctcaagaaagagggtggataatacacgaaggcttgtcatagatgtggtgatgcaaagtaggatgattttcggtttagggaaaggatgagaagaagtgctgctcaagagagctatgtatgaagaggtaatgtgtaaacaaacaaggaaagtaaacaaggtacaggcggtggacaaggttccggtagctcagatatcaaaactcaaatccttcgaacaggtcgtcgtgagtttgatcttggtccaactcagtagccaatcctgctaaaagctcccttcctaatcgatgatctctagcctgcaatgctgcccacttgctcttgccgtttaatcttgctgatccggaactaactcctttttgttccggggtagctctgctctgtctaagcgcagacggtgctccaggcctaacaatcttagaacctgacaaggacgaagcagacggcgtcgtggatgacataatcgaaagtggacgaattgtaggaggtggtccgttctgtgttttggtcgtcgccgttgcagaggatttggatgaggtcgaaaccgaggatagcggccgtcggctgacagagggagtcgaagatggggctcgaactgtgctaagatgattggaagcagaggagggagcgtcccgtttggtggtagataaaacagagggcggaagagatgagaagccaatgcaggtcgatcgagagtctctagagttcgaatttgctcgagcagagattgtcgacggtgtgggacatcgtggctgattaaggaggacataaagttcttcgtccgagtctgatacaatcgtgggatggtatctagtcagtaagtattgaaaacggagacaaaggcataagaacaagaagcacgcgtacttaaatccttcagattaagatctaaagatccatcgcgatagtcgtcatccagaacgatatcgacgggaggaggcaaatcaaagaaagaggatcctccaaggaatatggcagtgcttcgaaccctttgtccaagatcggtcatatccagtgtatcatatgggagctcgaaaggttcatctgagtggaataagaaaatagaaggaggaccaaacgcgtcagatatggcgaatcaaagtaaaaagccaagtcaagcatcaatactcaccaacaaagcctctgttcatctcttcaatctcgtcgtcttcctcctcgatctcaagcacattttcttcgactagctcgccaagacctggtccagctccaagaacatcgggatcctcgatctcgaaatctactaccggatatctcattctcgccgcaggtgtggagaatcccggatctacttgtcttgatggagaatgagtactaagaacatttgatgacttgttgggtgaccgagatagattatttgaggaggttgaggaggagagcggggtatggagctgcttagatcgtcgacgcgttcgattggtagacggaagaggagttgagaggatatttgtcagttgctgagtcggcgaatgagattggcctagggaggttctctgagttggatgaggcgttcggaggacatgctgaggagtaggcgctggccgtgactttttcagtgtcggtggtggctggttcgagttcggtttggccaatgcgccgtctttggaagacgaattcagctggagggtgcctgatgccttgggtgaccctcgattggtttgtaaggtaaacagtcttctaggttctgttgaaggacatagatgtgtttcataccaatttgttgaagagaagaagatagaacgctcagatgagctatccgaggacagccaagacaatgtgaggggaggagagagaatgcccgaacgaacctatcatctgtccatctttcccttcgcctgttttcgaattaccaagattgactccaccctcggtccaaatcttttctttccctctacccgtttgagtggtctgaggcggctttcctcctagaaggacggatgtctttgtgaagggcgtcttgacgttgggacgaccgacggttcgagcacctgctgttgcaaaagaggatccggccagtcctattcggagcggcgtcctggacggcaagtggtatgtattttctttatcatggaatgtatgagctagagagcgatgtaacatagtgtataggagaggaaggttgcgctagggaaggggacagaaaagagggtcgaaagaagaagaagaagagaggatgtttctttccgtgtctacagcgagggtgagtgtatccgaaaggaagaacgagaagaagacgcgtgaaaggaatacacatagcacagcaaacgcgcttcaatcagtcacgtatcttcatcacgtgacacgattctattttcggacggtctgtgctcaatcatcccaacacgttcgttcccattcaattgacatttttctttttgccttcttctctctcttccactcactcactcactcattcacttgcttggttctatctctcgctttggtctttatagcataggcacacactgacgttcatcttggacacttactaactgaaccccgagcactgggtgatcgtcagtctgcttctgtctttgttacctatcgaacaatcttggatccgagctcactttatatccttcccgtaattacctctttcctaaaataaattctagtccaaccattttgttgaatggttcatccgagcatcctttttctcaacccatcatggctgatcctctcggtagcagcatcggcggtggcattggcctaccaaccatagctcctcctgcgtctcctcctgttgcgcttcagacgccagataatgacaagcatcctcactttcctgttctcgaacgaacgcgctcaccgtcgatccctacgtatccacctagacaaccggcgactgccaccgggtcttcaacctcggttaatcatatagctgccaaagtctcgatcgctctcccagctccaaccactcctgctaacgctactacaactactactatacccgctcttcaatcctcctcctccaggtccaacccacctcgatttgcggaacagttctctactcccttgcgaagaagacatcgacacgccgctgccaccgccgactttcccttgatatccactcctggtactgttcctctgaaaacagacaccccgtctcactttagtcctcacggcgagtcatatgaggattccaccgaaccatcactctatcggggtcttcctcgtatgtccggtgctccgggtctaccaccagcagcggtgtttagatcgtaccatcggggtcgccaactagacgaagaggcgatcagcttgagaagctcaaattcgtccaggcgtacgaggagatcccggaggagttcttccagcagcagcagctcctccggaaatagcttcgttagtctgggaaggagagctgtagttggagcgttggaggcagtgggcagaggtctaggaatgttgtcaagtgaaagcgacacgagctctatcagaagcagacggagaagacgatcgtctggtcaaagatcgaccggtcttacggatgacgaacgaaatgtaggaggaaatagttctcaacagatgcaaggcacaagaaggcgaagacggtctcttatccagcctcgaaggatccgcgcttggtcgttcggttcttttttggggtcttcgtcttcttcgtcttcggcttccacgttctctggcgcaggcggcagagcctctaccctgtcaatcacatcggtacagcagattcctcgaaaaaagcgcaagcgaaccaaacgtcgcaagtctatgaccacagcattcagctccggtggatcatccacatcaaattcgtctggtgacgaagaatccgatcatgagcctccaggtcgaagggtcgttcctggaaagaaagaattctcgcttctcttcccttttggtccggaagaggctttgccagctcctaattttctttctccgtcatcaccatcggctggcctgtcccctccaactctttcgtcatcttcctccacttcaccggtactctcgcaaccgtccgcgaacagagttactccatccccacgcttgcagacaactacagtcttatctgagcttcttactagtctacaaaccatccgaggcactccacctctatccacctcatccccatctaatacgaatctctctgactcacctccagccccagatatacctccttatacatttcctaaccctcccataccaactccttgttcaactcctcctctctccaccgcatcgatccccgttgttcctcaacggctgacgcctgcccagatcctcaacgtgtctccaacaccatcccctccgctctctccgcgtatgagcgcaaaatcaatctcggagggtcgtcttcatcctcatccgcttagtatggcccccgtcaacagaaacacgttcgaaaagaagatggatgcgaacgagaaggacagcaaggccgatagacgggatgtaagatctgaccgagagacgcagaagaatggagcagaagatatcaagtcaagaggaccatggtggctggacgtccactgtcctgattgggaagacatgagggttattggcgaggtgagcacatacagagctcgagtagatcgaatcaagaatcagttcgcttggtcgctgacatcttttcccgtccatttgtctggggatttcctgctttctccttctcttccctcgaaaccagacattgaacctgcatccgctcactctggaagatattcttcatcaagaccctcgtgagaagctcgaggtgttttctagactagactattatttgcttgctattcgatcgatcgacgaagcatatttcaaatggacagattcctctccatctccttcttcgcccccgtctggacagagtccatctatttcgactactactcatgatccatctgtcacaggtcttcaagccattccagttgacccaacgttggctggcacaaacccagatctgccgttccaggaaaagccggtgttggtcaccgctgatggtcggtttgtccgacctgaaaaagaagcctccgcgccagagagtagaaattgggattcgggggagggcggaagaggaagaagagggagaagtgcaggaaaagtagagattgtggaggatcgaccaggaaaagaaggtttggaaggagttggtgtaggagccaaaaacatctatctcgttgtactgaaggatggaattgtctcggtacgttcctcgaatctcgattacgtcttatcctagtcagttcccgatttattagctgagcgacaacactggatacaccgttgtcactctgtagttccacttcgaagacgtttcaaaacacattttgaatgtgagacagcaaattcggagttctcatatccggaatacactctcatccggtaagtctgcccttatttgtttcgctgtggttctagctgtcccaacgctgatcgagtctttttactcttaccgtctttgtctcagattggattgcacatggtgtcgtacgttgctttgtcagaacacatgaaatgtttacaacatgtgctgaatcgtctttattcatttatctatccacacaatcatcagatggattcagtagtcgataccttcttccccctaattgactttgtggaggaagaggccgatgcgatcgattccgaaatcatcatgcatgatgcactttcggagttccctcttcgaaaacttgcggcagaagccgaggcggaagcggctcttatcttggaacaagatgagcaagacagaaaggagagagccaaatcaactgtttcgacaggcttcttctctggaaactggataggtcgaaaagtgaaggatgaaattcagccagaaactcaaaagacaacgacgtcgacgatgtcaccgaaaaatgaatttgagatgaaatccgttccaacatctaaatcaattcctaccccttcatctccattatcgaacttatcgtcctcgttcactcctgtatcaacaaccaaagaaacattcgtggcacctattgatcggaaaccgacgttcacttggccttctacaacgacattcctacctctgatgcctaggcgaatcattcctacgcgaattatacctcgtcgaatggctctgtttctctacacattgctcgctagaatacttctgtttctttcccttcatccggctcaacgacaagccaggaagggagctaagaggtccaagacatacaagttggaaaccaatccagatctcgatcgaggtgagatattgaagagaatggtgaatatgagaaggttgacaacagggttgacgaggttgttgggacccaaaagagaagtggtcggtcggttgagaaagcgagtcgaggagttgggcaaagagggctggggaggaggctccggacgagaaatgggaatttatttcggagatattcaaggtatgttctctaaactccctttcaacaacttttaatagcccagatgtgataaccgttttattatccacttataaacaatctcaagatcatataatcgaacttcaaagcaccctccttcactacgaataccttttatcccaagcccagcctgcgtatctagctcaacttcaagtcaggctatccatgaccagagcgaggagtgatcgagccatcctgagactatcttacgtcgccattggaatcttgccggtacaattcataacctgtatgtttccgtttctttcttttccttgtctttacttctttcgatctcggtgagaatgcgcttgcctagcgagtttaaccagcgctcaattcgtcatatacctactattttgaatttgggtcggtgtggtagcctcttttggatccaacgttcatgtgcctgtgagtagttcctcgatcctcgatcctctctcgtctttcgccttcgtcttgaccgtttttccatcaagccaagtatctgacgagcctcctttcacttttcaatccatgtacctgttctagtacatgcgggacgatgatcatccagagaacggtcatctcgagatgttcttcggaatccttggcatggtcatatttgttttggccttgttcgcatgtcttatcatgtacttcaaacgacaagctagtcgttctcggagatttagaaatggttgaagagttttgtctgttgtgctttttatttgttttgattcgaatatgttttgttcaattcatcttcgatgaattttgtcgcttcttgtttcccctctttgctcctgctattgttatgtttctatattttccttatgtacgaaagagttggatgatgttaatcctgatacgattgtgatgaaaaagaagaagcagcatgatctcgttctttccataaactatagggcgagggtatcaagagcattgagatccaaaaagagaacatacgagaggaaaagagagaaagcaaggcctaacaggagtaggagacgcaagatgtagatataacaaaggagcagttaggctatcatgaaaattcgtgtctgtaaagaggatcctttaggcgtaaacagatgacttagtaagaggttaggaaggattttacagtggtgtcgatgaatcaacatgaggagcaaagtacagaagaagatgcgaaaataagtgatgtagacattgagcataagatgggcaagatgggaatttgttgtacaagagaaaggaggaataaggaaggggatcggtcattcaggcgggactgctcttcgtctgatcatactccctagtttactgaatcgtttctcgcctttagtgatcaatggagagtcctgaccagcccgtttagaatcgtttgccacaaagagagaagatgataccgttcgtgttctctcagatttgattcgagcagcgtcaaaggagctagttccctgaagtgagctctgggaaattgaaggggcgttcatagagctttgataagagtttggaggccgacctgctttaagaatcgcagtcttaagattcacagacgtcttccccggactaccttggaggaccgaggaagatataaggtcaggtgagtggctatctcgagatgatcttgcttgaaagagtttggattttatgattgttgagattggggaaggcgaatttccaggctgttctggacgggatgaagggatcgaggaaaaggttgaggaggaaagacgtccgagagaaagtcgtttaatctcttctgcaaagtttttgcggaagactatcgagaagcgcagagagttgtatcaactatccttgtcaatgcaagagatattcgtcagcacagagataggacgtacactgttccattgtgatgtggaacggggacatagaattagggcataataagccatgcagcacgaggcatctttcgataaccatagtctatacacgaacataagtcaggtttgttgttggatgttgcgcagaaagcgtaaaataggaaatccactcacatataaatctatcgaagttcggagctcttcaattgcttcgatctcttctggatgttgtgctgcataaacctccgaaaaaaaggcggctctccaagcgggaatacctccgttgattggctgcgtgcaaagaatgagccatattctctatcaacgaagagactgacggaagcattaagctatacataccgcatcaaccgcgccatttaaagccattgaaagcggacttgtattggtctcttccattgtttcgatcatagtcgtatatcgagcttccaattcctgataagatcaatccatgtggcaggtcaggtaagaggtcaatatgagagaaaacatagagcatttaaaaaactcacggttaactcctttgttttcccgtgtacgtcatctaaagcgttttgaattggcgatatttcaactctacgacattccttgacttctgatcgacgcaaaatagtgggaaaggactcctggagacac

SEQ ID NO: 2443 - DNA, 14275 bp, Xanthophyllomyces dendrorhous
cctcagtggtcaagtagactttttccaagtaaacttcagcaatattgatctcttcgtctactcttccatgtttattgaaagggcgagaatatgagaataccgagacattgctgatagagaaaagaaacattttaaaattcagatgaggacgtaatagaagagatgatatgtggggctgatttacttaaactcatggtaacttcgaatctctctaggaacgttttggttgaacaccgcaagagatcggtcgggctccggtgttacagcaacgatttgaattcggagctgttcactcgattctgttgatctgacgatggatttgattaaggttgccgaaggatgattgttttgaagtcggtcacaaaacgctccatacttctcccatgcaccacctcggaagataaattgacgatctcgaacggcgataggaaacggcccaaaatatgagaccaagaaatattgaggagatggcctttgtttagtcacgattgactccaccagttgagctcggtgagataaaagttcagcaagacgattgctataaaattgaggcgaatgttcaaagagggtatccttcagaaatgcaagctacctctttcaactcataggaaaagaatcttactagtcaaaagtgacgctactgtgttgcgactcaacctcttggcagatagaggcagctagttcataaaaacttcctctacctagattaagacgatgaatatctgtgtcagtcatgtacatgcatatacatcaaaaaaacgagaacgaacctaggtagtctataacttgcatgaggattgattccttacgacggaagtgagactgtctggggaactccatagaaccgtacgagaagggctcgacaaattcagataggttccattcatagagggaagcgtgaagtttcaatgtgagaccggcctctacaaaatcaccgtttctgacatgaacgtccacaagctgatggacatatgagatatctataatttgagtgaaacaatactgtatgagccatgcaatgaatatttctgaagctattaaaaactacttacacaaagcatccttgccgccgatgcgacggataaaattcaatagccgaagtgcacatacagtcctatcatcctcatactcctcacctttgggcaaatcccgaagacttaaaagcagacttaagaatcggtctactgagtctagaaagtctatagcttgagctcgaagttgaggatccactctggatgaagagaacatagctcgcaggttggatacgaaataggctcgagtaagatcatcccctccaccgccttgcatgaatatgatatcgagcttgtcgatcatctcggattcgacctagaggagaaaggatctcaagacttagcttcactatctgttaacctcttgagaaggaaagaacaaaggataggatagttgcgacataaagaaagatagcataataagtcggcacaccttactgatgctgccattggcagaccattccgagacaaacatggtctagataccatattccagacgaaaagatcaaacaactaacgtcagtaggtttgattatcacgaaatagatcccacaactcacataaaggatctctacagcgcgaattcgtgagctatcgtggtgcgagagacagagtgatagtatgtcggagacgaaagtgagaaaatgagcatgatggcggccagaccaagatgtaatacttccggactcgtttgtatgcccaagagactgccacatgcgatgtagaacaagagaactctcttctcgaagatcacctcccaacctccaaacagctcgacatttctgttttacaaagcgaaaagaaacacgcgcaacggaagattgagtgtttgagctcgagatatactggtgacgcgagaggagataaccatacttgaggcccaaacgattcaatcactagctgttttgaaccgactatcgcgaagatcgtcttgaacgctgccttccataattcaatcgccgagggagctagattggagtcttgtggaaggagtgatgccatgatagtggtgatttgatcggtaaacttaaggatcgagaggtgtgctaagattgcaatattgatccaattatcaggaaaagcgtcgtaggcaaggatagaggttgctatctgaaagaaggaaagagctgtatgatcaaaccgctcttgaccttggaattctagttggtcttccagaaagattcgtagaagtttaggggtctgaagcgagatcatctctaataagacaatagaaatctcgccgaggaggatgttgaaaccttgaagtacagtcgaggtatcattttctcgacgaggaagatagcctactaaagcaaatgggtatgatgatgggaagacgatagggaccagcgccagtaccgttgctagtggtcgatgtctatcgatggcttgaagggtctcgacgtcgcgcaactcatggtaagagtctagtattctacagaagaagagattatataagtgataatcaagttgtatcaatacttaatggttatactcgataaggtatgccatggaaagagagacgtactttggaagacaactgaacactaagtccacattctcctgctcctgaataagtgccttctgatcggcggtcgcaagagattctgatagccgatcaagcatcacagccaagatattgatggagattcttaggcactcaatccaagagatccgagcagtgtcttgagcggctgatatctctgcatctgaaggagtcgccaggaaccttcccagatgaggcttgatccaacaaatcagcgaagggatcagagcagcacgaacagttggatcttcaaatacaacgcttttgacagtttggaggtgaagaagaagcttccaaatagctcccttaccgctcagcctagcggcggaatcagagaattttacgatgatgtcggacagctcagaagcgttgaaggttttcgagagatcaggaataatatcggagaaatattgtactattgtgccacagaaaatgcccgaatctgattagcatcagaatcatcttcttcgccagttgagaaaaatcaggcttacgtgcgatggtctgtgtaccgatgatacttggctgatctatcttcatcaggtctgtgaagtctcgtagaagcactgcatatcattttgatatcaatttacacccgacacataaacatgatacacggtattacttgagaagaaattgaatcttacagtgcagcccatctttaaatgacatctctagatgttcaactaaccgctcggatgtccctcccatcatactcgcctcttggatcttctgcagttctcttgatctcgaaatgagacggaaaatgtaacgcctatatgaagaaaaaccccggaaaggttgtaattagaagcattgagagaagtgattttgacgacacacggagacacgaaccagactttgatagccgctctcaactgttggctcgtcttgagctttaaaagtcgactcatagcagaaatcagcttcttccatacgttcgcgcttgagaagtgtccatcgatgtagacgtccaacaccttctgaaaattactaaatctcctatcctgaacaattcctagtaccctaacaagcgcatcaaagaccagaccttcaacctcaggatcgtccgaggcatcgacaatgataccgaaaagagtgtcaagggtcgcggacaaaactttgcatatctctacttcagaaacgaaggtaagttgtttgagaaccgacgtaagctctgaaggatttgacatcaggtcgttcttcttccaatgaagaaatcgaactagcacctcggattgtgtaaaagtagttgagcagaggaaagaccggatggacagagaatctcggattggatgaaccgtacgtgatagtgtagatgagactttattaagctccagatgagttttggctgcgctagaaaatggaagggaaagataaagtttggggttgatatggttgagttcctctgtagttcggtagaggatcaagacatgatctccgtcgggtaagaacgagccgtcttcctccggtagcaatggtacaaatgcgaatgcaaaaggcttttcctgatcctctatcatgccgtcgattttttctgaattgctcgtcgttgttgaagtcgaggtggagaatagtcgctgtcgaaacgtaaagaacagatgacagtctctcatgctatctggaaggacatttgagatcttgactagttctccgaaggtgggagccgacgatttgttgaaaacaatagaagaatattctctgacggagtgttccctagaaccttgacttattgcgttgtcgacaatccgtccatctcgatcccgaacttctaggtcaacttggaaggcttggtgtgtagccaccgacgatccgccgaatccaattgaacttattccttttcgtatgcgtatgctgccccctcctcctgctcctgctcctgatcctgttggtacctgatggaaacttgccgaccagagtttgacgtagaagtcattgcgattctggtcaggaaaaactacatcagggaaaccgaggcgttgagtacatggcgtgtcctgtaagagagaggaattcgatctaagtatcctaggaaggtgtccgtggaagaatcgaatatcaattgctatatcatccgttctataaccatattgaaagcagaagcacgagtctcagcatatggtaaacatagaaagataatcccaaccaagaatattcccacctagaacttctctcaaacatgtccattcttccattgataatgtcttcgtgtatgcttgcaaagtctgcttctattgctggtttgaagattttcatcttgagctcaacagatttggtttctgagatttcacttgtattgacgagatgtcccagtttgactaccgcgcatccgaaaggccttctgaaaacacctgatgttcctcgagaagccctgtagaggttggcgcctggctgagaattgttgttttctaaggctgatgtagaactggaggcgtgctgattgaggaggaggctagtgtgtgaaaggttcgaagaccgatgatccgaatctgcagttaaggcggatgttattccggtttggtttgaatcgtaaatcgttgattgtgtgctgggaattattgacatcttcattcctccgcgccttatgatcttacatactagcatgatgtcctcaacatcttggactccgagatcttgaaagagtgtccgaaccggtacaagaggattgctgacagggttaccttgatgatctaggataacaagaaactcttcagtgatgaattgtttaagtgcatccgagtagagtgagaaaaacagctcggccgtttctcctgggatgcatagatttgctacaaaagcccgtaactctagaaataagtgaaagtaatcaacagagggaggtgagtcggagctgagtagagatggtgctacgcggctgtcactagtggttgttcgccaacgcaaagagggttctgggcccgaatcgagacgatttcgagagaatatggaagaagggaccacagatagggattttttcctgttaagagaaggtagaggagccgacgaggatttatcacgagaagagctcattgggatatcgagcgcagtagatttggttgcagaagtgatatacgcagaggcctaaatccgtcgaaggcggtcagtagtttagtatttagttgttcctaaacttttctattgagaaaaaacagaccacagtaaagacttaccacctgcatggtgaacattcgagttccactgactagctcggtgtcatttcccttcgactccagtttatctgtacttcctactaccaggcctcctttggaagggtgcctgacgatgacttccaagccctggatgacatttcctctaaccaacctagcaacacaatctcttcttaggctatcaagctcttccatatctaaatttgagtcaatcaactgtcgtcgagcgatgtggagagcgcttatatgcgcgcggactgtatgaaagagcgcgtaattttgttctagtaggtagacaaagaggcgctgccaagtgaaatatgaaggtgagaggaatataaaagcaagttactgaactggacagacaaataaattacgcttacaaaatgccactctctgagcgcgcacgcaatctcatcaacaagcggctctgttgtccccttggctgtctcatctccggccttcagacttggtattggaggagcaagctttggagtccttttttgaagatcgccgtttgaacttctaagattttctccctctcgccctcgtcctccctcaatctcctcttcctcttcctccgcaagcgcctccattgaagctttccctctttttctatctatcgactttgcatgttctgagcaggcggacgtaagtttcttctcggcatcctctagctcttctctgatatgaacgaagctggctggaaatattccaagtgtcacacttggttccggtagaggaatttctttggcgaaaggcgatgggaacactgcagaggtctcggccttattttgttgttgctgttgttggtttgccaggatgtgaacgggtacctgggagctcgatactatatatcctctgtaccacatgtcttgcgcgaccccttgattgggtatatatcgctcaaaggcgtaaatttcgtctccaacctcgaggtcggccatgcaggaatttgagtagaaggtatcattcagattcgttgaacgtgtactggttttagataatactgtggaaggatgaaaggggtgcttttgagggtagacaagtcggtagtagaagggtagggcatacagggattgtttagccctctgtggcatgatctaatcaaagaggataaactcacgatagcaaacccaaatgcaatcttgcaagacgatgagagtctcgcagtatggtcagaacatgatattcataaacattgatcagcacctatagacagaaacatacctttggtagaggttcccatccctctacctgtctaagttccggtctgattcgtgttatgtcgttagtatagacaagggtaaaacctgataccgacgtaatcagggcgaacgcctcacctttgatttatagaagacatcttgacagaaacctcctcctcagatatgaacactagatagcttctaagatacagccagacagcgatagagtttgacgaaaaatcgaagagaaagatggaccagactggatgatagcagtatcgattacaggtgtgtattcgaggacgcatgactgaatgtaaggagtcgaaacataggggcagccgccacacacgtgatataatatagccgaatgttcagtacagcttctcacaacatccgccaaatctttgcccagaaaagaattttataactttcttgtccctctctaggccttccttccgacacacaaaaccactatcatacctctttctcttgttcaccatctcttgatttgcatagagagaacaagaaatgtcttcccttatctctgctcttgcttgggtgcctcaaggaaagtctgctagattcccgtccaagtacagcttggattctaaggagcttgagagagtctctgccctggctcgagttgagcttgacgacgcgaaacatgcattgatggaggccgagggtgtcgccaagggtgccaaaggagtcaagatggctgaggatggtgatatggtcgatgaaggctgggagacgtgagtcgacgacttttctctttgctatcggttgatgtgcatgtataggaccttgcgtttgaataaagaattgcacaggatcatatcgaaacatctagctggagtggaataaaccaaaactcatgatctctatctctatgcgaattttatcaacagggattctgacgaggagaaggacagtgcagatgactctatggccgtcgacgacgaggagaatgccaaaccggctgatcccaatgatctctctgccttcaacctggatacctacgatgatgagccgagcgccgaggctagtacgtatctgctgacacactgtcgctactaaaatcaatagtttaatcatgcttcgattgctaccatccaggtgtgttcagcaacatcaaaggattgacttattaccgaaacgcggaagatgatccatatgtaaccctgaaagaggtcagccatagctccgcgtttgccacctgctgctctctatattttacttaaaccagaacttgggctcactttgctctcgatatctcactgcttcaatccaggacgatgatgagaatgagagagaggagcttgaggttcttcctacggacaacttgctgatcaccgccaaaacagaagacgatatttcccaattggagattcattgctatgatgaatctgaagagaatctctgggttcaccacgacctaatgcttcctgctttgcctctttgtcttgagtggctcgactacccacctcacccttcggctgatcaaaacgatgcttctgccggtccatcaaagactcatgggtcgtatattgctgttggaacgtttgagcccgagattgaaatctggtcgcttgacacggtcgatggactctaccctgacgggcttttgggtcgaccggacaagtcggcttcgcacgtgccggtcgcgatgggaactggaaagaagaaaaagcgagtgcagaagccgagagaggtctcttcagattatcacgttggagctgtattgggtctttcatggaacaagaaccataggtctttgttagcatccgcatcagaggatacgaccgtcaaattatgggatctctcaagggagagcacccacgcggccgtcagaagtttcaacgttcactcggacaaggttcaggccgttcagtggaactcgttcgagccgacatcgttacttaccggtagttacgatcgaacggtcaggacgtgggataccagaacaccggacgctggtgtaggcgctgtattgggaagcgacgtggaggctgtcaggtgggatccgtttgatactcacggattttatgtgcgtccccctctattttggctcttgtggcaagaaacactttacccagtctttgaatcctcacctacatttgctttttgcatcatatgctacgtttcctatctacctaggtttcgcttgagtccggtcttgttctctactttgataatcgaactcttccatccttctccgcgctttcagacccgttgaacgcgtcggccgccaagtataccatctctgctcatcagggtgctgcctcttcgcttgacgtttcaccacacgttcgaggctgccttgtcactggaggaacggataagacggtcaaggtgtggaacatcaacgaagaaggcaagggtggcaggagagatgttagcatggtcactagtcgagaccttggagtggtgcgttacttcttatgcttcttcaactgaactcaaggctctctcggctaatatttctcttcgtgttgttattcattgaatctttcgtagggcaaagtattctctgttgccttctcgcctgacacgccgctaactgtcgctgctgctggatctgccgccaagcttcagatttgggatctttcagcaaactctggagtgcgtaaagcgtttggccagcggctcagacaggctggacgggaactcaaagaggagaaaaagtccgacagcggtgggctgatcggagtgatcagcgatgacgaggatgatggggatgaggatatggagtaagagatgtcgggatgataatatctgaatgaatttgccaatagaacgtaaggcccagtgtttcctatcacaagtaaaagacaagagaacgaaaatattgtagaagccctgattaggcaactaatgggacactgttgggtgaaacatgggctttttgggggacaaatgggttggtcttggtggttcatgactcaaccgcagtcgatcgaaggaacaaaggtgagattttccaaaaacggtcaaactatgcgtagagatactcttcgagccgtacacaataaataaagggagactcctcttgacgcgttcttgtttcttctttcaacactcaccttcttttcttttttctttcccttcactcacctctttcaagctttcttccctccttcccctccctatccctcttgagctggtctcttcctcgtctccttccctcttccacagctttctctctttccttttagcgcaacccctctcttgatcactcccgaaactctcaccttcccgccaatttgatcctctccctcctctttcgactcgtcaggaacgcgactcttttcccttcacaacgcgctcttctgcaacgcttgcacctagcttcatagccactctttacgcacacaaccacgtataaacctttccgtcccatcctccacggtttttcgctactcttccaaccttccctcgccttttcttctagccctatccctcgtcctcaaaatggcttccaccaacgctcgatatgcttcgtctcttcttcccagaagtatgcacgatcctgaacttcttgatatgctcaaacagggagtgaccaaggaacaaatccgtatgtgcctctagaatgtcttgttttgactagcgcttgtcgtggttcgcgttcctgaaattcatcacgcgtacttggacttttcactcaaccataggacaccttgccgctaaagcaatttcggtgattgtagtagatcagccttcgactgctcttcctacgcctcctacgtctccctctagggacggttatgattccaccgaagaggagctcgctcaagatatctcgactccctcccttccgtcactgcagacgttcattcggctgttggtcgaacagtccaacgtccagccatcgactctgctagttacacttgtttatctcgagcgactcaagtcgaagcttcctcgggtagccaaaggtatgtttacttacctctcaggaacgctctgacgactgtgacagccgttccatatgctgatctgtccatcatctttcatgtaggcatgcactgcacccgccaccgagttttcctcgctgctcttatttgtgctgccaagtatctcaatgattcttcgccaaagaacaagcactgggtaagttgacctttgctctgtacctgaaacaagactttcttacatcttattgacctggttgtatctttatcttgcctcagtgccgatatgccgctctgttctccctgcccgaagtgacattgatggagaaacaactcctttacttgcttgattagtgagtcccactctactgtccacgttttgaatagcggctcatccgatgttgtttttccggctctcgccatcttgtcagtgatctccgagtgactgaggaagagctcttgattcactatgcacccttcatcaagagtaatcgagaaaagagggctagcaagctggccgcagttgtagagaatgatgtcgctcgaagatccggatcttcgtcggccgtatctcctacaaacgtgttgcccgcgcgacaggccactaaaaggtgaatctttattcgtgttttgtcaaccatcgtggatctatactcatcttgtctgtctttttttttcaccgcagaccttccaccttgcttcagccgcctgtgcttactcggtgtgaaacccaagtgcccgccatcccgtcgcctcctgagtctttgtccgattcttctcttcggacattgactcaatcgctttcgacgacgcatatctcggcacctcgtcccatgcgcctcacgatccctgcctcccgatcgtatcacccctcatcagcgtcgtcgagttcttccgcaagcgacacgagctcacctggttcccccggagcatcaccttcaagagttccccggctggttcaccgaggatcgacatcctcgctttcgtccagctcatcatcatctgattccgattctgattatcatcaccatcgtcatcaccgaagaggagaggctgtttctcagccgaaggagttgcatgcgcctaccaaggaggctcaaccccaaaagggttcgcagaggatgtccaagatgccttctatccctagcttaaggccgaggggatcgtttgccaacttggttgctagcgccggtggttggggtcggttcatgggtgtaggcggaggctccaaaggaaaggagaccgttcgggtggccggattggacgagagagagatcgggtattgaactggatcactctgattctatctgacgtctttcctcattttctttcttctcccttttgcatctatccctactgcgtgcgttcatttaatccccccgtatggctattcttccttgggttcctgtatcttgcccagtgcattgttgtgtttctagttccttagcaccgtctttctttacttagttgacagtctatcctggccgccggtcggccaccctctctcctctttgtgtcttgtctaaaccttcccccccttattcattacctgcatatgtctcgtctgtttcctgtatttcgattcggcatactatttgtgatgttgatcaatgaacttgaacactatagatttgtcaaggactataaaaacatatgaatcataaccctaacgttatcgagcattgtctaggtaaaacccgtcaacgctgctttgattttcttttgtcccttccggatcttccttttgagcgctaagcgatgatagacaggaaccagataaaatactgactgactcgtttctgtgatgaatcccatttgtgccctgattcttctagacaccttttctctttcttccttctttcctttccttcgttgacctttttttctcttcttggctgatatcccgtctttgtgaagagctaacgacttgtacatcacacttttcgttcgacctgaaagtacacgggaccttccccatcagtctctcctctcgtttctcccttttctctttaatccttacctgtatcagtctacatcatgggatgtgccgcttctaccgaagattctgctgccaaagcccgtacgtctagacgtcaaccctgtactcgtacccactatatctctgatgtaccacgacccgactgatattcttcaaccggtcaccgccgggttatctacaacacaggcaatgaagcgatcgagaaccagatcaagaaagatcgtcagaatctccagaatgagatcaaggttcgttcgactctcgcaccattttagttcgatccaagaggactacatgcgctgatacctgtgagcgtgctctatctctattaacaaatagatgcttcttttgggagctggggagagtggaaagtctacggtgctcaaacagatgaagctaattcatcaggggtttgtttacacttatccctttgggcactccacctcgtgcatcggttggttcctgacagctcttgtttgccatcgggtctactacatcaggtcgtacaagagtgaagagcgagaggcttacaaagagattgtctttagcagtaagtgctgtcttgttccaagtttttctgggctcttaaaatgagatgttaccaacacaaatctaactgtatgtcgtctatatatatcagatacctgtcaatcgatgaagtgagatcgtgcaggagttcgcatgtccgttcctttgtatcataaacactgacgatttccttttgtcttgacccctcaagggtcttggtcgaggcattgacatcgatgcacatcccactgggcaacccggctaatcagcgacactgtcaaaccattatatccgccccccatcagatcgagggagatacaatgcccggtcagatctctgaggccgtcagatgtctctgggcagacgccggtataagagctgtctttagaagaaagaacgagatacagctcaacgactctgcgcaatagttagtatcatcagtggtctgccctgcttatgtattttggttagctgatcggttggtccttcttttacagctactttgatcatatagacgaggtcgggagcggaaggtacctcccatcggaccaagacgtgctgcgatcgcgcgtcagatcaacaggaatcacagaaaccacgttccgtataggagacatgacgtatagacttttcgatgtacgtcgtttgcttcacattataccatagtcagattaccagactgaccaaagatcatctgtccctataggtcggaggtcaacgctcggaacgaaagaaatggttggtagtgcccgatgttttgtctatcgaccttcgggaggaagggggagactgaaacatactttgaggcgattacacaggattcactgtttcgaaaatgtcacagcgatcggtaagtcggctcgtctctatatattg

SEQ ID NO: 2444 - DNA, 9347 bp, Xanthophyllomyces dendrorhous
tctctatatattgtttaatgtactactccgcttcagcacattgctaattttgtcgatctacatgtactcttcagtcttcctcgtggcgatatctgaatacgatcaaaagctctacgaggatgagagtgttgttggtacctctctaacctgatcgtgaaaggatctgcgtaaacatactgatatccttctctttctcttgcgcactgccagaaccgaatgcaagaagctcttaccctgttcgagtccatttgtaactccagatggttcgtccggacatctatcgtatgtctcgtcttttgtttcaattcacagatagccacactttcgatgtttctgacacgttgattcaacagatcctctttcttaataaaattgtgagtcggttgttgttgtcataatcaattaaaaaggaagagaatagaatacccatcatgttgattgatactgcggctggaacgcaggacctcttcgccgagaaactgccgttctcaccgttaggagactactttgaagactagtgtgtatagatatcagcatctgattggttagcttgccgatgtccataatgttgatctgtgtttggtttgtttgtcttgcctgtctcttcttggacttgtagtaaaggaggagatgactacgacaaagcatgcgaatacatcctggacaggtttgtttccctaaatgcatcgccagacaagtcgatttactgtcattacacttccgcaggtatgtcaaacgttgaatagacttaaagcatgaaggatgcgtgctcaaggcatatcgacatcttatgtagtcgacacgaaccagatcaagtttgtattatcagcaatcaacgatatcctgattcaaggtcagtttaattctgtctaattaaatctgtcctatgcgcctagactgatgcttcttgtttcaaatctggggttactcaatcttggtcttctcgatctgtctgcagtcaagtaagttcccaaccacacaggtattgttcctatcctcaatatgatgctgagccctctgattcatttgtgacttgtctagtctccgagattgtggtctcttatgaaagacaaattgaactatacatctcagcactttccaacggttttcgcttcctctccaacaggtttcttcatctatatcttataacctgtcgacaacatggttctgttttcccttctttattctatatcttcttgtttcaccttgcctttcgacatttaaattgattctccaccacatacacttcatgaccccatctcatatataccaatgcattatactttatgattttcgacttattttatgagtcgatggggtttcctcctcttcaacgaaacctataacaacagacctgcgtttgtttaagcgagatggatttgatggcttcaatttttttaatctgtcggacgcgatggaaccgaaagattgagaaggaatttcgcgcatcaaagtttcaattcttggttcgctagtcgtcccgttccatctcgtactacccatcagcatgtcggccatcacagctcttacccatcagatcccttggtttcttcgagatccggctatcgcaatcattggagaggtacagtcattgtttctcgttgcatacgtcctatccttgccttcttccttgggatcagtaacttgccagcgaaagaacaagctaacggacatgatcactttcacctggttgatttcaatgccatgaaaaccgcaactgaacaattggaatgtctatactcttcactcagaaatgctacacgacattgatctatgattttgatatattagatgggccatgtttgacatacgcaatctctaaaggacttgggtttgggatagtcattggtggatcgattgtcaagatcccacaagtacgtccagatcatctctcactttggttccttcttgattctgtcattagatgcgattgccgtcccaagtttgtttgtagatacttatcctgacctttcatttctactggacattatcctctcttcttaaaagatcttcaaagtttctgcaagccactcagctatcggactgtctctacctgcatatgtacttgagactctctcctacgcgatctctctcgcctacgcgtatcgatccgaattcccattctcaacttatggcgaaaacttgttcatgaccattcaaaacatcgtgatctgcctccaaatcgttcattacggatccgggtcgagagcgctcactgggatgggaggcagtttcggaaagagatcgagtagagaacaaggaagagccaaacaactaattggctggatcattggtatggcgatcgtaggcgggagcttgttcagtcaaacgatcattcctttcccagcctgtcagtttcttcctctccttactcacacctgcgttttcttctctttcctctgtgtcgcctctgggagcaaggttcttcgaaactgattctcttgtgagatctgctgtcgcttctcttgaatgatattcgtcctaccggtttggctatgaaacagtaaagcttttacaggtagctaccgtgcctatcggtcttgcttccaaggccccgcagatcatttccaactaccgacttaaatcgactggaaacctatccgccttcgctgtattcaacggttcgtccatctttctaacaatccttgctggttaaacgaaaccagaagatacagtattttctcttccttccgtgttccgtgctgacttactcttctttgttcatctcaacatcgcgtgctcttgactgcgtttctagccctcctcggatgccttgctcgagttttcactacattgacagagatcaatgacccactcgttgctttctcgttccttctctctgctcttctcaactcgatcatcgccttccagatgatcctttactggtctcagcctccgtcctatccgacgacatcctctcaatcaaacacccctagaggaagtctgtccggtccttcctcaggccgatacggatcaaaaggaggatggggcgagaagactggaacagaatgggaggcagaggagagtggagtgggaatggatggtcaggcggcgcctacgtcccctatgaagggtccgaaagaatggtcccgaaagatcgattgatgtgttcgtactggacgtcgatagaattatcttgagatttcttttccctcttctttcgtatggtaccgtcctctacttccttgctcactgccatctgctttatttgctgttgttgttgttgttgttgttgttcttcttcttcttggtacccccttaccttttgtgtttgttcgtcgatctagtccttgcaaggttgatcacgatacagaataatttcaacttgggtttgtgatttcatgataaagaaagaacgaaaacaaataaaaaccggtcgaaaaagaccgaaagtagcactggggcaagaggtgacgaggagggtaagagaaacaagaaggaagcgcgaggtgttgagtgtgggtgacaccacgagatggaaaggatgagaaacgagccgagccgagccgagccgaaccaaacaaattcaaattcagaacaaagtaaagcagagggacctgatcaggttaaaggattcgaggaaacagacgggttgaaagaaaccagatggacgttaatgggaaagagaggagatagaagaaaggaacggtataagaaagaggaagaaaaaagatatcagagggaagacataaccacccaaacaaaccttggcgataattaccaaatttgatagagtgttgcacaattagtggtcgggattgagattgatacgaaggcgagaacaagagcaggctcaatatacggaaacgaagatggcgaaacgttaacaagaataaaagaaataagaatgaaatgaaaccaagatgtgtgcgaaggaacaaggttgtgtgagagcgaaaagattggggagtccaatcgaatggtcctgatcatatcgatatgcgcacccacacatatccgaaagatcaaactccaacccatccaacgttcaggtcgtaccgcgcgctctccttctcgttcccagacttgacaccctcgagctgattcatcgaccgtgctacccattctctaatgagtgatctaccaaagacaactaaatgaggaagcatcccacctggccctgggacgtcgacccctttgggtagcccaggagttcctggaggaggagagaatatcccgatgggccaaccccagccaagttccggttgagccgggtcggtaattcgttcagaaagagaagaaccagcgccgagaagctctgtcgatccatcctcttccgcttcgtcctcggtgtcgtctccttcgtccgaagagtttgtcacaaaggacgacgagaaggaagaagaagaggacgaagacgtcagatcgtccatagactcgttcaccggtagatcggtctttatcctcttcgcccatcgccgtctgtttccgccacctgtggatcttctggcaatctcccaagtgcgcgggaatcgtttctcgatcacgccaaacgtcagattgacctgataggtcgcataaagcctcatccctctcgacaagccagctgtgagtccgaggacttgaggaagataatccaaaggcaaacccaagtctccgccgtttccgctgttggaagcggcgccgccagcgccacccatgaacgctgccggggaaggagatgaagtcgagctggtgagtgagctaggtgaatctgcagagatatgtgaatacgttgaagtcgagagtttggatgaggaaggatgaggcattggggttgatcgagcagaggtactactggagtacaaccgctgcgttcggctgtgaaggattgtctgctcgtaagtcgtgatatgcaacaagaccagagcatcgatcaagtagctagaagacgagtcacgattaggaagagaagggtgagtactcgcttatatctagttgaagcaatcaaaacaagaggatggaaactgcgtacacgagtcctagcattcctttcgctgcctcttcccttgcacgtttccccttggagctgcctacggaagcccctttgacgactccctcccaaccgcctcggacgactttcttcatcccatctaaactcttccagacttcgaggttgactcgaccgggagttacctggtcatccgcccagaaggcgtacacccagagcaggatcgagtccgtcagctctatgagcgtctggatcgaagtgaatgtagggagtgacgttggcggataaagtctggatcgggcgtccgctttatgtttcagtgatcgtgcaagacctcgatatctgttgggtcacaccgaaccaacattgaaggaacaggtgtcagcttggcacatccgcagtgacacaacaggataaacgaccgggaacaaggttggagaagagaacgttggacgaacgtgtgagctagctctttgtacctgtccgagtcccatcgcttgacttcttctaatcgtttcctcaacctggaaagcctatcggctctttcgtcagcctccttttgcctgaccagccgttttcgttttctgcgttcacctttcttggcggcttcctcgctattttcaatctctgacggaggagagggaatcgcttgcctagttcgagagcccttagacgctgaagaggagcccgagggatatgaagagttggaaagagagagagccgatgggtcttcaagggaaggtgagggtgagcgggacggaggaggcgagagaggtaatgtgggcgacaaagctcgaggaaatgagctcaggatctatcatcggcggagtccgaagacgattcgtggtcagcttatagtcaactgaaacagagaggaagggttttcttgggtttcggatggatagcctgaataaaaagggggcgaaagaaaacaaggaaaaattggatgtagacagagtgttctcttgtcgaagaggagggaactacatcgagtagtagattggacatccgagtgcctaatagtaatccgcaggcaacgtaaccctccaaacagagcttggtccccaacgggtgacaacccggacggactgctctgtgcagaatttcgtcgtttgccatgctccaactgaaagacatgtcggtcgagccggatgaccaggacgaatggttgatggggaccgggagatcaaagaaccaagcagaaagaacgaaccttgacttttcgtctggccagctccaagtcgaacaattcggaagacctgtgttttgcgaccggttcgatgtacatatgaaccaaatagcaggcgagagccgaaggacacgaggagacaccaaagagaaagaaagcaagagagcaaaagaacaagacagatgaagaagacgaaagaaagatatataaaaaaaagtgatgagcctttgggaacgtatgaatcatgcaccctcgggacggccggcaagacacgacccaagcaaaagaattttcccggcctccttcttgaattcttctgaggattggctttgtggtgatcaaaagatcgagctgcgttccaatcggacaaccgagagagaaaaggaagacagaacgtacatggcagaaggaggaacactcgatcctcgcttgagaagagcagagtcctggatgtgatcgatccggtggatggccgagagggtggactgtggaacgccgtctgtcgaagtcgctcgctgatgggtcggcggggagacttgaggggacgacgaggaagatgaggaagacgacgaggacggtgatttcttggggaacgttctgaagattgccatctcttctcttctttctttcttccttcctttggagagaacacggacgaacagatccacgatgggggtcgatgtatgctgaccttgggcgttgttctttgtcttccgagtcggagctcttcagtttaattcgccaacgctgagccatcacacgcgggtaaccactagtgcgggttagtaaccgaaccaggctgtgtaaaacacgtgacttttgaatgttgtgcacacacattttgattttttctcattctcctctagacccagtgaatttttcgtgttctgtccaggtcaaccatcttcccgattaatcttgatggccaaacgaaagagaacagacaaacttgtctcggagatggatccttctgatgctgttgaagatcccgaatttgaggacgacgaggccggtccgttagaagcagtcgctcccgatggatcgatcatcaaacttcctcaggtcggtccgtcccctccctttttttttcttctttttttcattcgactctttttccgtctcttttcttctttctttctcaactgccaaattgtctctccttttcatcttctacagaaaaaattctaccgtcagcgtgcccatgctaatccgttagcagaccatgcgttggaatagttagtcgcttttgtgttcttctcactcctccgaggcgaccaatgtctgactactcgcttttccctctctgcagcccctcgtgcccatcagcaatggactggtcaaaacactaccctgcgtatttccccatggcctctccttcggctgatgcctcctccggctctgttgtgacctcctcagacaagaaagtcgagtttgcagacatcggctgtgggttcggtggcctgttgatgtcgctctcaccaatctttcctgagaagctaatgctaggttcgagagttcctctagctttgttcattccaaaccgtttgggatcagtcatgttaacctctctttactacctctgactcttctcttcaggcatggagattcgagtccaagtcacaaactacgttcacgacaagatccaggctcagcgactgatccatcccggaaagtaccaaaacgtgtcggtcatccgaggaaatgccatgaagttctcgacaaactttttcgaaaaagctcagctctcaaaaatgtttttcctcttcccggatccgcatttcaagacaaggaagcacaagcagcgaatcatctcgactacccttctagcagagtacgcctacgtgcttcgtccaggcggactgatgtattgcgtgactgacgttcatggtgagtgctttccttccgagcgtttacgtgtacgcgagtaatcgagaatcccaagggacagccaatagagggacgacatacatgatgagatcatacaaaaatcgattagtctttaagacatattttccatggttacaactgcaccaattttatctctgaactcgatcttccctccattggctttccctttgcggtctcaactcgatctttctccgcccgttttgctcatcgttcttgaactgatgtctatctctctttggaacccgatcacccggtacagacctccatctttggatgacccaccacttggagcagctcccacagcttttcgctcgactggatccagagtcgaccgagttcaaggaagatccgtgcatcaagtgtgtgctccagagcacggaagaaggcaagaaggtcgagcgcaataagggcgacaagttcattaacgtttggagaaggctcgacgacccgcccagagactaatcagagactttcttaaccggctgttgtctataattgtgagtgaatattcagtcgagcaccttcactcgtcaacgagctatgcacgactagtgggacgaaaggaactcctcgaatgagaagagaacaaggaaaacatatgatgagatcttataaaaatcgattagtctttaagacatatttcccatggttacacacatcccattttacctctgatccaaaccgtctcgctattatcgttttgaaagaagatcctttccgttcccactggtctctcgttctcgctccttctttttcaacgagtcattgtctttgttttgttcgaagatcagcactgacgtatttggttattcaactatttgtctgcttatgtgatccgtcatagattacccgaagtgcatttctctagaagccgcgcctcaacactcggtctccttttcttttctttccttcccttctctccgttgtgtttgtacttttagtttcgggctttctgacaacgaaggaaacccccctctctgctggacgtcgctggccattgtagacagatgtatatgaatatgatcaagcagaaaatataacccagctctgcctgcggatgacgatcggctcttgtctggggtcttggtttcattgatgatagatggcttgttcacgatcttcgccggcttgttgactgaacattctaggccccagatgatcggcgcgctgagccctgggtcgtattcgacgcgcgcagtctaattcgagggtccacgtgagtggtcaagcagaggaaccaaatcgacctatataccatgttcttgttgcttcctcttcttacatgaccttctttcttcgaacgaatcccagtcttctttc

SEQ ID NO: 2445 - DNA, 4113 bp, Xanthophyllomyces dendrorhous
ctttcccatccttctctttcccatcctcgcccattccccaatcgtcaaatcctcctcgacaactttgtttgacacaaaggaaactgcgagatttgaatcctcaagagctggctctcttatctacgacttttatctccttcctccatccgatttaaacaacataggcgacgacctcctcgacgacgacgacgacgacgacaataacaaaaccagcaacaacagcagcaactatcgacagccgacatgttttccataagccccttctccacctatgttcagaataccagacggccttctaccgttcaagtagttccctcaagttcatttttccgaagtaaccgagcccggcaccgtgcgacgcgtctgtttttcgcccttggatctctcctcatggttatctggtggattttgaacccgataacgttgttgaccaacctgtcgtcggtaaattctcgaactggaactggttccaaacaaatgagactgaggggtgggctggaggattcgaattggatggaaaaataccgattaagagcagatactattcacggagattcgactgggtatcccgtgagcagggtggcggaaagacatcaggccatgacttccccgcttaaccatggtgcgtctttgagttgtccctttatacctttctacggattcatgttcaaacagctaacggacgatgttgtttatgaacgtgaaaatacattcctacagttcacacgtacgcagcccgactcacgtctgtcgcgacgaatgcgccggtcattccgttgacctccggacaagagcttgctggtctttttcatttcttggtttcgacttcctacggctctcttcctgcgttggctctttcttcaaagtacgttcccgcaactatgccgcttgctgccgaatggatcctcgatttcaaccctggacaacacgcaggaccagatagggatcaagctcttgctttgtttgagaaggaagtttgggagggagaagcaaagctagtcttacttggcagaagaaagttcggtggaccgtggttgaacgaggttgaaaagatcttgatagatgatctcaaagtcttgccaggagagatcctgacgatcgatctggacagtcgaggtttgtcttctctctgtgctctcgttgttgcgacaaaagaaattgacacccaattcgatatcgtctttcccaactaccagtcgatgccgaagtccttgaaccagttttcactcggctcatcggcgagatgagcttcccttcgatccttcttgggggcacgccaattggcgggttcgaagatgtcaagtcacttcatcgaaacggaaagctcaggcagatgcttgaccgagcgggtgtcagggtagagaaaccggcaaagattgtgggaagaataaatggaaaacggaggagataaggtagtacgatgaattcctctcgctttcaggatgatagaaccacttctcttatcctctatatttccctactatagagtttctgtcttcattctcttcttcttgtcttggcctccatctttatcttttgatctctttccaatctgttttatgcctttgcctatctttctcatccattggtggaattatgtcccgatgtctagtacacatcgtcgttgcaacccctcacaaagttctcgtcctcatctacattggatcttttttttttaccataatccagagagggaaatcccttattgcgctggcttgctcgatgacccctatctcttatatagtcataactttcctttttccatgcgttcttacgaaccgattagtcttcggttgagacaggggaagcataaaactcactcagagcacaggctatagtctagacgaggatgaatacagacagaagagcgaagaagtcttgttcttctaccgaatgcatgcgccaaacaaccttgctttgaccaccctgactgactcgatcccgaaacatttgtatcggcatctctgaataggcttggttttgtgcctatcatcgttgttcttccaacaagtatgttagcactattgtgaatactgctatcttcattctcaatgatatgattcaaataaagctacagccaacatatcacagacccgagtttgtccggcagaagagatatcggcatcaaccgggggcacgcacagctttctcacgtggatctcgtcgccgtccgaatttagtattctgctggccttggcacgcttggcaccgctcggccggtggacgaaggccgatattattgctgtttttgatctctcaacgagatttcgcttcttctaggattttatctagctctcttgccaatgtctcacctcgctcaccgtggccccacagaggaacgattcttggatcaagaaacaagacacttgcgcgaagttttgcggagagtcaaatgcagcattcgtcgagattatgtcgtgtctctatgttctcttcttcaatcttcatccgtcaattgaccatcccgacaaccgtcacctttcttcaatcttaatctcaaacccaacacccttcgggtcgatagcttcagaacaatccaatgtccggctctcaaaccggtatagtctcttcttcggacgaggcacctcctcaatacatcgaccgaccgttgcctgccggttggatatacaagtgcgacccaatgtacgttgcagacttactcttcacctatgaggggactgaacccactccatttgccagtcatctcacacccgtcctttgtgctcccctctagtcatggcactcgcttctatgccgacactacctcggtcccacaccggtcgacctatgttcatccgctcgatgatcctatatacatcgcgtccttgaccaacacaccgacgattccggatgtcaatgcagccggtagggctcgtagtcgacctagctcggatccggcagttccgagaaaagcagtcatcgctaaaaccagtgactctttatcgaggacaggaaaccagctttctcaaactagatttagacctgcttctaaaacaacgtctgaatttgtcaacgagaacaagccgaagaagggactcagcgagaaaataatggatggactaactggaatgagtagggagcagagaagacagcttgaaatgaagaaagaagaccttgaatttgtaaggatgacatcttctctcgagcaatagtcaaacatgtcaatgaaacctgacatttgcggttgttcttctccttctacagagaaagagagtagcacagcagcgccaagatgactttataaagcagaagaaagtcgagcgaaaagatcgagagagggctcaacgaatgatggataacctctattatcacagtaagctctccttcgagttttgtgccgcaccttttctttcctcccgccactgctgaaccaagcatctgattatcggattcgtttcataatctttgaaagacaatctctgtagacatccacactcaaagcaagctgctttcaatgctatgcaagccgcaaactttgctgctatggtgtcagctaacaacacgggatctgcaagttgtgcgttcgaacacctcattccctcgatttttcttctgatttggccaggtctaacatgtaatgttttttgtatggcgagttcgtaggtacctgtcctgctcatggtagagatagccattgatcgagtatgaagccgcacaagttctgtttctacattgtttttcttgctctaccttcctctgttctctgctcccaatccttagttatgtcaaatacacccactggtctcatacaacatataactgatctcaaactgcatacctaccagtccatcatcatgtatatgaattcaaacaaaatgtagaacggtgagacagatagaagtgttgaaaatgataagcgatgccgaggagttaagacgacaaagagacaagaccctcgattcggacaactcaagtctgtcttgcctctgctgacttcttgggttgagagacggaacgagccagcaccatatctgcaccagtggcaatgccgattgaaagtaaacactcaatgtcatagattagatgctggcaacaatcagatgtcagggatgtgacctgagtgttacacctcagtaaccttcttttggttctgttgtttctcctgcctcggta

SEQ ID NO: 2446 - DNA, 1615 bp, Xanthophyllomyces dendrorhous
tctgaacccggaccctgacatcagaggcatagcctgctcacgtggataatttgtccttcattcggcctaagtctgtcctagcccggttcggcacggttcggcacggccctgcactgccaagaagataattgataccacgttttgctaaatgaccatattgagcattcaacatcttgaactatattccgagttcctttgccgacgttccgtcatacacacgatggccccacagagagataaagagagagagataaagagaaagcaacatcggctgaagggaacgagacagttgccgaacgaccatgaagaagtgtatataggaagcgccggaatcaggtcgtccatgttcacttctctctttctcatcccctctccatcactgttcgatttcaattcacttcctcaataacttccattcatccaatgtcccattcacaaggcgatatcgttgtctatccggatgaagcacctcctctctatgatgatcggccattgcctaccggttggatatacgagtatgatacaacgtatgttcaaagcgctctctcacctcctctcctctagtaccaacatctcttaacacatgtgtcgacaaaccgttctgttctgccggtcctagttacagagctcatttctacgtcgacattgtagccgaaccaccccggtcatcttgggttcatccgcttgacgatcctatatacatcgcatctatacccgacacatccccaagcttcaatatcgaatttcgagtacagtctaatccgtatactgtcggtccgagtcctgttagcccaagcagctctccgtcaaggacagataaccagcctcttgaatcaacgtccacatccacatccgcatccacgtccatgtctacgtccacatctggcaccaagactgagcgcaagaggggactcggcgagtggatcatggatgggctgactcaaacaagtagggaggagagaagagaacgagatagaaagttgaaagacgtcttaaacgtgagggtttaaatcgtctcatctcatctgtctttagacaagtattgcatcgaaatgtgaaatctgacgttggtatggaattctttctccctttaaccttttgtctttggcctacataggagacgaagagaaagcagcagcttcgtgatgaggccatgcatcagcgtctgatcaaagaaaaagaagagaaggaggttcggaagcgtgctaaacgcgcttaccatggtacgttctcttctggggtctactgtgtccctctttttcctctctttttcctacaacgctcatactgagtgactgatcgccgtatatgttgttatgacatcagaggctcaagtgcgtagaaaccaacaagggaacatatcagctcggaacaatagaaacttcaacgattcgactggtctaaacaatatgctgatgttcaatatgatggccgctgcgagctgttcgtccaattgaattcctcattccttctcaaacgtctcgttctttaggatccactttgtcctcgctcattcatctatgattgacttccgcgtaactagacactaccggacctggttttggtggtgatggtggtggcggcggcagctgtggaggtgatggcggcggaggtg

SEQ ID NO: 2447 - DNA, 2567 bp, Xanthophyllomyces dendrorhous
gttgttaatccgagtaatttttacccattctgaacgagttcgctttgcatcgttttcatctgttcttccgttcctatccttttttgtgacttcgattttcgatcttcttagatttcctttcttttcaattagcttcaaatttgcctcacaagcatgtacctaatatcaacgactttcaaggaaagatagaatcaaacaacattccaacgaggaagcgaccccgagacgatatgaagaaaagagactagtaaccctctgtctgagactcgaaccattgccagagatctctgccgagtgtctcgtctgtcgcacagggcgaagcgtcgcctacctttgcccatggaataagatactatatcgccaagaacgaaacacaatagaaaaagatcagtgatcggacgagaggagagaagaggtagagagttgaggaaagaaaaaaactgagagatgagattggatcagacttagtaggactgtacctttcctcctagatctttgccttcgggggatgtccctccccagagttgagtgagcgctcccatagctgagggatacatcattgtccaactctacttgttgtaaacagatcaatcgatcaaaacgaagtgagacgagatgggacgaagtagaccgaaccagatcaacttgaaacagagagaaacggtaaaaagaattgacttgacataacaagacgtaccatcactttccatacgatcgagtatgtgttcctaccaaggtccgaattaacttttacatcagacggagtgatcccaaatgtgacgacagtgcacggaacaaagaggcgacacattaataattgaagtatgtctcaagaaagatgggttaggttgaaggagaactcacggcacccaggatggcaagccatagagatcaggccttggtcagaatacctgctgttgagttcattcgagaagatgacgttcccctatcgtcgagcatgcgcttcaagctcatcagattaactgtttatcatcggagagttgaggaagataagagagatagcaaggaaagatcgaaaaaacggaccagtttactctgtgcgtataaggttgccggaaagcgagggctcttgaaatttccggtctgttcatcaaccttgagcgaaccccaatcgatcccacctctatatccaaagagatgggcacatgacgatgtgttgacgaccctaggaaaaccttctttcttgttaggagacgagagaagagtaggaatcaagatggttgtgaggtggtagtgtccgagacagtttgtgccaaactggagatcgtggccgtgagttgttaccgagccggaaggaggcaacctgatgcgcgattgaaatgagagaacaaagagaaggaagatcaagatattggcgataccacgagacaaggcttgtttgtgcctacatgacgcctccattgttgaatagaatatcaagatgatcgattttgctaaaagaaaatactcgatagatttgaacttgatcaatctcaaacgatcgaaccgaacaagcatatattaatccgaactaccgacctcatgagctcctcagcgcctttcctgatactctttaggtccgccaggtcgaccaatacaaagtggatctgaccagtagaagatgggctaatctcactgttgagtctatcaatcgcatcacgtgcttttgattcagatcggccaaggatgtagacggtcgcgttcttgttcaagagtgctctggatgcaacggatcagatcgaacagcgatataatgctccggattgagctctagaacgatcgcttactttactgtctcatatccgataccagaataaccacctttgtgaacaagtttcggagaaagagattcagatcgagcgagattatgagcgatacgcttccaagtcagggatgagagggaccgttaaagacaaaccggtgaccgctgccagcttgcctgtgagatcggggatttcatcgaccgaccaagttggtgccgccggatagatttgctgcaaggcaaactttaggtagatcgacatttagagtgctgggctagagtgttgattgggatgaagtgaaggaatatgggttggatcctctggatgtgccagattaagagggatgtatttaattaatgatagacacgcagcatgttaaaaccggcacctcattccagaaattatagtcgtcgcacggctataatgattttgttttcttcgtttttcttttgtcattcaattctttagaagaacgattcatgctgcacacaggccaataatctatattcatgatttacgctcgtcaactcaatttctcgatggagtcggagagtgcacacctttgtgtccatctaagaggatagaaatctctatgtactgcgactcacatgatgttcggcatatctggacattcttatcaacgagttggttggcgaacggctatgcacagccgtaaatgcgactagaagtcttgcgcaacagatcaacacgacaaccgtaccctgactccagatgagcgagacatctcccaacccgtccgactgcccactgcccactgcccaccgcccaacccccgggtacatc

SEQ ID NO: 2448 - DNA, 9866 bp, Xanthophyllomyces dendrorhous
aggtccctcgtgctatgaaaacccggacgttgaaggccgagctggctgcttacataagatgacgtaagctttgcacggacgcgtgcgcgtctcaaccgtcaacaagcgaaacaaatcagtcgcgacttttttccacgccgcctttctttcaaccgcgcagcaaaagaagagagagaaaaaagagcgtgtttgtcttgttcagtcccgtgggagtgtggagaacagagatagatacaacatcgaaggaagaaccagggagatcagtcatcgttgttcaagagagaccactgtaagtgtttgtgaaagtgagtgtgacattgtagatcggtggctggctggccgggtgtacgtgtttgtgtgggtgtgtatgctcactctcctcgactcttatcctccagcctcattgtgaaaagacccgcccgaggacgatcgtcttccgttctacatccaatccgttcttctttctcttccttgtctttctttcggtgtgcatcctatcccttctttcagacgcgtacacacacatacacactctccctctctctccctctctctcattccttatcatttctacaagtccaagcaaggaagaggaagaagaagagacaaatccaattcgtactttccgtcggaaacccctggatacagacatcacccgtttggtgtcttcactggtctctttgttcaatcgtccatccatcaagtttgattgtgtccattctctgacctcacttcattagttccttgccttccgctccgacgattccaaacaacgactacgatctaatctattcattctattccttcccttccgacgactccaaacaacaactacgctttgcgtctgcttcatctgcagtaattcttctctctagttcatctttataaacccaacaccctgcccacgacgtcccgtttcgttcgctctcctctccctttcccaaactcttccctctcgattccctcttgacccttcttttccttcctatcgagccatccttctgtcgccgtcgcacagaattcatcccgcacaactctgaacgatgtcgaaccggccatctatgtcgttccaaaacctatcccatctggaaaattatacagaaggagatctcattggacaaggcagcttcggtatcatccacaaggtcacccgaaagtccgacgatgcggtcagtttcatctctgctcatttcaatccttcggtctcttcttcaatccttttctttcccatgattttttccccctcctctgctctttccacaggaagatcatcttcgatggccttcccgtccaatcttttgcgatccatgacaaacacagataaacatggaatgaagctgactaacatttctgtctctgatgtctgcttctctgtacactcttaggtgtttgctcaaaagcagcttaacttttccaagatgaccacacgagacaaacagcaacttgtggccgaagtgtacgttcctactcgcaaaccgttcatgttttcttctctttcttttcatctgaacctccatcgtattcaccaaacatattcgatccgtccgctatgcttcctacagaaacatactcaacaagctacaacatcccaacatcgtcggttacgtagagagggtccgtcacatttgttttctcttcgattcttcgtctcaactgacgtttcctggtctgctcatcaccctactatcgctatcttgaataaacgctcttccatatccgacatcaattctaccttgtcatcccatcctggacgacaacttctgcctcacaccagatcctcgactctgagcggggcatcatctacctcatcatggagtactgcgggggcggagatctatcaaatctgatccgggaatgtgaacggtcaggccgtacgatcggcgaggaaactatctggaactacttctaccagatcgccctcgctctcaaacactgccactcccctggctcgtctgatcatgccgacaacgacggatccggcacgtcgggtccaaccggcggcagttcctcagctatgggaagacggacatcgagtaaagatcgggaacgagtgttacatcgggatctcaagcctgataatggtatgccttccagtctctttttacttttcctttcttacaagatcatgcctggagtcattcgactgacttctgagtgaattcctctttcacaagtcttcttggacgagggcagagaaaacgtcaagttgggtgattttggattgtccaagtcgatgggcgcggccgcattcgcaaacacctacgttggaacaccttactacatgagccccgagttattcagcgagtcaagttatgacgcaaagagtgatatctgggctctaggctgtgtgatctacgagatggtcgctcttcagtaagcccttgcagtcttctgtttctcttaatgttccttcctcttctccgtcactggtctccatcaagccaacatctttggttgacatcacgtcctcgttgttccttctcaccttttgcccttttcccataagcccccctttccaccaagcaaagactcataatgacctggccaatcaacttcggtcccaacgaattcctcctctaccccggaaagtatcgccaagcctgcgagatttgatcatgcagatgctatctttcgatcctaagcttcgaccgagcgcggccgatctgttagccaccccaatgatggacatccagcgtagaattcgagagatgaacaaaacgtcagtttgtttcctctcccagttcccttcaattcgatatgatcttttgtttccgttgtagatggctaaacactcatgcgtcgtttgattgatattctccagtcaaaagatcctagccagcaaggtctcccaactcgacgaacgagaggtttctctggccaccagagagcgagccgttcttgaacgtgaacgtcggtgttcatctcaagaacgaagaatacaatccctccgtcgaggactcgaggccgaccgagaattgataaaagcagaacgcgcaaagtgggacgaagatcgtcggcctggcttgctcagtgaggccagcagtccgggagagatggatggtgtggtcgaaatcccgggcagcgcgggaccaaaaagcatggtcggaagtagagttcctaggaggtcatttgtatctagacctctagaggagaagccgtcagtcgatccttgtttgtcgtctcgaatgtttctgaagctcaccaccgatttctttcttccttcgaccgctgtttgtttcaaacaccacagagttcccaaccagttagtatctggcctgcctcgctctcgagacagttgcgtgtttgacctggccacaccgaccaaatccgcctacccaccgtctacccatctcgttccgtcgtcaatccgtcggacgggcacaccatccagattggcttccaaatcaatgggcaaccttgccgctgccgctcgggcggacagacagcgagaggaggagggcgggaccttagaagctgtcaagagagatctcaccagatcgatcataggtagtccaaaagactataggcataccggtcttggtctcggtcggatgacagctatcaatgccaatgtcaccaatggtggaaacaacaccaatggtggcatgcctagaaggctgtccccaacgaacccattcggcgctgaatccagatacgatagaccaccttcccgaccaccattgccttcgtctgtatactctatgcctgccactaccaccgtcaacactctatcctctattccctcttcgtcttcatcgtcatcatcaacctcagtagcaacggcagcaaccgcgacgtcatcgtcatcatccgcaacttccttgatgccaaatacgccggctaaatatgacccacacgatctcgagaatcttccttcaccgtttcttcgccgaccaacggacgtcctttccaataatcactccactctatcatccttaccgtcaccttcctctgggagcagaccgtcgataccgaggtcgaggagtacgatcgtccagggaacggtcggttcaaacgcgggcggcagtttagctaggatggcattaggcaacgcggcggccgctgcttccaacccttcttccgtcaccacaggctcacaccggaccgagtcgggagtaggaaggccaccgacgttgcagagggtatcccgactgtcggctgtgtcttcctcggtttctgcttcgtcgaaccttagggatagagagaacaatacgagggagagcgtggccagggcagagcttgctgtaggtgatgctcaaagagcgatgatgatgggtcactgaccggcgtcagcggtatacagtctttccttatgaagacttactttgccatcatcccttccctccccccttgtctcttcatcggatttcccatgtataatgagggaggaaatacaggttgatctgtctatgatttattcattcgcttgctcttccgtcaatccattcatcccgttccaatataacccttgtttttctgtctttttcctttcctttcatttctctctctttctttgataaccatcccgctctccgtctctgtttttattgcataatgctctttcattcgggtgccgtccagaccaagatcctgttcacagtcttcccttgttccatatagcatctttacgatcttactttatttccctctttccttttccgttaaatatccttccctccttaaccctttgatttaatcaagctgactttcactcgctacccacttctttctttttttgttatactcgtgtcgttctatcgttattacctccttcggttctagctttgtcggcttgctcatttgtccttacctgaacagatataacctttttctcgatcgatatagacgtacgctccctcttactatattctttccctttcccatacctttttcatttctttcacttcctcttccctgtttttcatcatccggatgctcctgatattccatgctttcagtctcatcaatctcgttgtcggacggagattctagaatacggggttgataagataagaaggtgactcacgtggaacgtaattttgccttctataaggtcacgtgcatgtctttcatttcttgacgatccatctcttgcctctcgctagtcgagtctggagcatctggtcatacttagagtctttgtcgttggataggataatcatccagcatacacacacacacagatttgcggactgaattatacgtatacgcgtgtgtagtctaggaaagagagtctcgatgccgtttacacaaccagaagatttcgagtcattcttgttggcttgtcaaggttagttgcattcagccctttgagtttcaatcgattctcgatgtgcttgatatcttaaccgttcacgtcatttgcttcgttttgggcttgagaaactcttagataaaccagagctatcatctgttgccttggaattggaagctcttagatctatctatggagaagacacgctgagacttcatcgacctccagattcggacgatcgggatggaccgatcgtgaatgattctgagggatggagagttcgatatgaagtcgaagttccgtaagtcacttctttttcctttccgttcatttctcaaagttggcagatcgagcttgatatgaaccaagttgaaacgataatcgttggcttactttcatgtgttccttacttcggaggggatcatcgaatgtagattgacagaagatccagaagtgacgattgtcgtcctcgtcacactacctccgaactatccagagtcatcgaaatcacctcagcttcaactcttaaatcgatatgttggtgattttggcgtagatagtgatctttgtatgttcgccttctttcgtatctctttcttcaactttcacgaaacatcagtttgggtgcgccttgagacgcaggagtcgatgattgaggtattgatctttccaaccatatcttgggtgacacaagttggaagggtgttgcgaacgttcttttctataccacctcccgatggagatggtgtaccatttgtctctggggatgtggccgtatgggaaggattagagcatgtccggggaatctgtcaggtttgtcaagttatcttttgttcgggggtcttgatccttgattcagcgcatacgtgattgacaatctacgagtcttttacatcaggaatggtacacaaacaatacaatcactatatcagaattatcagctactcgagacgccgcacacccccaaaagtcaacaccctcctcgtcgagaccttcgtcccctccacaacaacctgcctctagattgccgactcagctaccggaaggaatagtgatttatacttcggaacctattgttgatcggaagagtgtgtttatcggacgagcagttcagatcaccgatcctgctcatgtaaataatattctttttctcttctaccgtccctcaatgattacaaacgcctcgaactttatactgactttaaacttgctttgggcttgctatgaatcagatcccgatcattctcaactacttgttggaagataaaaaaatatcaaaagcagcacatcccatcatccatgcatataggcttcatgggcccggtggaagtataattcaaggtttgtcgagatgatttcctacaagacttgctcgagcaataagtcgatgttgatggctctttctttcgcttcttatttttggggttttcaaacacgtgtccgttaactgaacatccggcccggtcagataatgatgatgatggagaaacagcagctggtggtcgtatagctcacttgttacagatcctcgacgtcatgggtaagtttgatccgaaacagtgagctgtgatgttttcaacagcgtaaactgatccagaacgcggtcgattggacggatcatagatgtgctcgtggtggtgtctcgatggttcgggggaactcatctgggcgcggatagattcaaacatatcggccaggtccgttttctacgaagtttttccacttcaatgtccttaaactgatcgtttcctgtcttctatcgtaataggctgcgagagattgtctggaagttggaggttttttggaagagaagaatttgaaggcaagttcggggaagaaaaaatgaaataataatgaattcttactttcttcagaaatatttactgcttgacatcaccacataacgttgagcagctgcaaatgtcgttgatttgacagtgaatcacggtcgattgagatttcgtagccaaaccatcacttgatccgagcgccattgatggactgtgcatgtagtggttggaaaagtcttgtaccctaagatgatcacctgcctgacattgattccttcagcgtgcaaatctgggacagaatagtttgactttgacaaatttgatggtaacgctcactgagtttgagaatctgtctaactcatgtaatgatttcaagctaaactgatcgttgcataaagcctttcgagtgggcctataaaataaatctggtagccctgatacattccgtttcgagatgagaagattacatggatggttgcttctgtgtatcgcgactaaccattcatgttgctttattcttgccttccttcctattagtcaagtgagtggcttgtcacacttcaacgactcattgtggattgatatagtcatgtatatgatacaagcaattcaggttgtttgaccgatgatatttgatctatgtctctatagagtaatcgttcgcccttccatctaaaacaaaacgacacagcagaaaccgatctcttctgtttataagtatgtctcctttgaaaacaccaaagataatctgggaacacgaaggatatgcagcatgtaagagacagagaacccattagaaggatgtgcctgctagtccgtgctccttcagagcccagttgaccgcatcttccacatttcgctcgagccggaatggagcatacttcggtggcccgttttcggtttggtaaacaccggtttggactaacatcgatcgccagttgtagtcgttcgcgcctcgaatgtctgaattaatgaaggatgaaaaatatgagtatgtgcttgcttgggagagtttcgagtacaatgtgaacatgtgagacccacctgattcagggttatctgaagatagcgaacaacaacaaaaaggcagacgaggattgatgtacaccaacagacgtcaacaaatttctctttgtcgtttccaggtgaaacttgcggctggcagtttgaatgaaaagataaattagaagacagagcacaacgaacctccgaccatgtaaaccgtacccaatccacccttcctcgtgtgaccaggatacaattcttctacccttctctccaacatctgctttgcgaaatcataagtcggtcggtgaggtttaccgtactgaacggattggatttgatgttccgggaatgtctcttgatgaatctcgacaaaggcggtcttgaaagctaatgtcaagaaaagacacaaaatcagagatgttgttatgattgaagtgtacggtgacgtaaaaaggaagcacaaagaatgatcggttggttcttacctcctgctccatatcgaggaagtatgtagtcactatcatgaatcaacagataaggggccgtcagcctacctcttgattttgccattcttttgcgcatccttccaaccaaaagaaaacttgttcaagacttacttcttccatagcagatccgggttgcaatagatgacctcgactgtctggttagcggttgtgaccttttccttgatcgttcccagcacaccatctcgggcggcgagaatttcagacatgacagatatatcaagtccccagtcgcgtgagtcattgatgacgatgatggctctgtttgattgtgtcgactcattagagatggaatcgagagatgcatgtttcaagagaattgatagagatggaacagaatacgaacttgaaggatgtttgcgaaaagtcatgttccactgtgtatttcaggtcctcctgtgagagctctctcatcggccacacactgctctgccaacgcttgacatcgatggagaggaatgccttgttgagaccatagctgtttgcgacgtatcgacccaggtcattcttaccaccgacaatcagcacagcctcatccgcgtaccgcttagcgagagtctctcggagaggcgtatgggattgaatgagctgggtgggagatatctgcagtgatcgtgaacaatacgaccaggaaagtcagcgttgggtgatcatcagatctctgtgagacgttgaaggaggcaaacatacggtgacacctaggtctttcgacagaagagaacatcttttggcatcggtaactccgcctccattggtaagtagtacgtatggaaccttcctgtagtgatcagaatggccattcaacccaagcaggacgaccagaaggtagagaaatcttctgaagtattcagacggatgtgaagcttactcggcctccaattgtttcaaagccctttttgctcctgggaagacttcctctccatatttgaggacaccatcgatgtcgaacgcaaacgagaccgcgcctttttcgagggctggatggaagatgttggtcgaaggaaaagaattaatgccagtatgacgtatcatccaagaaactccgaagatcacacaaagtgaatgtatacatgaggaggagacttgctactaaggaatctcctgtacatcgcaggtcttggagctagtttcaatgctttggaggtcagaaagagagacatgtttgctcggatgaggatgatagaagattgatggtgagatgaaggaaggaaaggactgacgtatggaaatcgccagtcacaagggaacaccacaaattccagtcatcacccatccacccatccacccatc

SEQ ID NO: 2449 - DNA, 5441 bp, Xanthophyllomyces dendrorhous
cccatccacccatccacccatccacccatccatcgacctggcctcccatcgacctcttcaccttgtctcgcttgtttcctcattcatagtttcccatcgaggacttatctttttgaccgatgtccgagttctggccgttggtcattaacaacgggagtaaggatccggctcctgggagtaagttcaagtggactatgtacaccaatccctaggagttgtgcaagaactcactctgtatctcgttgaaaccgttgaaaccttcctacacatagttccatcggatggtaaacctgattctctccgttcagatcgtgccatccatactgtaaactcacgttctgcgtgtgttgctgttcttgaatacagatagatttgaaggaccctggttccaaacccagttaaccctttcgactggtctcggtgtattctccttcctgctcttttgttttctgagaacacgatatccaattctttttgctcctagaacaaagctcaaaggtcagtcttgagatgtatcattcgtgatcgtcaagacatcgtgttctaagacctgatgtaactgttcaacagacttcttcccgtcggaagctcatttacatgatccccgtgggttcttctcgtggatccttcccaccttgcgcacaagcgaatttactgtccttcagtgtgtcggtctggatgcttgtgtagttagtcatctcttgatctggccttcatttcgagctttgactcgactgaaatgatcttgattgactcaaaatgtctccctcccactttcacagctcctcagcttcttcaaaatgtcgttcttcttctttctaacgtgtgcactggcagcagccggagtactcatgccgtttaatctcaaagtacacggctcagttgattctgaaccggacgacgatacggatgatccaacgaagaacatgaccctctctgctctgtctatgctcgcctctatgagaaagaagccatcccagcctaaggaacctagtttcctagatatccttacggatccaacaacatcactctctctacatcttctattcacctacctgtttacggtttccgccctctttttcgcgtacaggaactttaacaaattcattcagaaccgtcaactctctgcgcttgagctcgttcacagcatatcggctcgtaccgtactcatccagaacatccctgcttggctgcgtggagagcgagctctgtcagagtatttcgaaaacatgggttggggagttgaaagcgtgagcgtttgcagaggaatatctcctctcgaagatgttttggagactcgaaccaagatgcttatgagcttggaggaggcttgggtggattttgtaggaaacccaagtgttgtgcctcgtagtcaatatgcgtcaagggcaccgtctcctctcccttcaggaagcagggctgagaatatggacggctcttccgccactgccgctgattcggtccctccttcaactcatcagcatagtgacgacatggaaagccgctcgggattatcggctaagggaaagcgtttggagattcctggaaggaaaagaccgaccgttcggaaggggggtaataactgggcgttctggagggagaaggttgatgcaattgagtactgggaggaagaattcgtcaaggctgacgaagcggtccgcaaaaagagacgatcaggaaagttcaaagcagatggcgcggcattcgtcacgtttgaggttagtttcaactcatggttttgggaattcatccaatttagaaaaattattgagtttctctggctccgctccgtatagagcatggccgatgctcagattgcagctcaggttgttcgtgagtatgacctcgtctagatcttcttgtaaatccaatattggtgctaattcttcttatgtctgttgcagatgcttctcgacctgatcaattgctcacatgtcaagctcccgaacctcgagacggtaggtgcttcattgtaatcattctgtagaaccgtgtggaccgattttgagatgaatatccatatatatctccacggtaaattagttgtttggcccaacgtaggaaagtccgaaaacaaccgatggattagggatgtcttgatcatgaccttcatggctgcgttgctaatcttctggcagggtacgtcaggtttttcaatctcgatcgatagaatatttatagcagtctagctcacgatttctgatttactcctcatcttgtcctatcaaatctctgctttacagttcccgtatcgcttttgacttctctactgcactacgaggagatccagaagtggctcccctggttagccaagttgattgataaatccgagcacttgagagcactagttcagaataccctaccatcgatggctttgattggattcaatgctgtattgcccttcttattagagggtgagtttaccttcctatgttttgaaacccatcaatgagcgctgtctgacttttcgctctctcctcgatcgcaactttaccgcgcatagccttgtgttactctcaaggaattcaagccagaagttggattgagtattcgttgctcaagaagtgagttctctatcaagttggcagaagttcatcgatcgatcgtgatactgatcctctttaattcgatcattgcataacagatactacctgtttctactgatctccgtcatcttcgtttggaacattaccaacacctattgggctttggttttagattgggctggaacgcccaccaaaattccgtatgtccctatttatgcactcaatttgactaccgtctagcttctcaagatgatttcttcattcagtgagcgtttggcaaagtccctaggtgctggtcttgcacgaaacttcttcatgtcttatgtcatgttgcaaggcctgggtatcatgccattccagctactcaatataggcacagtcctttcactggggttctatagagcgttttacaccaagacacctcgaggtgcgtctatattgaacatcataagctagcgctgatatgttgtgtctgtttttactcaacctgatttactcttctcgatgtgtaatctacactgatagatttcgccgagctcaacgcaccccctatgttgaattatggaacaggtatgcttcgtaaaattcgtgttactaacgtccatacacgcttgtcacttatctcttcgttcatttccgtttgaatacagtgtatccacaggcaatcttggtcttcacggtgacattgatgtactctgtgatctcgcctcttgtcctagtttttggagcaatctacttcggaatgggttatcttgtttacaagtacaaacttctttttggtgagtcagctgtcattactttcagttagtaagtttactccgatggagttcaaagttaaaaggtcatttttaatcaactttgtcagtcttttacaagccttacgaaagctctgggcaggtatgcatgtcttcaactgcgtgatcaacttatgtcagatatcgacctaaatttaaattatcttctatataggcctggcctatcacattctctagacttcttcttggagtgatgctcttccaaatcttcatggccggactcttcctccttcagagagcatacatcatctcgggactcatgatcccacttctctctctcaccttggtctggtccttccagatatataagctctaccaacctctatgtcaaagcgtcagcttgagcttgatcgccgatgtccagaagggcgagagtgcagagaatgtgctgaaagtaaggagtgaaaggagtcggatggagcaagctgagatcactagatcacaatggtgaggctgcctcgttattcctttcctttatgaatcgcgcaagttccaaaccactctgaaatctgcaacatcaatctaacccgttgttcaatccaaccggtctgtttgcgtccttgccgttgcaaatagtaatttgaatcgtcgaagatatgcggtcaatcaagaggacctctatcttgcaccagctgatgatcgaacggattatgtgagtttcctagcattcgaacccttgttctatctcggtccgcttacgcttgattcttttatggggtggtggtgtaaaagtctcaacctccgatgagcagttatttccctggtgtcctcaataccggtcgaaaacgttacgctcaccctgctctagccggagttcttccatttccctggctcccactaaagcctggagagtccacgatgtctcaaacggaagtcgaacagaacccgtccaacaacgactcgaaacaaaaggggtcagtcgttctctcattcgggaggaaagtccagaaactaggaaagaaagcagcaggaaacaagagaaagagtttcaccgatggaccacatgaagactctggcgcgcagttgaaagatcgaaatgaaagcctggatgtgaacgggaagagatcgaacacgagaaagtcttctggaacggcaaatgctcaggatccatcttcctctgctgccggtaatactggcaagaccgcggatcgagtcggcctgccgctcgacgatgacgaacgaaacccgtggttggacaatcctcgacaagatttcctgagaagaaactccttaggtgtcccagggatgcattatgacgaagacgactcggacgacggaagtgaagaaccagatgatgagacttctacgctggcagcagatgagaactcaccacttgtaggcgatcaaggacgatacagggtatgtttctcctcttcttccttcattgtcaatttgaggacttcacgatctgatgcttgatttggcaccacgaaacagccatatttccctcatccggaaaggagacgagcgttctcaacatcttcagctcacccatctcgatcaacttcagaccctgtcggaccaccatccggtgtttgaactgtgcatatatgttgcttactctctatacgttctctctttcttgattgattctcttaattcagctcgatttttgattttgtgccgtactctgtacctttatgcaaactcgttttcccttgtccagattcgtgcttgtttcttccactcaactgatgattcctcttatgtgtcccgtgcgacaaaatatcttcttcaagtcatcattgtaggagggtttgattgctgttttctcttttatagttcgttttgcgaacactctagtttcaaagcttcacggcagtgtgaatggaagcaatccctccggtgagatccctccatgcgccaccttcaccctctctcatctcacccgtctggaagcctgcttctcgaatcctattcggtttgaagattaaacaaatgagaaaaaaagttgaaagttgagcaatcaaattctgttctagatcggtcggtcaaccacaaaaagtgtgggagaggaacgtacatctgagcgaaatctggctgcgaagggaatcgctcgatagactcaatcaaatattgg

SEQ ID NO: 2450 - DNA, 19401 bp, Xanthophyllomyces dendrorhous
aatattggtaagaatccctatcgctggcaaggatttgacctaaaagaggaatcatcgagaacgagtattgtcggtagattctgtcgtttcgttgtgcgttcgggagagccaaagagaacatatacatgagcacagagatgaggcagaatgaaagagacaaagacaaaaagacccacccggcgaacaaggggttggtgacctttccaaactccatacagcagaagattcctccgggcttgagaactctgtaagcttcctcgagaacggcagggatgtcggtacagtttcggataccgaaggagatcgtgtagagatcttttgaagcggaaggaatgtcgagcgcctgggcgtttccgtgagtgaacgagatttgcgggcctagaataggaagcaaaagtttagttgactcttgtttgcaatgacaaaacacaaaggtctatgagagaccaaagagagagaaagacgaacctccgtggtacatggtcttcctgaacctcttctcaccctcggccagcatctctttgttgatatcgagaatctcgaccttgacatccctatccgcgtgcttcaacctagcgtgatccaatattcgctctgcgatatcacccgttccacccgcgacatcaagacagctccatccctggcgacctctgcctccaggattaagtgtgctcacgaaatcatctttccatagccgatgaataccgagtgacattgcatcgttcatgacatcgtacgaggacgcaacggaagagaaaacccctcggactgttattgcgtatgaggaatatcacataagaaagagaggaaagcacatagaagggttagaatgattgagttctcctatcgggttgacccattggacattttttaaactagtgaaagagagagagagaggaaacagctgaagaatagctctgcaagatctatgtcccctgacactctaacgagcttcggattcttcgagacaaggaaggagaacgaagaaaaaaaacttacccattccctccttttcggcctcagggacggtcttgaacccaaaatgggtagtctttgacgactcgggcttatttgaagcggaggtctgggtctctgcctctgaagccaaaggagaagaagtagaagtggggacagggttcgagggaagcggctgggactgaactatcgaggatgtgcggatcgatcgagcaagttgcgaggtaatagttgtcgatcgaagggactgtctgataggagcaaacatagtgaaatcaaaagcggggttctttcttccttttaagtgtatctgcaggtcaaaagaaagcgtcgagtgagataggagattccaaatgtagacgtagtagttggtggtgatgatcagcgatctaacgagaaacctgaggaaggcgacgcggattattgtgggtgacaaaattctggacttcagatgatcaccaaataacgacacgctatcatgagccagactgccttcgtcgtttttgacttaacttgctatcagcgatcgtcttgctcgtgtagaatatggccaaatcatccggattccatacatgaacgaacgaacgagtgaacagatttaaacacgcaaaacgtttcctcgtccatgatacatttaatctttatttttggtttacatcacgaatcaatatctagcaaccttgcccgaatcccatggccggtcatacaacggcgcgtcttcctcgtctgccgggggtccggtatgagaaggtgggaccgagctcctagccggactcctactcctgtctctatcgtctctggcgtctttgtgggcggtggctcgcttgccaggcacccaaccggcgttttcgtcgatcaaagaatcttttgggttgatctctcgttcgagacgctgaccagctcgaagctcagaagctagccgaggggacggtaaacggacgtgaaggaagttgcaaactgaacagaatagaatagaggacggtcagccactcgattaaagtggtaaaagaggacaagcgacctaaaacgcaaatgcaaagccactcacgaccacctctgttgcagtctccagtctcgttctgtctgcagcatgcctccctaaaatctgtcaccgggctgagttcagcccaaagtggtcgggcctggtaccatctgtcattcatgttggcaaccgcggcaccagcctcaacctcccattcgtaccgagcataaacgtttccaaccaaatggtctcctacgttgtcacaaatatgaatctcgagcaagtttccgaactgagcgagttccctgttcatcaagcgtcatagacattttatttgtgttgttagctatgtgttcttgtcaagtgaatccagtatagaagaggaaataagacgagaaggacacacataaacatgtcttcgtaaaaggcatcgaaatcatcctgaagctcctcgtccgtcaaggtgcattgtgggtcgagccctgggttttgatacacgtttgaaagaagaatggtttgagagtgtacaggcttctgatgtcgtcttgagcagcggtcaccgtgtcgacaggctccaatctaagttttgagagagaagaagggaatcatgattgagacgcgtaagtgacgatggtaaatgaggataataagcagaacaaagctggattgcttactttataatagaaagaacagttgactctgcaggttgttcccagatcaccgattatgagatcaaatatcagtatatcggaagaaagaacgacatagaaggtaatatcaagttgaaaatgcgttgggatgagctacatctggatctgatacctccgagtgctcgggaaagaacagaccaagagaagaagaaaaagaaggaaaagactagacaaacctgtcttgttctgttccaaagatactggcgagatgagaggccatattgttgtgaatgcgaggctttaggtatctgtatgtagtccgaagtgagggtgagaaagaaggtaggaggggtaacaagatggaaagcgtgtctgcccatacgtctcgaccttaggtgaatgctgagtaagggtgagtatttgaatcaagcttacatgctcatataagactcacgtgtgacgcaccgctttgaaaatggctagtctgtcttcactgtaaacaccagatagcttgtttggcgaaaagcctaatgaaagtttgtattgttcagtatcatttcctaatgaagcgtcgtaatacttttccaataggagatcgatttgaccttcctagtgatctcaagtagacaccgttacgttctccacatacttgcgcatacgttcatcttggacgaggaatagagaaggatctgtagaaacatacgatcactgcatagacttctgtttctaaacgcttctgagcgtgccgggcagtcattggacgggtgtgttgtttgttgttcaagtacccggtgtatcgactctatagaaaaatccatatatgccatcagaacacttgactacagatggcctaataacttttttttaacgagaaactacaaagccccctaatgaaatgctacaatttatcctaattagtgttcacactgttttgtgtttcaactcccaaacaaccacacaacatatataccccacaccactcgttcgctcttcttcaagcctttccgatcagccaaccatcaggtctgtcccaacattcatcccgtgtagaacaggtcaagccaacagccaacgatggcgcatccatctggtccatcggtcggacagacattggatggtgatcttcaacagctccaacaatccaccagaacaccttactcttcaacaagggccaccttgctccaacctttattgctctccactctggccctctcgttattcaccccgacaaatgcttcctcgtcgtctcatcatccaataagctcatcccttcactctattcgttctatccttgattcgttcaacctgctcggttcaccattgtatgctccttcgttcgcggcgacatcctcgaatgtaacctactcctcttcggtctctactctactcaacggccggcttgactccactgctgtacctctaccaattgctcaaacctctgacggtggcatcatctatgatatgtgtcttcttggagcttcagccacatccaatggtactctcatcgtcggaggtgatttttctcaatttggaggtgtccaactcgacaacgtcgccagaatcaacctagattcagacactgtctctgtcctgcctcttgaaaatggtggtcttgacggtgtcgttcggacattgttctgtgacactattgaaaacatcgtctggattggaggttctttcaatggtccatctaccagttcgctcggttcctcgactgcaaactatggaggcagagtcgttacctacgatcctaccgcgaactcgttcgctccaccaccctttgttgggttcaacaccggctctgttctctcgatcaccaacacatccacatcgtctgttctcttcaccggctcattccaagtggcctattctacgctcaatcctactaccaacacgtcaggtcagaccgggttctcttctaccggtcttcccttgtctaacatcactctctactcacctggatcgactccattctcggcctcactcacccccattcccatactcggctcaactatcgatatcaccgcatcgccgaccaccaccctcactggctatatagatcctgatgtcatgttctgccccacagatcaggatggacagggccaaagctggttcggcggagacagccagatttctgtcgtcaatgtcgccctgggttccaaccgagtcgttgccgcttccgggcttaggattggaaacactttccaggacggaagaggaacaagcgcattcaggtatgtgtttcttggaaataaatctttttcaatcgaatatcgtgttgatcactttgtttcaacatcagaatcgtcaccctccccgacaacgcagttcaaacggtgacctaccttgatctggagaccgacacgatgttaaattgcactacaacttgtcctctctctacgaacagttcaattcccttccaagacttcatattcaccgcaggtcaggtcgagatcaccggtttccagttggtcttgcttgagtggacggggtctggaccgggattgcatctcattgaattactctcctcaggtacgtctcggctgtctttctcatttcacagagtggcacgcttggactcaactaaaacgcgttctcttctttacatcaacaaggctcttatgcgactactctcccgaccaacaccacctcctgcgcgtcgataccttcgacagcaaattctgagatcgtgggcaactggacctcaattcaggtcgccaatactgctctgggagggaccacatcagaagcaatttctgcatctgttttgccgactactctgtcctacctgacagaatttccatcaataacatattacccatacgtaaccagcactggtaattatactattagtctcgtcgtccctggatgtagggttgttggcgactgctcgacccgaaccagtctcgacgttctcttcacgccctacagtggtgcgggctcttatcttcaaacagttcctcctagttcgaacgaccaagcatatccaatctacacaggctcagtccaagcatcatcagattcgttcaaccctgcgattaagatttcgttgagctcaatcccgagtggggtcaacggggatcgatatactatagtagctagtcagctgatattcgagctgttgacagttgatactgtcggcgatggatcaggttcggttcatcatgtaaatgggtcgggtctggttgggccgacgaacgtaacatcttcaaacacgggcttgggtcaaaatcctagctcccggtcggttggatttggagtattcgaatggaccaaagcacaagcggatgcggcaaacgtttcgatcgacgcgacgggcacgatttacaatagttccgagactccatttgatcagctttccgtcagtatttcgaatactctcggcttcatcgactcgactaccacaattaccacggccacactggtggactcggtctactatgtaggcggaacgttctcgacctccgactattccaacatcatcgcctttcctatcaccaatggtacatcttccgcggcgactgactcgagcgtgatccaagctcttgcggaagaaggacttaatggcccagtgtacgccttagtatcatctggaacaaatctttttgtgggtggctcgttcaccgccacaaagtctggtgagacttctctatcaaacctggctctttacgatacgagcaccagaaaatggagttctatcagatccggactggacggaccggtgaccaagctatcgttcgggcaggacggccaaaagcttctcatcggtgggacgttctcgaatatattagcttcgccttctggatccttgaggaagaaacgagcggcaaatgccccggtaggcggatttagtctttgggacttcgatacaaacaactgggcagccgatcagcccggtgtctctggaaacgtcaactccttcagcacagtcgctgggtcctctgaaatgtacttcggaggcggtatcacaggcgtggccagtagtacgccaatcgtcgtctctaaatctaggcgtgagatctctcttcttgtgttgacccatattttcaagacactaaaatactgatattgccggtctgaacccgtgttctttctagatcatctcgcccgaggtgtggtcgtagttatctgcatggcgatcgccttaggagtcgtcttcctcggcgtccttcttggagttgtcattcgtctatggagacggcaccatgaggacgagtcgttttaccctgtcggaccaactacaatttcctcagaaaaagagaaaatgccgttcgaaggatcgcctgcaatgacaaacactcaaggaaactcggctctgttgtcacacatcaatgcggccacagagggcatgattcttgcttcccggagtaaaaatgttggtgttgatagcggaagatcagctggaacgggtcctgttccgggcgcaggtgccgttgccgctggagtaggcgcggctggattgactgtagcggctagtcgacgaggaggagagtcttcagagtcagctgaagtttcgcctggtcagacgtcagacagtggggtggatgaattcgatcgggggccgtcttcaatcaggctgggagccccaatcagaactgaacctgaatttgagtctggcgaaggaaccggagaggactgggaggagggagaaggagagatggtcgaagctagggtggcccatgcgaggtggagcttaatcccagatacagatgcagatagggaacttcggctgagtgccggtaaagtacgtctcgtttatcttttcttcattccaatctccttctttcttgttaattcatctgattgataatcatactaacgtgtctttttcttatatcacgtcctatcagccatatctcattttgaacgactcagatccagaatggtggcttgcgctcgatccgacaacaggcgaacagggcgctgtccctgcaagctggatgttgtaaaacgacgagcgtctctcgaatatattcctactttgctttgctttgctttccagtgttttactttcggtactatgcagccgttattcaattgtcctcgtctgccgtccgacttaacaaacctttgttattttctttcgtatccgctcatatacgtgccgccttgcttttgtttccttttatacagtacaaaaataatttgactcgttctttacgtgttcattaatccctgttcgtttgcttgccttctctctctctgctgttactatttcgtgggcttcaagctgtagtttttcttcagtaaattggaaagccaattattccccttcttctcagcccaatcttatactttcatcttgattatcgcttctcttccttgcttccttttagcttcagaaggaggagggcggtgtctcggccgtactactacatgtcttcttcgcttccagcctcttcgtcgttcttcattaattagattttgagggagatctccttctggacacctctttctatcttgacccatcaatagtactttcaatatgctattcaattctatagtacctttatactctaaagattaattcgatgttctgttgtagaacacaagatgtttgatgataggagtattgaacccaattcgctcaagctttgaaagagggcggggtctccacattttcttgctttttggtgtttacttgttcttgtctcggatgagacttcgctccaatcggtatccgatgtcaaggtcatacctcgttcttttcttcattaccaccgttgtcatcaccgtcaagcgggtccattgccttcacatttgctagatcagacccacagtcagaacatcacacaaatatagaccgaagagaacgacaacggattatacatatacaaacttagaggtcatagcggatgttacctacattcaattcgccgtcgagtttaccaagactttcgataaataaagatcatagtcctcgtcgatgttcgtgtcctttccttcctcttcttcattcctttgttccagtttgtgtctagacgtatactgatgtgtgtgattgatataaaattggtctcgctgggttggacgctctgacaatcgagtagctttagccaaaccatggttgacagcctctcctacgacatactctggcataccttcgacctaccctcgcagcggatcttctgggaccgacaccagacttagcaacatcctccgttctcgaacacgggtgacaaacttggctatggtcatccttctttccgtgcttggattaagtctctttggaaatatgaggacttgggctgggaaggttgagggcgatggggtcgtctgggagaaggactcggatggaaccatcggaaggagcactggagggaaaggaaaaggactccggatcggatcagtgaagtcgatagaagacacgatgagcaaaagtgatggctttggaggattggatcatctaatcgtggttgctggtcatgctatcgttggtttcctcctctctcacatctctcatcccttccttctctcgttcttgcttctcgacgatctaagcagggaacgcgcactaagtctttgtattctgagaataacagtggacgggtagtgatccggaattgagagatcaagatgatcagtggctgcttgatcctattcaacggggtggcaggactgtccgagctatcttagaacatatcaaagccgcgttcgtcccacatatctcttttacttctaacgccatctgactcattgtcatcgactcttgttacggaaggtcttatcaagattaacgtttgttgattggttttgtaattgagacggatagatctgatctggcagtcacggacgcaaagtcattactcgtctttagcggcggtcaaaccagaagatcgggtcagaaagtttcattgaccttgttgatcctatgctgttgtctcatgtcttgactttgatcttttttcccttcttttatagcaacacacacggaaggtcaatcatatctgactttggcgcttgcatcatccatgttacctcacacgacagcccctgctggacaggaagctgataaaggggagtctgatgttccttcagtctcaccgttcccgagagctacaagcgaggattttgcacttgattcttatgagaacttgttgttttctattgcgaggtttaaggaggttagttaagattttcactcatttaaaacatatctcggcggtgctgagtgaaagaatagctcatcattgttcttccggtcgtcctagtacacatccaattacccgaaaaagatcactgtcgtaggatttactcttaaggaaccgcgatttgaaacacttcatcgcaaagcaatccgattcccatcgaatgctttcgagtacgtaggaattgatctcgaaggtgatctcacagagttcagagagggtgagaagaagtttgggtttgatcagttcaagagagatctatatggatgccacgagttcctgaccgagaagagaagaggaagaaacgttttccgaaggtggcacccatacgtaagtgaattcctctgtgttggcacttcttttgccatgtgctagttcgtcgatgaacgaagtaaacagaaagaaacattgaccgggtggattgcgttatcttcgattacatcctagcattcgagtgcaccacaattacgtgcgctcatggagaattgcccctctttgaacgaagatgatcatcctgtagaacaagaccttttcaaaggtcctcttccttgggatccgtaaaggtaaaggaaggagaaaagaagtggaacagagggagaccagagggatttaatggtgttcatcaaattcatattgccttcttctcgctgctttgtttcttttgtaaaggtggtcaacttgaaagtctagtcttgttttgaattcacataaactcggaactggtggcgatgatatcatcgtcacgcacagcttacatcaggagtaacttgcatgcgagcgtgcacacacgatctctggattccttggacagctctaatgtgtatcatgctagatggatctcttagctggttgtgtaggtgatcaaaagagatcattcggcagaatatttgatatagaatgaaacaaaggatggctctttgagttctgccgaacagcatggaattacgtatgaacgcgcagtaaaaaaaaaggatgcagcgtccagccgtccaagatccctaggatgtttctcgtaagcatttctctcatccctcgagccctcacccaacacttattttcactcgcttcgaaatcgtcttgctttcgaaattcagagaaaatccagttctatctgctcctcaagatatgtcgacgttcgatccctcgagttctcgctcacctatcgatgggaactataacggtatagcccgaggtcaacccccaatgccagagagatccgttcgaaggcaaagctcggcagggagtatcatttacggtgctgcccctccgttgctagaccaatcgtcagtctgcctgtctctcccgtggtccctttagttttctatttctctctgctgggctttcatagcatcttttcgtcttctcgatgttccggatgtctgcaaaggaaagagaaaaaaagaaaaggaggatatcatttggcgacctatcaagtttccccgtttcttcttgcttgcgggtcttattttgattcctcatgcgaacttttggacttgtatgctgtatcgtactctgcttccaccaaagctcatcacggtctttttgttggtcaatgtttatacgattcaaacagccaccttcgaccgggcacccaagccgctcttctgtcacatacgaaaacactcgagctctaccgagctaacgctaagaagacaaacgactcggaaatcatctttgagtttgctgtctttatgatcgatgcttccaagaacctcgctcttggtgactataccggtggagaacaggtcgctattgaggatcaacgagatgacctcattaaggaagctactggtctactcaaacggttggccgacagaggtcatcctgacgctcagtactttttggcagattgctacgccaacgggatcggtaccgttagaggaaaacaggattttgacagagccttcccaatgtttgtcctagctgccaaacacggtcatcccgatgccgcctaccggtccggaacgtgctgtgagaacggttggggttgtagaagagaaagcgcaaaggcggtaatgttctataagtcagtgtctcgcatctcatacctttcgttcgttatttgctcggtgttcttgcccattactaatgcctctgtcactcacatcaattatagaaaagcggctgctgctcttcatcctggagccatgtaccgtttgggaacggccgagttgaatggccagcttggactgcctaaacgacccaaggaaggtgtcaagtggcttaaacgatcggctgaacacgccaacgaagaatttccacatgctcttcacgagctcgcgatcttgcatgaacgagggattgataatgttctgtttgtggatctggagtattcggcagaactcttggctcaggccagtgagttggggtatgcgcccagcgcatacaagttgggagagtgttatgaatacggaaagatgggctgcccacaggatgccgcactctctatacattactatgtgagttcatcagtctatggtttctaattgtcttcacgggttgaagattgaccgctgacatcatgcaaatgtctggacggttttttctatagaacattgctgcacaacaagatcatcgagaagcttgttttgcgttgacggcatggtatttggttgggtctcctggtgtcttgcctcagtcagataccgaggcttacctatgggcgaagaaagctgccgaacagggtctggctaaggctcaatatgctgttggatacttctctgaggtaagcatgttttcaactagatacagtgtcctggactgatctaacttggaacttctctattcatcttacactctgcaaggttggaattggaatcaatccgtctccgcaggacgctctgagctggtacaagcttgctgcagacgcaggcgacaagcgtgcgacgcaacggctcacgtcgaatgggatgaccttgccaaacggccgagaccgaaacgctgaactgttgatgaaagatcaacgaaatactgaggggggcgggccggataataaagaaagttgtgtggtgatgtgagcgacgaggaagtcaccgatccaggcagtttctctttctccccatgttctcttctaccctttctttcttctaatcaagtctctcgtctctccaacatgatgccttactgtttgttttaatctcttttttctagtcttccttagctgaaggttgacactcctctctgtatgcgacgttcttcatctctcaacacccttgcctgttttctcttttctttttcctaatctgttcatatagcggcatcaacctcattctcatggttcccccggcacgtctctttttcatctcgacgactacatgtttagttatatattcattcttcactatctgcctcttctatacaccctcatgtttttgcatacttgatgatcatctggcattttttgtttcccaacttggcatctcttcggcatcagcatcttgtagagtggttgtgttcaccctttatgttgatcgtttctttctttttctatcagtgtctttgatcctctgatcgcggaggttctgttcctttgtcctgtccggttggtgcctgcatttagccctgttcctagtggagtatataagagtgaacaaccctgtcagttcttcttcttctctcgttcctttcttgctcttgttgctctcgaccatctgttgttcttcatttccagctcacggtactatcatctttgcactcactttgttctcaatttctcgtccttgtctggttatcatcgctgccacacgtttctgaccatacagcgtatatccctcttctctcgttcgctctcgcccaatttacagaactcgtgttcctctctctgtgtttttcctctgttccagcttttgtcgcacctttgagaacatgtcaacaagtcttgatccagcaatcaaactacagtctcccaacaaacattactctcccctcaaacttgccattgtgaaaccatttgtctctcgcaaagtcatctctcctatcaaccttgctcgacatcatcgtcgtcgccgtcgtcgtcgccactcgggccgttcctctgttcgaccggtctctcatcaatcgcctcttggtacgaccgaggcactcttccggcaccttcggaaagagaagctaatcatatcaaacagcgaggatgagtgggacatggaagagggctcctgtcttccgtcaacaaacgcgcagagcgatccggctaccatcgaaggaccgtatagccgtggaagagctgtacctcgtcaggtccgacctagaacgttttccaggaaggcaagaaaggtacaactttctaaacaacgatctcgtccaaggatgaatttgagatcagtttccgtccctgcgatctcgccaaattcttcagatgttgaccttgtattaacactgagctgtcagtctacacccatccggaatcatagttctgcctccactttgatctctcatctagatcacagaggctttcttgtgcactctacccctaataattcgtcaatcgcttcaacttgttctccgtccacaccttggagtaagagaagcgcgcaggaattcagcatggactccatatccttcgtttatgacccgccgatgatttcggatgagttccttaaaggacccgctgttgcgctctcacccgaggccgaggcgttcgttttgtcttctccgttcaacccaatgggtctcaaggtcaagccgaccattggagaagagactcaacctaaaaggctacagttcacagagaaaaaagcgccgttaaacattcatcagggatcgcctatcaacccagatttgctgaagtccatcgcgccttacatccctacttctcttcggacaggaactgagaagaaatttgtggcgccggtcgctccaaaggtgaagaagacagtaccgatacatcaagagggattcaagtctattccagtgatggtcgggccagagtcacttccttatgccaggaatccttcgtacgttagtacatctgctactagagacgcattgtatgcttatcaaatttgtgtccgaattcttaaatagtggtgtcgatggatcagtcttggattctgatggacggttgaacgtctggcggccatcagtggatgaccccgaaccagaggtatgttcaatttttctcgaaagctgattcttcttatatcaaggctgatatgcatcgtcatttttgctaccgatagcatctcgaccatctacacttccagcgacgacctggggcgcccaatcctcctcacagagctgtcagccaagaagaagacaacagctctgcttatgctcatccttcaatgttccgagtgtacaccatgcgagataaggcggcaatgatgaacaaatctcaacagccgttttctacaaataaggtctcagcctcgtatataccgagtagttttcctgttcgctcgccttccatgtcgacaaaccccagccatgtctcttcacttcctattccatcctcacggtctccacttccgtctgggaatcgactcgaccatgcccagcactctttacattcgaaccaatcagcccatcgagaacacgacttttctcatcttcatccgtcttacccggttagttcctctgatccaagacggttcaatgagcttccaactggtcaacaatatccctcccaagggccagatggcttcctccaggcgcagatgggccttgtccacgatccaatgtttctcggacaagatatcctacacctcacagctagtcttctcaaccttggtctcgaccctgctgtcgtgcttcttcatacagccagacatatggctttgatgaactctggactaccctccgagcttattccttatgcttccagagcaaatgcatctatgcaccttgggtttgatagatcgccttctcctggtggacctcaaatcttctctcctcaacatgtggagaacagtacagaatgggcaacaccagcgtcaaattcatctgttcactatcatgcacctctacatgttgctcctcgaatttctccatctctttctcctacccttgtcgatgtgcatcaagacgtgcttccccatctgattgacttagcagctttggactcagaccctgtccttccaaaaattcaggttgaatcgatcgcgcactaccgtgatgatcaagttcgaattccttctccttaccctatcggcgactttattgtaccatcccttgagcatgaaaaacagttgctcaaagaactcaagcctgcagcgaatttgtttgcacctccaatggacgctctacctatggcgttcgagtccgtctctaagcctagggaagagtcgtttttgagcacggttcattcagtcgaacttcctatcgtgaaaacacggtctcttactgaaagcgctctcaaacctagctgggaagaacccatttttctgcctgccggatcaggtgcaggctttgctaatggcgggcttcgactttgtgggcctcgtgcaaaggttcccaggcgatcgattgaggagatggcgttggaagctatcgaggtagcttgtacgtgggaggagccagccgagtcatctgctttgaagagagagagaatttccctaacggaggcgattgaggctacgaaggaagctgcccgacaagaggcgattagaaaaacacgggaagagaacgaaatgaagatgagagtgctggcggagatcgaggtcgctaacagtaggatgaagaatcaacagttgaaggaggaaaaggggggtggaaagaaaattgtcgaagttaaagctggactgcctggacgagtcgtctcaggagcggcgggggatccatcaaagtctaaaaaagaaagctatctaactctgggaggtttgaacaagatgttttctgaggtaagtatattcttcgttgtagcactcagttttgccaagccgatcttgatctgtttgatggttcggttttatgatatagcctcccttgggggtcaatgtttcggatagcccccttcatcagaccagaagggtaatctctgaggtatgtcattcactttgatcaattctctttgggcagctttttcgaccgtgctgaagattctcaaatgggtgtctctcgttcgttttcgacagcctgtctacaaacagaacttccgatcttcttctactgcccttatgtctggactgccgcagaaacccgctgtcaagtcttcggtaggttctacctgtctcaatttttgaccagtttcgctgatgagaagtatactgacataactatattcgttcgtgacacaggcgacgactccatccaaatctaaacttcctgtgagggctaaagctttacctgtatcaaagaccagtgattctgacacggctgggtcggtcgagcacacggctcgtgtatctaggaagagcaagaattcacggccatccaatagagctcaagtctcaaaacctttttcctctgtactcaaataaatactgggcactaaaactcttggtatattcagcttcttagcattccttctgtttctgtgtatatctcactctatctctaccaggtgtattcatgtatccagatgtttcctcgccggaacttcagtctcatgctgtttctgctctgctttatagtctcctccttttgccgtgtatgttgtgcgctctgtgtattcatctctcttgggtctcttttcatctttatatagcatggttaccttctacctcattcttttctatgtgaacatgttgaatctctttctctgtggagtatcaatgaaagttagccacctacgtatcagtatacgatgtctcgcgtagatgaacggacataaccagacaagccgttgattgctggatacacagtcaaaacacgaccagttcatttttatacatatgtctttttgatagaatgcatgattaccacgtttgtagactctccttgaccaacccaccctctgttcccagaggccgttaccaggaactgagatgttggatcgataactgttgccaggcgaaacccccctcgaaacaaccgcgaggagacgcgtggtcagagccagacaacatgaaaggatacaaaacatttgttctgcaaagtcacaataagaggaacgaaggagaaagactcgtacccattgaggagatgattccaccatgatgaccgggcacgattttgaatggaacgcccgaagatcgatggctcggttgattcccgaataagtttgacgtcggccatagtctgatgttatcactcgaggcactatcggaagatgaagcatattagaaaggggaattttgaattagtgttacttctctcatcaaacacagagagaagagagagaagggggggactgaaaagagcatgaaagaaaaagtgaagaagacgaaggacaaagacagcaaggtagaatgagaagcaagcagagcagaaccactaaccaagcaatatgaccgccatcaggaaaagcaacgacgcaactgacagcgcctgaatcacttggatttctcaaagtcttcatgacatgagaggctgagagagacgcagaggtggtattggaagccgttcgtctgacgtcccagacctcgaccgtcccgttacgtctacctgcatacacttgagaacctgtagctgagaaacaagcctgaagattgaaaagaagaagaagagtgtgcggtaggccgatttcggtgagaaaataattataaggcgcggcaaaagggagagaaagagacgagagactgacagacatacaccactttggtgttttctctcctccctccagtctacccactcctttcgcacccatttctcgtcctgggactcgtcgatcccaaagtgtgacgttcccatctatactacttgtcatcatcacatctgatgaataggctgaaaaagttgctggagatagagaaggaatgaatcttgatgttggtggtggggcggtgacagtagtagaagccataaatgtcggtacgttcagggacgagaacaaggagcttggagaatctggtgctgtatctgtagatttcggaacggatgaagaaccattggtcaaatcgttgttggtggtggcagtggtggggccagcagcagtgctgctacctggtagtgatagagtgactgccggtttgttttcgggcctcgcctttacagaggcagatggatttgatgacgaagaaggtactgcagtagaaggtttgtcggggttagatgttttggaagtttgagactgaggaatgagttcatccatgaattcatctccgaataaatcgtcttcgatctccccttgagcatcttcgtcttccccctcggcgtcaagatcggatatgtttttgggtggatctctttcttctttggaatttgagtcattattggttccattcgtatttatcaccaaggctagtggtttatctaacccgttcgttctatttaaacctctgttgccctcggccgattctttctgggtatgagcgtttgatctattggtatccgattcatctagttgtagagcgaacgctctataggaaatgttgtttttacgatgatgagcatcatttggaccactaggaagaggctgtagagagagagaagagagttggacgccctgagtggggaacgatcggattttgcgacctgaaaataaaaggggaataagccttcaaaaagtgtgttggaaagcacctgaggaagcttgagcatcgtagaaata

SEQ ID NO: 2451 - DNA, 82564 bp, Xanthophyllomyces dendrorhous
  misc_feature (2407)..(2416): n is a, c, g, or t
  misc_feature (9602)..(9611): n is a, c, g, or t
tcgtagaaatatttacctgtattgagatcccattccttgatggatcatcgcatatgaatacaaataactgtatcagcatcacgggatatagacgtctgctgatcttggcatacttggagactcactgcaacagagccatcccagcttgcagaatacaaaatatcatccgtatcgttgagcgttaatgcagagaccgcatctttatgaccgttctgaaggacatgttggatctgtcccattgcatgtcggatagtgaacaggttgatattgccgttctgtgtatgatggatgaatagaaggagcagaggtttagggaagaggataaggtgctatagacaaacaaataagcagttcgatatgagagtgagagaatatactgacagctgttcccgaaagaccccataaggcatctttctggcaagccaagctgtagactggctccctcttctttccctcaaccaccttggacccaaaatttgaaccgtttgctgctgtttgttctttaaagctagaatctagccccccttgtctaatctttcctccatcgtttgcccaccatcctctggcaacgccgcctttagtgacgctctctcctaatccaccaacagctctctgttgagccgtcatgatgcttcctccatttgcactcgcccagggatcccagtttcggacgaagccatcctctgagcctgtcaacaagtgagagaagcataaggatgaggacaatgagtgaacgggtgaatgtatcgggatagtggctatcgggtcgatgtggagagatttaggagtggtgagcgttagagaagggtaaaatagccgttgtcttttgagagacggaggaggtgaaggtgagcgacgtggtgctgtgaacgaacaaagaagaggaatttaacaagagcatgatggattcagaggaagaaaaaagaaagaacttcagttgctggaataaactattggactcaaggaaagggagtacctggtgaagtaaccggcgctgaagcatcgcgccttggctcagatttcggtctggacaagatggaggtcgagccaggtgagagcggaagtggtgatagcctggtgccatcgaccttcgtttcttctaatatccttctggttttttcaggagatagaggtttgtcgatgtccattgactcgtcttcttcatcctcatccgcgtcgtcctaagaaccaaagagtatgagaagtaagatgttactggtcagactgatacaaacgtgaagaggttggctagaggattatgtagtatttataagacagctgtgaaacggatatcttcaaactaacatctgatgagttggccccgtcgtcttgatcactgtgggggttgtatgaaagaaaagtgaatagtaagttgatggttctttgatccaaagtcggatgacttgcataggaagactcacttatcatcgctcccatcatcacttccgccatctccatcattgtcaccgtcaccgtcaccgtctccgtctccatcgccgtcttcatctccttcaagatcctcgtctccttcattatctctttccaagtctccgtcaccttcaacctctccgtcaccatcctcgtcgtcatcttcatcgtcttcgataccctctccatcatcaccgtcgccatcattgtctccatccccatccccatcgtcatcatcattgtcgttgtcgtcgtcgttgtcttgacctccatccgaatcgtctcccatcaggtcttgatcgccgtcgccgtcaatatcctcaccggcctcatcttcaaagagaaactcctcctctttgcctggcgaaatattttctagataagcctcatgaaggtcttcttcaaagtccatcttcggtgagcgaagtcggctctgtatctaatcggtgaggcccagctgatctgtatagagacaaggtcgtcaggttgagttgagactgtgtttcacaggcatagggtatgagtgagtgggtctaccctccaacaaccacccccgatatgcccaagttgggaatatcagtcacgtgcaatttaaagataagataaaacggtaatgttacctaagcttcagccgataacggcacggatctccttcggctatctacgggaaactggaacgacggccgagattgtccggaaattcccgaaagtggccggggcaggatgtccgagcgaagactccatcggtcggtcgactctcaacattaaaagaatgaacggacgaaagtttggagggaagcccatggggaaggatggagagctcgtgtggacagatcgatggtcatttagttctcagctacttgttttatcttttaaaaagtacgaccacgaaaagaagagcatctcttgaggtttaggtgcatgtgttttaaagactcctgcttaatcccttatacatcatcatcatcatcatcatcannnnnnnnnntcatcgtctatctattcttacctccaaattgcctgggtttacatccctttctcttcttctatagaccaacgcccacagagaacaattttgcaagagggtattcctctcatcaacccaaaatctatccgtcggccatgccttcgctcgctcatgtccttaacgccttcacgtcagtagccgatcagttttcttactcactccaccagagaagacagaggccagaatttttactcgtgaccaccaagatcacgagtctcattatgaagccgattgaacgagtttagtgatattctatcatagctaacgacgtctcgaagttttcgatgcatcattacaccagatcccaaccgtcctcatctgcgaaaaagcgcgagtaagtccgaatatgtctgcccgatcctcaaactgtttcatgttctgatcatcgatatgtcctcgatccttactctgtgtagatacaagtttttcgatgtccctcctctgggcacgggaggctttgctgttgtcaagctagcccactggaagaagcatggattggaagtcgctgtcaaggtggtcgataaacgagtggtcgaggataaggaaaagtatctccggatcttgatagtgtaagtcctcagtattcctttcgtggtttgatggcttgtgcctgaacagatcggacaactcggctgatcactctttctttcgaataatagaggatggggacaagccttggaccaacggcatgaacatatctgccccttattagagtcagcctcacctctttcgacttctcagtgtctttcctttacctttcgtcaagagttggactagcaacatataacgaccgaacttatatatatttctccagttggttcgagacatcacatcattattacctgacattccccgcactggagggcggcgagctcctcgacaagatccttgacaaacgtcggttcaacgaagaagaaagtcgacgggcgatgttggtcatcctagtcagttcataccatttccttttcttcgatctttcttctcttggtgatttctaacatgtgttctgttcgccctctctggtctctatcaactcaatgattacaggatacgttgagctatatccatcgccaggttcgccaatcttgcaaacatggcgcgcatcatacaatttataaggggcgcgtgaacccagcgcgtggcgcgtctttctcttttgcgagtatctgattggtcaactttttttccgttttcatcttgtctcagggtgtcatccaccgggatatcaaagcagaaaatttcttgtacaagtcaagagatagccagatcgatgactttcaattgatcgattttggaatctccaaggtgagtttgctccgttcctgatgggctatagagatcagaaatgactgcaaataaagcaagcgcgggacgaaaaggagatgaaattgtgatagtatctgaataactatctggtgtatttcttgtccgggccttccattttcttctagatcttagacgacaagacgaataacgatccgaagatccaaacagaagtctctggcacgcctggtaaagctctttcatatccgtgtccataccgcctgaatgcgtgctgaacggatgagttgtctctcttgcctcttttttaatcaggttacgctggtgagatctatttggttcaaagaaagagaatgtttcgtatgtagtgctactgttgagacgatcctttatcatttttccgctctagccccagaggtttttttgagatcaggtaagcatcttaaccgtttgattgatttcaaatgaactctagagccgaagctgaagtcttgcattttggccctgtaggatatgggaagaatgccgacgtgttttcggcaggagttgtcttgtatgccatgtaagtttcaactctttctggaatctttttcggacatcttctaatttgtgatagtccaacctttcaagtaattctgcgctgatgcctaaaggcgaatactcttctttcctccaccatcatcatcatcatcatcgatgtcgtcgtcggtatgatcatctttcttgaacgaaccgaaaactctcaaacaggctaagtggatcaacaccatgggattcaaaagacccatgggacttgttgaaagagacaacgcaaatgaagcatgttagttttcaaaacaggcgctttgacggtgtttcccaggctggtgagtttgtattttctttctttcttgcttgttttctctttatttctggttttggttcaacaggctgatgtgtacgaatgatggtcaaccttggtggggacaattcgggattttagcgaaagacttcgttacgttgtgcatggaaccaaaccctcataagcgaccttctgcagcagaagctctcaaacatcatgtccgtgatcatttttattatttatatctgacccgctcttaaaactagctttctaaatcattgatgtttctctctgtttcttcctatcatgcggaatgttttatctttccttgaccatacacatacagtggattcaaacgcccgtcctaccatcctctactcctccgtctagaccaccctcgcctggaccgaacccaggtccatatgcccatcctccggaccctgaccatccgatccaaatcctgaagagacaggagacattaaaaattttacctaatggcgctcagtcggagttgagtagacgattgaccagagaacctgtaaactaatcttctcgtctttctgtttgcgcgcatctttttctttactcgccgatttcctctatttcgtccatagctgtcataaataaaaatgtattctcaccttactcttatttcttatcgtttctcatccttggttcacctctttttcgtcaacgagaaatccagctttttcttctatctgtttatgctcctctcctttatgtgcgcgtattgagtttaatttcctcttgatcaagtcttatacgtcctcatctatcacacaatagagagagaagggcaggcaaagctgatctgctgggaattcaagacttaagagggggctcagccaaacatgaatcgaacggtcccttcattcctacccaacatcatccctgtttcctcttcattccgccttctctcctcctcaactcctattggctggtttccgtcggatgagtctgtcggatttatttttggatgggtcgatcgcatcgataaccttgttatagaacccccctcactcctactctcgcctgcatgttgggagtctctctctgaagcgcgtaacctgagggaaactttaacggagataaatgtattggaagaagtcacttccggatcgatgttgagtaatgtaggcgggtaaaaagttgaggacggcgagatggccgttgtcgtcgtcgatgttgttgtatttgtcgatgatggggaaggtgaatgtgaggaaagtgtcaagctcggacgaggtggaacatcggataatgtttcgataaacagatcgagcaggatgtgcacgatctcctccaagtctccaattcgacagaggaacctatcctcccacgttccccttgatcctagcatttctactaaagctgtacaactcgctcgttcgcgttcgaactcaaatccgtcttcgactgttggtttatcagctggatcggtaggtcgagtagctagcaagcaggctagataaatcgatgcaagcgctatctgatgtggtgggtacatcaatggaagtagtgttcgatggctatgaccattgggtcggcagaaggcatggttcatttgagaagaccaggagtgtcagccaggcggatggaaaacttgaagcttgattggaggtcaagaaacgaacctatcaacagctatacgccaagctgcttggattaatagtttgctcgctacgaaacaggttgggaaactccagatgtcagccagatttgctgcatttcgcattttcatgaaagagtggcagattgctatcgttcctctgttcaaccaatagaaactatacggacctcccaagactttgccaaactttatcacgaaggtaaaaggggtctgaaccctgaaattgaaacagaccgtctccagaacaagtcgttcgatagacagtaattttgtgcgatccgcttctagcatctgtagagcccaacgcgtgcgtgaatcagttggttcgaggttaattcgaggaacaagtcaaaaggatgggaggaaagaagaggggcacagacaccgacaagggataagatgatagaattgaaaacggaaggagaggactcactgtcgggtcgatatcgctctcgctcaccatacccatcccagctcctcccttttttccttttcctttgcttataagtagctctggatatcgaactgcataagatgctaggatgatatctcgaggtttcttcagtgtgtcatgaagcttgcaagatacatagagtaccgacacgatcacatcctaaaccatatgatgagtgttcaagcccaaggtcagcggtgagcaggtcagacagagagcaaaaggagagaacacatagcaacggggagtatatagagggacacacattgaagttgaagtctttaaaggggaaaaataggtgaaatcgatggtataaactctgggcagtagagattgttcttcggggactgcaggcgatagacaaacataaaagacaagacggtggttggtcaaaactcgggccagacctgcttgagtacaaggatactatcgtccccatcccaagctcttccagttcaaacttcgggatagagaaagcaagacgtacaagccaaggtttgcccctacgctttctgcatatgcgcaagccaacgctcgctgtctgctctcctgcttcaagctatacggacccctctgtttagcccggagtgtctcgacttcttccggatcaaagtaatggcggtgtcgcttgacaacagcctgactcggattgcctgtcgatgcagaggatatagatgacctaggaggaaacatcggaagctctgctgagtctgtataatggatatgctgatccttgacgagttctctcaaagatcttgggcggccgtttggattggtggttagggttacgcatggctaaacacgctacgtatgatactaaccgtgctccactcttcactccacttcctcctccactctgagacactgccgtcataaatttccattcattagtgacttgcggggatcatataagatggatagtctaacccatgattagcttcctatctttcctgctgccttattaatcatccgtaaataccgcccggaaactctaacctaacatgccttccttgcccaagacttatcgagccgtagttcagaggaagaaggatgaaccatactcaatcgaggatgttgagttgaagctgccagaggaagggcagattcttgttaaggtccttgccaggtcggtgaaactttcttctttattctctcgtgttcagtatattgtatatcattctcataactcgttttgcttctgaagtggtgtgtgccactcggactctatcgtcaagcacgagatcatgccagtgcttcctcgagttcccggacatgagatctgtggtgacgtcgtggccgttccagacggagagaaggactttaaagtaggagatcgtgtaggaggcggctggcatggaggtaaacgtttttttgacatctatccgtccaggattttccagctgacgtcatgttgtccggtgcgtaatctcaggacactgcttcatgtgctcctcctgccgatcgggagactttgtcacttgccagaaccaggccatcaatggaactactatggatggcgggcgtgagtgctaggtactacatgccttttttgtaatatcatcatatctctgattctttttctgtctctttcttttattgaaaccgatgatctagatgccgaatatgtcctcttgagacgagaggccatcgtcaatattccaacagacatcgaccctgcagaggctgctccgttgctctgtgcaggagtaactgtcttcaactctatgagaaaccagaacgctggccccggcgatctggttgccatccaagggatcggaggtgagcccttcatgcttttccgatgtctcgacctatgaacatggtcgtgattaacacccgatcaacatcaatttaaaggactcggacatttggccattcagtttgcatcaaagctgggcttccgagtcgccgcactttcttcatctgacaagaagaaagatttggctcacaagctaggggcgcaggaatacgttgacggaagcaagggcccccaggacaaggctctgtgtatgttgaatcttggactgcgtcttggtttcattctacgcgttaaaactcgtgagctcatgttgaatgtttcggattcgaaacagcggatctcggaggagccaagatgatcgtctgtacggcgcctagcccagatgtcgtcaaagaactcgtcaacggtctcgccgtggacggaacgttattggtgctggctcgttagtgtctcttttcctcgaatgtcaaaccttgcgcttgttcttactcagacaacactcatcgacgctgctcatatctatgccatctctttcgcgacatcagcggtgaatgagctttcgattccgatgatgcctgtcattcaaaagaggttacgagtccaaggctggccttccggtaccgcgaagcactccgaggagtgtatcttgttctctcaacatcaggggattaagaccatgatcgagaagtttcctcttgaacgggccgacgaggcttatgagaacatgacgagtggcaagactcgattcagagcggtgctcattcccgggttgaaaaatgcctgagcctgccggatgagagtttacggtgtatgaagattctactttctcccttccttatcttctgatctttgtctatgcctgtgtctgtattctatgtctgttttgtttttttttgttttttttttgtgaaactggcaaaatcaagtcaaactatgtttgctatctgccactttagtgcgttgtccctgtgactcaagatcggcaaacatgtagaaagcgagtttgattgtcaagatacaaaagaagaggagtgagatgtgggagtgggtgatggtagaggagaggataggagtgtaaagagaaccagaagaaggattcagagacaccaattggcccaaatcgactgatcatttcacctctcctccacttttttttttttnnnnnnnnnngaaagaaaataaaaatccgtttcggttcgttcaggccttttctcacggctttttatccgttggaggaggtgttgttgatgaagtaccgtctgctgcagaccaagacgtagtcgacgccgaagcatcaccatccaccggggcttctgaagacgaaggtgtctcaccatccgccaactgagcccacaacgcgtgttctgattctattctctccaacgctctgaacactttcgactggaggtagtgggaatgaagggtctgaatgttcttggcggctgcacgctttgctttggccgtcgccggagtagataccggcggaggtgcgtccggatcgggtttgggaggtgagttggcggcaaagaggtgttcgtagttctaggatgcagacggattcaagaggaatacacatgcagaagaaagagaggagtcagacctgaagatgaacgacctggagagaaaggaagcaaggagataggtaaaggccggaagatcagccgaaaactcacggctttgattttatccagactgtcctcatctttgacgttcaagatcaattgagcttccgacaaggtcatctttaatgaacgcgtcagaccagcggtcgtcgtagagttagtgtttccgtccttgtcgaccgcactcgctccttcttctccggtcgcggcctcggcaggcttgtactgggtatctgaacgaaagagcaaagaaaatttaagaggcaatcgagagagagagagcaccaaaatacagaatggaacgttgagccgggttaaaacgaagcagaacccaagacgatatgggcaggaagagaaagaagcatacgaggagaaggacgaactcttgtaggcttgtcgaccggcttcgtagaaagctcggccaagaactttggtacccgaaaggaccacctgagtgacgatcttgggaaggttggactggagagggaagagccgaatagaagtgcaaagcgtttaggaccatccagagaatgcggagtaaaaagaaaagaagaaaaaaggaagcaaacgaaaggagagcggtgcgaggacgaaagaaaagagggtgtgtgtgtgtgtgctcggaacggttatctcattgactgaccatgatatgttggagttcaactgtggggtcgatagactcagaaagatgttggctgccagctaagaactagtgatctcgaggaaagacttgtgtggttgtgtatggtgtcgtgtgtatgagtggactgttgagggcgagtggtgagtggattgtggaaaaggggatgctgggatgaacagactagggaaagcgactggagaggtgtagccgagaggcctggaagaaagactggaagaaaggaatagggaaaaggaaagagactatagagagtgattaggaagagtagataggaagagtagctagggagagtagataggaaaagagactaggaaaagagactaggaaaagagactagaagaaaaactagaaaaaaaaacaaaaaaaacaatatcaagttgcaatttggaatacaaaaagaaaagactagaaaaatttgatgtacaatcgtaatggagggactgttgaaaaacgccggacgagactacaaacacagacactacaaaaagatactagaaactcctgtattcaatagatcgacgtggaaccgaaagaaacatcacacagtcctcgatccaccttcttttactcgttcttcttcttttccgtgttgctccttcttttcttgcttctccttctcctttttcttcctctttctgttctctctcccatctctctatcgtcacacgcacacttcaatcctcgagcccttcttttccttcgtccttgtcggaaaagaatcatcagggataccaacatcatcctgaccgaaacaccatatacgataataatcaaacccactcttttttcaccacagccctactgtctcgactttatcgatccctccatctctgagaggagacaatgaagatcagaagaggtccgaagaaggtggtgcctcctgtaagtcccaacggattcgtcgtttctttcttgctttccaatcagacgttcatcccaatcggacacttggcctttgcgtttgtctcgttgctgatgcttcgcgttcctcttgtaccatggccacaaacgccgacaccatactcggacttgcatctcttttcttcatttgttcctgtcgttcgacatctttccccttgttccaaattcatctctctccagcatcctgagatcgccaccctcatcaacaccatccttgctacagcagacaaagaccttccctcccttctttcctctgtggtcgagtggcaatggccccggggcgacctccatacgtggatcaaggttctcaacaagtttgatggcattctcgaaagcgttattgacgaatatgcgctcaagaccattcaaaccgtcgagttcagtcctcagaccaaggagctcgtcatgtctattctcagattccagaagatgctgctcgagaggtgtaccaatcggaagatgtatgcttcgtatgaggtaagtgttcgactgatgacggacagagcttttcaccttcctccccctttcggtttcttcaacacaaagaaaccaccaagtgactctgctcacctcgtttgtatctctctttcgtctttcttgtgcctttcgcgtcttgatagcgtctcggagatctcttgttctgccaagatctggacgttgttactcagacgctccgcctagttcaccggcctgctcagcaatattccttctcttcccatatcgccgaacttgctccgacatcggtcatcgtcaaacgtgttctcgcactctcccatggctggggcccttctcgtgaagccggttactccctttctaagcttgcgagcacgaatgaggatacttccgagatttccccagagccggccgacatcaccttccagttctatcgaaggcagacacacgaagagacgtcgcggccggttcctgctgtccccgaatccacctctgggatggtcacccccacagctgccaccccctccacagctggacccgcctctgccttcgcctctacagggccttcgacgtcgtcgagtttccaaccaccagccactttcggtcattccttgtccaacgtgggcgttccttcgacccctgccaatcagaccaatacattccagacgcccgctcgacctaaacctaaagcagtgtccgatctgaaggacgcactcaagacgccttcggcctcgccgacgactcagaacaccagtgtacccggttgtgtcaccacgcccgagggcctcacgaccatcaatcttggcagtgttgccagtcttttggcagagggaaagacaccaatgaccgtgttggccgaggcggttgagacgtacgacgtaccagaagtggaaagattcgaactcttgaatgttatcaaaatcgctatgggattgggtaacaaagatgtccgaagaaatttggtggagatcagatgtttggctatcgctgtctactgtatgttcttctctaaacaactgtttctctatcctgcgagtcccgctttcgatcgatacgaatatcaatatttgtttttctttccctcctttgaaaccacgataggttgccttgtgccggaaaacattgctcaaacggatttgttcttatatgaacctgacctcgtggcacatatcgccgagctcatccgggttgatgcaggaatcccatctcaaattcagagcgcggccgtcccggctctggacgcgatgtgcagataccgtcatcgaatctcagaagtcataagcgcgatgaacgctagtgcaaaccatggagtgctgatgagtctattcagatccatggtagccaagcttggagaagaatcaggtatgtgctattttcaaaggatctgaccacacagatgtaagctgatcaggctcgtgtttttacataccttgttgccttcttcagacgatccgccgttcgatcttgtcgattctttggtctcaatgctcacgttccttgtgagcactccaagttatagcaacatgatcgtcggcgctggattagtcccgatgctggtccaacttgttcagaacaacctcctctcgagggcacccgtaagtgtctacatctgcactgtctttgagttgcgataacttttggaacctaaaatgttggtttcgattttctgcttactcatttgaccaaaaattacaggccgtaacaaaagctatcaacctgatcgaccacgttatctattcgaactcgaacggtttcaccctcttccacaacgctggaggacttgatgctctcatcaacaagatcaaagtaaatacctattctcgtatttcttaaactagatgtacaaccattcaccgtttggctctcatttcgtcctccattttgtcagcttttggtcgaccaagcggttgaggctcacaacaaatcgatggacctgtccgataaagatctcgacaactcgtatggtgagtcggttgaaactcttcgttaaagtcttgagaggattggcctctaacgataaaatcaaatccctctcgtatcggattggtgttgtgacggtgcaaaacaggcctcctgccattcagacggttctctgcactcagagcagtggttcgatccatgaaccggattatgcaaagtacaggtacttcagaagggctgcgaaatcttattgattcttcgctgccaaagacgctcaaaacaataatcgagcatcgacgaatctttgggccttctttgttgtccctcgctcttggatcggttgccacctttgtacacaatgagccgacatcacttagtgtgctgcaggaactcaagatcccagaggccttctacagctgtgtagaggaagatatcgaggcttctgctgaagtcctcttttctatcccaaatgtgatcggcgctctgtgtttgaaccaggccggtctcgaccagttgaccgcccggccagagattctcccaaagttgatcaacaccatcatttctgaacgacacctcaaaacgctccaggaaaaggaaaacgcctctcaactaggtgcctacgtagacgaactcgttcgacatcatcccactctcaaggatccgcttcggaacgccgttattggggtgatcaaaaagattcaggagcttgggcaagaggaaaagactgacgaagaaacggtgtaccacatcattccggtggacaaatctactgagaccacgccccgaaccgatccttcgcccccgtccactgctgccactggttctggagccgatgtcccgatctctgctaccgtccctgatgtaacaaccgccaacgcgccctccacttctgctgtagtttcaacatcttctccttctggtactccacaagcagcatcgggtagtctggattctcccaattggggcaaaaaggagggagagccgtatactgataacttggttgtacagttcatcggatcaactgctagggtgagtctcttctgcattcgtcgcacctgggtgatctatgactaacgtcatgacttcttcggttgcgtccccatctgtattctacagttcctagaagggctattcaacaaccacacccactgcaaagacttcatcaaggccgatgggctttctctcttgcttgacctatacgctatgccgtgcatcccttacgactttgcaggttctcaggcggccgattctctctttgcccttttcagagcaatgagtgaggttaacccgaacgctgtactgagcgccctcttaaaaccagtacgaacctcgttggatcagactgccgagttttggagcactttagaatcaacgtccaagctctcaggattgactgatcttcctggtaaattcatgagagatcttctatttctttgcttatccacaggtgatttataaactgaattgtcttcaaatttcttctgcagctggtcctgagctcgacaaagcaaacgataccttccgaaagctagtctgtctccatggtcgaatcgctcttcttgcggacatgtaccgtggagtaggattcggtcacgccaaggtagccactggtttccttcaaatccttactggcccggaagaagccactaccttcatggacctcggaaagttacatcgagcctgtctgtgggagaacatcttgatcaaggctaccattccagaggctgttgttgctgtcaatccctcccaccaaggcggaggcgggaacgatgtcgctagaggtcaaacagctaccgtcgctggcgtaccaagagatgtgttggatgacattagtagtatgaccgaaggaaagaaggttgctgatctgtttgccgcgccgggaagcaaaagaatcagaaacgggaaagcattcaagtatctcgtcagccagctgccagcttcgttgaccaatttcaatcaaggtaagttgctgtcactcgtctgcctgatcccgttcaaaggatctcgcctctgggccttcgttcttcttcctttaatcatcagccagtttctaattcaacatcttctttatagccatcctcaaattcttggtgttcaaaagaggaaacgatgctgctcaccgcaaacaggccctcaagacgtcaaagatggtcgctcagatcatgtacgaccacatgcagtgggcgttgaatagtaagttgtcatcaggagactctacgtggttgtttacaaagaggtcaaactcaagtccatgggtttggccctggtcgtctgtctctttcttcatcatatcagccgatgagagtatcgatcgaacatgcctctatgcatatgggacgcttatgatcggattctgcacggtcatcttgttcgacggttagtatttgcgctcatcttcttattgacgagggtatttacgcatcgtttacttatactttgacattcaaaaatcgtttcgttcggttctcagagcgaccgataactcagggtagccttcaggttatgcttttgtcagctctcgaatatctcggtggtctccacagcataatccaaattggtcaacgatatagtgacgcatttggaaagatcgagcccggaactgagctcgctagcttgaataacgtccatgtatttagcggcttgaaggttactttgcgactgcttcaaatcctttctggctcaaaagcgctgttcgagtcttctcagacgaacgcgttggccacccgggacaaggcagccacgttggaagatgatttcgacccttactgtttcctcgtccgaataaggttgacaatcttaccgttcatccgtgacatctggcaatccgactggattctctcttcttcaacccccgtcactgtcagccggcctgtggtcgatacgcttctgaaaatcatggctgctgacgccgaggtgaaaccagaggcgcccacacttcccgccagtctgggtctaccttcaatcagcactttgcttcaacagaacagaccgccgccaccttcaaatttgattcagcaactggttgacatgggattttcaacacatgcatccaccatggctctcactaggtacaacaacaatacgacgctcgccgccaactttttgttaacgaacgcgggcgcgtttgccgagccggcggcaccggtcactcctgctgccaccgctgaaggcgccgatgctggtacggctgtgtctacgaccgctgaatctggttcttcttcttcagctactccggcagaatccttgacaggcaccgctcctgctgtttctactgtcaacggcgacgatatcgaaatgccggaagttgctgaaggaagcttcactgaaaagaaggaatcgcttccatctcgttgggaggataaacgaccagaactaaatgaaatgagggatactatccggcccgatttaggtaaccgggcacttcaacttgccgatcaacacgatatccttgctgccgatatcaagagtgctttcggaagttcgatcgaggtcgttgaaggtttgcttgaagagactcggtctatccttcccgatgcccactcggcaaactcatcgaagatgctcgtccgacttcggttgttgtcttctgttattcttgaaggatccttacctctgcttgagcacccaaagttgttggaaagcatgatgggcatcgttaccgacttggcaacgaccggctcatcttcaaccaaccaggtcggagccagtattgaagacagtcatccaaaatggctcgttcctcaattgcatatcgccgagggtcttttcatccttggggagacgattgctcatgtagagactcttcctgatgatgttgacgcaaagagtacagccgataactcactgttcaaagggccgttattcacttcttctcgaaagatcttcttcgaccgatgtatcgagcttctcccaaatgagtctctctctaaagatgaattcaaaaatgttctccgactgctggtattcctcactagagaccattcgctcgccgtcgagtttgctaaacgaggcgctgtatggacgatggtccagcaattcaagtccactaaacgggttctcactggtgcccagacattcatcgccatccttcttcgacatgtgatcgaacgacctgaagcgttacttgcgctcatgcaacaggatctcaagacttggttttctcaaccgagatcgaaggtggttgacgtagcccactttgtgaaaaacaacaagcagatcgcccttcgaaatccagaaatgttccttaaagctgtcggagaagggtgctcgctaatcgagtcttcctctgggatttatcacattagcatgaaacaacaaaaccctgagttgacctcttccgatccttctgcttccaccacggagactgctgcaccagcgcagtcgacagccatgtctgcagatccttttgaggccaacaaggaagaaagctcatcgaagatgcaagtcgacgcgaacttgccattgtttggatctgattttgagcctggatttgacgttgtcgaggccatcgttcatcatttgttaagtgaacttatgtccatcggaaagaacgctttggttgtccctaccgtcttggtcaacactcccccgactacaccatctacgaaatcaactgctgagcttccaacattgggtgctacggagaagacgacagagcctgctgggtctggtgcaacaacatcgccgtcttcaaacatctcgccagaactgtcagagtatgcgtatgcatgtttgctgatgcagaacttgactgaactgtttggatcttatatgagctgcaagaccgcgtaagtttccatttgtgttttcttcatgattagtatcctttccaaacaaataatccgtctaacatgtctttcgtaaatcttccgtcattctagcttccttaccaccgtgaggaagagcaactgtaaagacaactttgccaacgttgagcaacctcgattggctcttttgaacttcctcattcacgacctagtctgtttctccggtttggccgatcaagttcctcctgtcaaagcaagtcttaagaaatccttcaacctttcgaactgcgccatgtctgtcattgtcgctctttgctccgacgtaggaccagaagtcgatatcaaaggcgtgcaccctcatctgactaatgttcggaaagtcatgcttgagacgatctcgaaagccatcaaagaggcaacgtcatcgaccgacaacgtcgatatgcgatatggtcggcttcgtttgctcagcgagctatgcaacaggttgttgacctcccgaccaaacatcattccaaagggtcaggaggacggaactttgcacatcgcgaagatcatgttggagaagaactttgcggttgtattgacgaatgcattagcagagatcgacttgaactaccctgatgtaaaactcgtggtgaccgatattctcaagcctctagaacacttgtacggattctcttcttcgcctttttgttcaatctccttgattactaaacgtttccactcttcgtctttttcgtgcgcataggaccaaaatttcaatcaagatgggtcgagcctccgataagaaaaagaatgcttcgtctaaattgcaagacgtattggaggaggcatcctctgcgtcttcgttgatggatgaagacgacgaagacgacgttgatgaagatgatagtgacgcgccttctgaaggtacagaagagacacctgacatctaccgcaactccgctctaggaatgtaagccgaatgtctatctgcccttttgaggtggagagcgatatccataatctatactaaacaatgcttcttcttattcctgttttaggtacggaggtgagatggaggatgtatacgatgaggattctggggatgaggatgaagaagatatggagggttacgacgagatggacgggatgagtgaagctcctaccgactcgggaactgagaccggttcgtctgaaggcgacgagtcggctatggaagatgagctcatcgctgctgaaggtgattgggatgtggaagatgatgatgatgaagatgaagacgatgacggagaagacgaggaggattcctctgaggatgaggaagaagagatgctttacgatgtaagtcttttttggtttcgtactcgttgttaaccaacataagcttgattcactaatttcttttcttaacttcactcttagcctgacgttatggacggaggtgccatcgaggggattgatatcgaagagatggatgaaatggatggtggtaagtctttcgtattttgcataacaatcttgaacgtaacactaacgacaaaggtttctcgatcaacacaggtatccccatcatggatgaagacgatgaagacgaagacgggcatcctgatgacgatgaagaagaaatgtatgtctttttatttcattcctgacttgtaacctcatgtaccagagatttctaaattttgcgtctccatgccacatcagctatgacgaggacgatgatcttggattagaagtccagtatgaccttgctcctgagtccgataaccggatttccaattggggatggaatcaagctgtcggtgggggtagcatcgcctcggcttctgcaacaaccgcccctcgccggcgttacatgcgttcgttctcctttttcctgctatctcatacatataaatctgacattggcttctgctctttcacacacatagtcgatggggatcccttccttggccggaacatggccacagcgaatccagtcatcggtctttctccggctatgccggcgttcccttctgccatggatggagctgtacccgtaactggaggaggcataggcttcaatgctagtgcttctggacctgtgcatgacatcattcagacaatcgagggattaattggaggaggcggagctgctgctcgcatactcgaacagttggtttctggaggacgagccgtaggcggaggagagcttcgagtggacgttgctactggtcccaatactggccatatgctcggagggtttgacatcagcagtgacggtgtcgttattcagagagcatctccagcttcagtggaaccccagccgatcgaatctagatctccggatccatactcttcaatctctgacttccttcctctagccacttcccaacgatggcttgacgaggaacgcctcactcaaggccgattcgcctcccaacgagttgcggatctcacaaaccatgtcatcaacttgcttcttcctgacgcccgtgcagccgcgaagaaagccaaggaagaggctcaagagaaagagtcatccgagactacggtcgaacgtccttcgaacgaaagcgaaaccgatccgtttactgatagaatcaatcttaatgtggcgcgtctgagagcattggtcaacgctcgccaggatcatcaagaaccgtcagctgctgctgaacaatcctctgcacgtgctgatgtggagatgagtgaaaggagtgaagctgctgataccattcagggtaagaacctctcttaaaacatcttccgagtgccagtttgtattgacacccattcatgtttcttctatcagtctctgcttctgagtccgaggaacctccctcttcgagttctgcccctacagagacaacaccctccacaactcttgtcaacgacgaggttgtttccagcgaggatcatactcaacctcccagtacagagacagcacgggaggagacttcttctgcaccttcagaacgagtcgtcattaccattcatggccaggaagtcgacattaccgataccggtattgatttgactttcctcgaggccctacctgatgatatgagggaggaagtcgtcaaccaacatttccgtgagcgacggcctgctgctcgaatgaccgccagtgcacccaccgagatcaataccgagttcttggaggctcttcctccagacatccgagcggaggtccttcagcaagaagccgtcgaacagtcccgaagggatcgagaagccgctgctcgtgctgctgccgctgcgtcgggagttcgcccagctcagcctgccgatattgaccctgctagcttcttggctagcttggatccacagctgagaaacgttgtgcttctcgagcaggacgatggattccttcagtctttaccaggcgagatgcttgcaggtcttgaagtctaccgaggtgaggatgaaggggaagaagaggaagaggaggaagaacgacctcgacatcgtcggtttgacggtgctggcctgattggtgcccggactggagcacctgcttcttctgctactgctactaagaagcctcctcgagatgccatccaacttcttgataagtctggaattgcttctttagtgcgccttctattcttcccggaggtttcaagaaaaactatcgtccctcgggttcttgttaacctttgtgagaattcgaagactcgagccgagcttttgaatttactccttactgtggttcaggaaggaactggcgatctatttgctgtcgacaagagtttctctcagatgaccctccgagcaggtaaagcggtcagcactccaaaggctacccctagaaagaaaggtgttccggatacacctggtccggccaatcttttctctcacctttctgccgaaagcgtgccaaccttcatagcacagcgatgctttgaggctctttctcagatcgtcgtcagcatcgagcgagcttccctatttttcctcacggagcatgatgtgctggttggcttgaagcgggctacagtgaagaagggcaaaggtaaagaaaaagagaagcaattccctcagaccaagtatccattggtcatccttcttggtctcctcgatcgaccgacacttcttaggaattctagtatgatggactctcttacggctcttctcgtcacgatcacccgtcctctgactacgctaccctcgccgacgtctcgagctgagggtttccaggatgggttctccggactgagtgcttctgtgggctctattgtttcttctattgctgtcccggctgctgttccttcgatcgcgagtactgctcctactgcgcctaatgttcctactactcctgcagctactgcaactggttcttctactgaaaacggtgcttctgagatgccggcttccgctcctgaggatcctgtcctttctcggccacctcaagttccgaataatgttcttcgcttagttgtgaatgtcctgactgtgggagattgctcttccaacactttcaagtctgctttgactctcatccatcacttgtcattcatccccgatgccaaggacgtcattacagccgagcttcgttctcaagctcaagagtttggaaatattctgcaggtggatcttaacgacctggctgatgccctcaatgccgaaggcgaggcccaccgggctgcaactatcgcaaaattcaccccagcatcttcttcgcaagccaaattgctccgggttctcaaaactttggaacatgtattcactaccaagcccccagcagcttcgtcgactggtcagtatcttgctttcttcatattcgtacattcagccttggtcgtctggtttaaaatcttctaaactctcttttcgttctatttatgatacagttcctcccaacactgctcctgaatcaacttcggcatcagtctctgcctcacaggtcaaccggggaggtttgacattgtccttccgatctccaaactcatcgtctaccgacgcttccaatgctgaagttttgccagctagcaaacctgcgactgatgaggagcaggtccgagcgatctacaacagtttctcctttgcttctctgtggcagaaattaagcaattgcctagcaatcgttgaggagaagccagaactggttgacgtagcgactgtgctcctccccgtggtcgagtcgctcatggttgtctgcaaatatgctggtcaaaaaccgaatggcgagagggctgccacaggtcctctgtccccccgatctccctccgataccgccgactcagcttctgatgatgttttcttgaaattcactgatgctcatcgaaagatcctcaacgttatcgttcgaaacaacccagccttgatgagtggttcctttgctcttctggtggagaaccccaaggtccttgagttcgacaacaagcgaagttatttcactcaacagctcagaagacgccctcaccgagaccatggaggaacacttcaggtctccgttcgacgagatcatgtgtttgaagactctttcagcaagttccaaagatggagtgcggatcaaatcaagttcgggaagctgagctgtaaattctgggatgaggaaggtgtcgatgctggaggtgtggcacgtgaatggttctcgtacgtctgattttcttatacgtagaatcctgatccgtgactgatgggtttgatcctttttactccagtgtcttggccaagtctattttcaaccctgactttgcactggtacgtcgtacaactactggacgtctgttttgccggaaaggatatttaccatttattatcattactattattatgtacctctagtttgagccgtcatcgagtggcgccttgacctaccagttcaaccgattaagttcggtcaatcctgatcacttggctttcttccgctttgttggagttgtattgggttcgttcttccttcaagcgttcgtgttgagcagatggatactgactgaagttgtatattttggcaccacagccaaagccgttcaagatggcaggcttcttgatgctcacttcgtgagatctgtgtaccgacagctgttaggtgccaagaatatgggtctccaggtgagtcttcatgaagctcacgaaccgacgataatcacatatatactgaacgttattcatggttttgacataggacctcgaaattgttgatccatcctaccacaccagtctgaaatggatggccgagaatgtaagctttgatctacaattcattcaattcttgatacaatcctctgacccacctgactctttcatagtctatcgaagatattttggagctatcgttcgctgtcgagtcggatgctttcggagttcagcaggtgcacgatcttattcctgatggtcggaacgtccctgtcacagacgagtaaggaagttttttccagcttcttgtattaaagtttgccttctgaccatacttgtgacttggattcacagaaacaagatggattacattcagagaattgtcaacttccgcttggctgattccgtcaaggatcagagcaaagcgtttattgatgggttcacatcgtatgtggtcaagtcttgatgtcgtgacttctcacttattgcccatcgactgataccttgatctgttcctcttgttatttatcaccagtatcattcctcaatctctactacaaatatacgatgctggagaactcgagcttctcatctctggtctacctacgattgatgtagatgagttgaagaactctgttcagttgcataactggcgaaatagcgatgcgtatgtcctctatcaagtcagagtactttcttggagatgatactgactatgattatttctgccataaaaaagtgagattcagtggctatggcgagccatccgatccttctcgcaggctgagagggcatcattccttcaattcacaaccggtagtgctaggtgagtggtcgatgtgctctgattcttgcgtatgtccaccagggctcatcgtgtcttttttttagagtcccgcttggtggcttctcccagctggtcggttcgaacggcgttcaacccgttcaagttcatagagctcatggcgatcctgatcgtatccctacatctcgtgtgtatgcttcttatctctgtggtatatgactgtatactgatcagttctgccctcttcatgatagatacctgtttcaatcagttagatttgggatcatactgtatgttgatactcccttcctcagaactctccatctgcacatggtagctgacaatcttctcattactactttgtataattagcttcgtatgatgcattgcgtgataagcttctccttgcaatcactgagggagctaccggttttggctgtatgtctcttttcacaccctccttcatctgaattaggtcttgatgctcatatgattttctgtttttatctttttcaaagtcgcttaaaccatatacttttctcgattcgtgtagcatattcactcaagcttctgctatatctgtacatcagatcactcagctcagttttgtgcaatattttcccaaaatattttttcttcaaatcaaatcatcgtgtatttctgtttgttcacaatttctatagaaaatatgtctgtttctcaataatgaccagtgaacgagacatgtgtacatacttggcaggacagattcgaatcggtcgtttgctagctgcttggctcacgtgttcgaccctatcgttcatggaagagaagatctctatcgttattcattacatcattaagtcgaagagagagcaggactgggtgtacgggtattgtcagttgatgcagggaagggagaagccgatcaaggattagacagtgctcgtctgagtatgattaagattagaagccaaaaagtatgtgagtcctcgtttgacacgctggcttgatggaacagtattttcaaggaggtgcgagcggaacttaccgactgagtagagctctgatgttccgcacaatatcccgtgtcaaatgagtttggaatttaagatggtgaacaaaggatcaaagaatatattcagagatcgctgactagcaaaaagatggacgaaatgaataagaaacataccctttaaatcctctgacgtctcctctgagacctccgatcaggctgatgacctctctctctcctggtcctaagcctccaccccatgccccaccactccccaccgcgccagctctttccagctggtttgagagactatacgatccgttcgacgatactcttgtactgatgtttttcatagcaaataaggacatgacgtaagagaggctggaactcggcaagaattcatagcgaaagaagcagaaaggaagatacttacgtcttggaattgaacagcaagctttgcgaaacaatcgaagcgccggctccttttatggctcttaataatccagtcggccgttcttttggtgccaacatgagcaacagtgcatacagatcgcctaagtcgtccattggaagtccaactggatctttctccacagaaagtcccagaacagagtccgctctgatcaaactagattcatcctttccacttgaagcttcgattgtcaaggtatctgatggtgcaatctcggtctcggcctccttgactgatgatactaatggttgagtaagtgaatctgctgccagtgaagcctcaatttcgttttgagatccttctatgagaagattatcggtcggtagagcgttcgagggagagtttcgtacgaatcccacgtccagatatctgttcaggctgatccggagagaatctaggtgagacacatgtttctggaggagaatgtcccttgcctcacgagacctaatcaggcgaggaagtatgattttctatggagacgtgtttgtcatttcagtagtagaactcaagtcagactgacgagctgattgataccagaattcggtagagagagatatgaacaaactgtgtagaggtaagcagcgattgcagacgatcccaagagcaaggataaaagaaaagtcacagtccggaggaacctaggcaaaggagacgatgcaaaccgagtgactggatagtcccttggaggaaggattggcaagggaacattcatagcagaggatgtcttgcgatggtggtcgatgtttggaggagagcaggtaaagcgaacccggctaaaggttcaagccggatgatctgatctcagccggttactacccgacttttttggccggtacacttcagccaagtttcattttcttttctccttcaactccatccgacactcttcgatcgatcagagggaagatgtcgaagctatgcctgctcggaggggctataaggaacttgtctccacactgcgcgtcagtttatagggtttcctcggttcaatcaacatgcttttcggttattcccttcagaactttcaacacatcaggcagacgggcattgtcaagttctgtagctctaagctcagcgatgatccagccgagtcaatataaacaacttatagatatcacacaagctaaagtggaattgagaaacaaactagcagccgaggttcgtgtctaatgctctatttctctcctcaaatctgtcctgttgagcgcgctgttcgactgaccacatctggtgagatacccttctcacttgagttcagctagaggcaacctcagaccaagcaactatcatcaaactttccaagaagataaagcagttggatcccgtgttcgacaagtggcaggaatatactcaattggcttccgtaagatctgtgtctctgcttagctctttgctcacggacttttagactaacaccctctctcatgtgtgtgtctacaaaggctttacaagaatctattcctttgctctctgatccggatccatcgcttcgtgaaatggccaaagatgaaattcagtcgctcgaagcttctcaaattgaactcatatctcagactcttcccacgcttctcctacctccagctgctagttcgtctttatcttgcatggtagagctcaaagctggacaaggtggagaagaagctttcttattcacctacgaagttgctcagatgtatatccggtacgctcaaaagatgggttggaagatcagtatgatcagtcagtcccagatatcggtcgaaggtggacaagggtatcgggattgtcaactagagatcacgggcgaaggcgcgtttggcaaattgaggtgggagagtggggttcatagggttcaaagggtaccggccaccgagagtaaaggtcggacacatacaagtacaattgcagtgatctgtttgccgatagaggaaaacccggcagaagatgacctttcttatgtcaacgagaaggaggtcaggacagacgtgttacgggcttcgggagctggtggtcaggtatgttctatcgttcactcacgcgtctttcgagactcatgctacggatgtgtctttactcatcttgaaatttcataacccttcccaaaatgtacccaaattttgagtagcatgtaaacactacagaatctgccgttcggctgacccatctaccgaccggcatcactgtcaacatgcaagatgggagatctcagcatcaagtcagttcgacttcttccctttctttgagtagatgattttttactaacattttgtttggtcaaatgatagaatcgagaaaaggcttggactattcttcgtgggagactgtacgctcatcgactggcgatcaagcaagaggaagaccgaaagactcgaagtgcgctaatcccggggatgagtcgatcggacaagatccgaacatataactttccccaagtttgtctccctttctctttctctttacagtcatagtcagttctatgctgatgtttgaagtgtcacatatgtacctcttaggaccgagtgacagatcaccgggtacccgtgacgatgaacaacgtcccactcattctctctggagaagattttgaagaactcagcagtacactgtctgactggtatcttggcaaaagactagaaggcctgctggttggtgaggagtttaacgccgatgattcatgagcatttctctcgattcaaatgtaatgctgtacgaaccattcccaattgggttgacaaatgcttggcagaaacatgcgttattatcattgagcagagaagtttccgttcggaattgaccgatggcctggccagtcttgaaagaatcaaatcggggtcaagtttcctatcatccatcacttcatttgacccagcatcatgagctcctacctgaatacttatactgttcccccaaatgtactgtactgtgtttctgtatctaacaaagtttgtattaaaactgacttcgtaacataccataatggcataataggagacgagagaggtagatcctcataaggacacgcccaaggaggcgtacgatttgaatttcatgtttcctgtgaaggagcttcggacagacaaagtgctcgtctgcccgttcattgtacgttaagtatttcgcggtttggcaattcaaaaagatgttgagcgggttgtagtctgatctgttctcatctttgtcgttcgctcagccatccttgcatgctcaattatatgtcgacggaaccaacgagctggatgccgaagctactttgtaagatcgagtatcatcttccataatgaaagatttagaagccggcgaaaacgaagacgaacgcacatcgcaactgaccatgaccatactgccattctttcctctgcacaacaaagccattatctttcgtggggtccgtttcctactgtttcgcccctgctcactttcttggagaacctccgaagcaaccctgtttgttcagcagccctctttgcttcacttgcgcttcctttgaacgctcatccgtattgatattcaattccattatcacttctcatcgactagactgctgtgcttttcgcgttgtttgatctgacccgaggtcccgagcctgtatttgcaggggtcatgaacttttacaatacttgtcgacgaaccctggtgagtttgctcttctctaccttgtcttactgtcctcgtcatccagactgatatcttgtctattgcatgattactgataaacggttcgatgcagtctctagaaatcggacatgtgattatcttacccaaagtgcgcactcatgatttgttttgaactggtctcatatttctgacactcgatcaatgttctttatcaatactcaagttccgaagaacccatgtgctttcccacgcgtccggtctcctcatcacttactgcatgtcagcccctcctgaaggactaggtctccgccgaatccagtggacggtatctcctccaaacctgccttctatgaatgccgccattcgaatgggcttcaagcctgaaggagtcatccgtaattgctgggagtttccattatggaaaggaggaaatgatgatgaggccatcaactcggccgagcgaagagctagagtggaggatggatggaaaatgcagagcttgtggtccgaaggagtcgagagaaaggacagagggatcgcgtcagactgttggcttgcgtccatcactactggagactgggagtatggcgatacgaaatcagtcgttgagcgtcagatgtctagatagcaacacgcatcttctcatggatagtagggtctgactaggatagatgatcttggttgggagacgaaaagactgccaggtattggtgctcatgatatatagcaaagtgaagcataggttgctgatttataatttttagattgaagagcgctcaattgacatacaggttgagatgtgaatagatacagggaaaaatcaagagaaaaatacggacaagacaccgtcatcgcttgtgtgtcatgtacgattgttagaaatatatggtgctgtcgtacatctgttgatgaagtaacgttgatctaccagcgatctaaacatgttgattaccatcgatgaagatgactctacatggtttggagatgactcggagtaaatttgggtataaagattagcccgtccatttgcttatcgatttatcaacttatcaattcaaccgacatcacattcaacatgagctcctatttgaacacatttgtgctcccttcgaatgtacattattacatcttcactggatcggtataggaaaaactgactgacctctgtctccatttgaggaattgtccatataacaggagaccagagaggtagatcctcacaaggacacgcccaaagaggcatacgatctaaactttatgttccctgtgaaggagcttcggacggacaaagtgctcgtctgcccgttgatagtatgtccgagttgtcctgttttgaaggccaaagaaacacacggatgacttgcttatactgacatcgacgtcactatttagccatctctccatgctcagctttacttcgacggaacaagagaaggagatgttgaagctactttgtaagcagttgtataatctgtgaaggagtcttgggggagtcacccgttgagagcgcatgccacaattgaccttggcttgaggaaacaaatcttatacggcacacagtcagagtctccgatggggcccattttcatctgtctcacaggtttacgccctcctggaagaatatcgacgtgatgcagttcgtaatatatgagagagacctcatctcactcaacaccctttatctacctgacgccattttgcttccttttttccatgctgatagagttcagtgatgttcgcgatttatgacttgaccagaggtccagaaccagagttcgcaggagtccttggcttcatgagagccgatagacgaacccttgtatgtgacacccaacgagctatttgtttgtgttttgaaagctaacggttttgctcctctgatgaattttgtaaatgataaaacaaaacagtcactagaaatcgggcatgtagtcacattatcaaaagtgcgcgccatgtctgacacaagcttcaccttcttgtcactcgatttatgtaactgatcggttcattcattttcgttttgtctatttcagtttcgaaggacccatgtcctttcccatgcgtgcggtcttgccatcgcatattgtctttcagctcctcctgagggtctaggtcttcgtcgggtacaatggactgccagtcctaggaatgtttcttcgcaaaaggccgccatccggatgggcttcaaatatgaaggaatcgttcgcggcttttacgatttgccaaatgggaaaaacggcaatgacgaccaagctctaaattccgttgaaaagaggagtcgaagggaaggactctggaaaatgcagagcttgtggtccgaaggagtcgagagaaaggacagagggatcgcgtcagactgttggcttgcgtccatcactactggagactgggagtatggcgatacgaaatcagtcgttgagcgtcagatgataagagaaacgtaattttagactctgtagattgttgtcctgaaagaagttttccgggttgcctccatctagaaaggtttttatcacatgcgtgatcgatggactacacaattgtcagatcacgacaaacaactgaacatcaagatcaaacgaagggtatacaagtttccaaaaattccaagagactacagcgacatgaagagaaacacagtcaagactgaaaagataaagagtgtagtggcaaggaaaagatattctatcttcgtctgcgaactcgggagaggtcttgagtgaatttggcggtttctctacgcatccgtctggaagattggaaaacattgagaatgaggaacagttagcttttttttccttgagagaacggaaacttcaaaaaatgcaaaggtagagctaaccgaatagctctctctctttcaaattcttttctctcaatctcctccaaggagacctccgataaaatcggttggaactcctctgcctcatcccaacctctccaggcgccctttaatcccttaggtcctccatttggtccgaacccaccaaggatcgtcccacctcccaaaccacctctggctctctcccgatctttcgcgtgtagactccatccagggcctaggaagccccattcgaggcaatcttttttatgacgaagaagttcctcgtgtattgcgtgggaaatcaaagggatagattcatgaggaaggccaagatcagacacaagtgtttgagcgaagtgttcaggagtcagggtagaggaaaggtcccattcgattcgatcccggagtgtcaaggtagatatctgaacgtcgagctgttgaaatttgtgttattgattgaatatttcaaaggaagatggttagtgaactgataagtttggtagggaaactcgtctgtgtatgcgcgagaaaatccttacattgactatgatcctacaatcactttccgcctgactctcatcgatatcttcctcctcttcttctctcacctcttccacctcaagctcctcttccttcttctcgtcctcgccttcagattcttttttatctcttgtgtcctcctctccattggcctcgtcttcgtcaccctcaactacaacgccagtgatgtcctgcgtctcatccactccatccaattcctcggcgtctatctgttcgtcatctacatcattcatgatcgaaacgaacttcggctgattcatcggcttctccccttctgagctctgctgcccatgctgagatactccagcaagatgaatgctctcatcataagtcacatccacttcagcgatatctgagaactcatcgagttgtgctctgatttgtgtagcaatcgattccgcatgagggacgattggaaggtcgatgtcttgacaaaatattcgcgcaaattgttccggtgtcaaaagggattctgtgtgcacatttagaggaagatatcagtgttttgaccgattgacaagagattgcaacaaacaactttgatcaaacctttgaggttccaagtgaaacagtctctgatccgatgagtatccgtatcgacatccacgcggatcggaatcaagacttctttcgcctttgcagcttcacctaatttgtcgtcatcgctgaaaatcaatcgagcgcgtcagtcgtgcgttccaacgcgacacacactgaattgaaatgcattggcttacaagtatagatgcttggtctttatagccgttctcaaagagattttgtccgccgggggtctcatgcccaggtacgttctgggttcctctctttccaactctctctttgtcggcttgccagtcacacttgtcccgctatctcctctcttcagccttttcggtctaccaggccctccgtccgttccatcaacgtcttcctcttcatctgactttccatcattgagctccgcatagttgactggacctcgccttcgtccaccgcgatctaatccggggaagggggatgtcgtgccgggcgtagctgttcccacctggttcaagatgggttgcatcaacacggatactcccgttcgaagtcgagacgcgtaggaagtgaacgtcgcttgggcgttacgttgtcggttggtagccgctggcgcaaagagagggtaggcagggctcggaacgcctggttcgcctgacgaagtgaaggatggtgctgtcataacttcatcctccgtcgctgacgaaagtgtagaaagttcactcaaagtggcagcagcagccgcagggcctatcaagggaagggaaggaggcgctgggtgttgatacaatctgaatggatttgtctgagaaggcggaatatacggcggaggaagaacatgtgcaggaggtaggtactgtgcggctggcttgggaatgaattgagcggcctgagtgggcgtagccgaagaggtcgtatgtttagctactgccatgttaggtgatggaagtgatttggcagccgctgtcgtcaaagctgaggtatccttgggtttgctaggtccgggaggtcgtcctgggccacgtctcacgggtacggtcggctgaggcacgggcatcattcgttttccaaccggtcgatgttgaccagctgatggcgattgtttcgaggacggaggaaggggacggtcagattgcggattatactggattgaactcgaatgagtaggattgtaggactgggcaggcgacgcgtgttggggtctgaaagaaggcgctcccgaaactgcctgattataagaaggttgtggctgtcgaggttggccataccctgtggcatatgagcctggaggagcaggtggaggtggatgagaatagggatgatgttgggtcgacgagttcgcgtaagagaaagagtttggaggccgagcgtattgggcggatttggaagctggatacgcgttcgtctgaggcggaagttgatattgagtgggagttgaagtgggcgcttgtgaacggaatgttgggacgtgttgatttacttgatatggatgagaggcaggaggagggataccttgatgcgtgtgcagatacgagtgtgggagtgtatgtaggatttacgagtgagcccggagagagaaggaataaggagatttgagaaaagaaaaacatggctttcaggatgatgatctcgagaacaagaatagaaaagataggaaaaaagagaatcagaagagaacaaaatctgttctagatactcaccaagtcccagacctccatgaagctgttgtagaccctgaagagctccttccaaggactgactggccgatctttgaacagaggaagcttgggctgacgcggggttcattgaggaagaacccgtcggatggaatggttgaacggaagaaggaatctgagataacaccgagttcagctctgaaggaggcatctttctagagagatcttgaagaagttgagcgacaacactctggtctaccggttctgagagaggaggtcccgccatgatccttcgtcaattcagaatggaccggcctggttgaaggataggatgcgtgtggggaggagaaagaaagaggacgagatgtaaatgaacgtgatgagcgagaggaacagaactattagtaaattttggcaaagcattacaaaattttgtagtcttttttgcgagtttctctattcaaatcttgcttgaactgacatcagaacctgaccactaactctcaacaagttgaacccaatatgtcctcaatcatttctccctcctcagtatatagatcgcttctcagacagtactcgaaggcagtgagttttctggatgctcgtgtctgattcaatatacgctcgctaatttttgttctgctctcctcagtcgatcaagcctagaacggaaagaagcattcatctcaataaagcacttcgaaatttggtcgagacactaccccctgcatcaagtcccagcttcgagaagaaagcaaacgagcttcttaatctcgaagtcttcatgaggactcaaaggagctacagcgttcgtcgttcctatcaggtgtctactgacgattcgagaggaggaaaccttttaaagattaaacttgtacaatcgtctgatcactcatgtttcttgattcctcttatgccacgcttttttttcctttctacgattctttcttcggcctattataaacttcctgaatgtcctcgtatttgaaccatataggaattggtggagaggtataaccctacgcatgggatgtcaacccaggatcggacaaaagcgacggctaggagagtgggtcttgacatgcccaagtggcagatggatgagtgattcattggccttttttctctttttgtgtctctagaggcttgctggaactttcttcatcctgagttgtgaacaagatgacgtccaatctgaggtacacgacaaacatcgctcagtcgagtcctgatgactatgcacgaaagctttcaaaagaatcagactgcattttcaatcagaatcgatttcatcgatacatattatatgcatagatgaatccttcatggtcctataccgtccttacagatgaggtcccaccatgcccattcgctttgagacatcatctgaatccaccggctgtctgttccaatctttgccaccgaccaaactagcgtatccagcgtccgctatccgtttactcagcaccgtgcccggaacaaatccgtacatcctcatctcttgaactagagacttgagtctaccgtcgccttcaagcgcacatcgttcgatgagcacatcatatgttctgtgcgtcggcccgcctgcctccttcgatcgagcaagtagatcgaacgctccgggttcaaacacgtgatgaggctgtgtgcagaggaaagcgatcattcgctcgtacgtccgtggtgtgaattcaacggaggatgcggtcaaaaggtcgatcgcttgggagtatagagggaatgtcgtgtctggtcgaagcatgcatgcttccagtaaaagatggtacgattcgagatcgggggtgatgcctaacgtctcgaactctgtgtcggtttggacatgtatatgaagagcgcgatcatagagtcagagagtttcttggaagattagaatcggaaaacaggaggagaagaacgaaccgttgaaagtttctgtagctcttgagaagtctagaacagctaaacatgcctgcatgatgacatttgccgatgcgacatcaaccacgcctctagcctccttggaagcttccaaagtgaaccatgcctcatcaatcctctttgtgatttcttctctatgagcctcgaggcctaaactcaggcctgcggtgattccatccaagattggtttggctgcttccaatgagagatcgactccttcaagtctcatcaaactcaatgagtggaaggcagcctcgagatcaccagctttcatccacccctcaactataggagccatctggtattcctccaggggttcagactggatttcctttgtcaattggaaaatttcgatagcgaactcaggtagaccacacgagccagccaggttggtcatctcttgaaggagaccaatatcaggtgtcacgcgacctgtcttgacagctagatcccagatgctgattagtgatgagacctatgatgaaagggaaaagagatgtcaaatctatggcatcgacgagtgatgagagtatgactcgaaagaatgggtcttcgtacatgtttcttcctgcaaatagctcgcatcaggcctaaccaagcctcgtcactgagatcgttgagttctccgattccgacaaagtcccctgccatttcaaccgcagctctcgtccaaccaacagcaacaagtctagcagtgatctgctcgacaacttccctcctgggcactaatcctcgagcccgatgggtcgcgtacaacgagagaatcacgtccagagtagaagtcagatcttgtagtttcggttgaaggtaggttgttttagaatgaaggtatggggcaagcgcaagagtaagcgtctgagacgttggcttcaatcgaggttcagtcaatagggcagtgattcgagcagaaagcgttgggtgaatgtgtgacaactgacagaagaaaaggagaaagacgggaaggataagttatgtgtacaagatcatcacatcgacctgttatgcgaggggatagacagatcagtaaataaaagatgacccacttgaattaatgcatctaacccttctcgatcaactttgacacccaaagagaccgactccacataaagcgcccacccgatctcccactcgacacttccaaaccaaacacctgtttgacctctgactccatcagcatactcctttcctgtcagttgaacaagcaactctcttctggattccaaccagctctggttgtttgccttctcaagcgccatttcttcggtcaaactatcgcccgtaatcggttgaccatcagattggttagccaactgtctttgcttccgaactgcttcgattcgggataaatgcaagactcggtcagattgagcggcaagacagatacggatgagggttgagtaagtcgttccatcgggtgtaagtgcaagggattgcatatctgtcgcgatcgaaagtgcgctcgatagtcgattcgacgtgacgatacttggtgtttggctcttgggaccaggtacaatcggtgtaggtccagtgagaatgcggaatagtctctcgttacaatctaagagtaggatgaaatgacacatcagttgcagagctagaggatacgatccgatcgatgcaatgtattgacctacccctgagtgcttctttgtgttgaggaggaggaattctgggaacccgaacgggagaagggcctttcgaagaatcccacgactggtgaggagcagctaatttggcaatgatgggaccttgtcagttggacgagatgggtgttctttggtttcaaacttgagcagccaagtaatcgcaaggaaacactcaagggacgaactatatcttctagcccaggcatttgttgcgctactgatcaaccaactaggcgtataactcggtccagcttcgatgtctctctctgagacctttgagctggtgttaggcttctttttgttcttcagtcgattacttgctgtcgtaggaaagctccttgaagtggatctcgttcctttgtccaactctggaccaaatagaggggtcgattttgccgacagcctcacaggctgattggacggtgtagatccaaacgggcttgcttgaatcccgaacggaacttgattagatctggaagaatcactcgcattggacgatgacctgggtggttgttcagaaggagaaatggaagaagccgggactttgttggataaacgaggcccaaactttgactttttgttcgatttgcccctgaatgattgcgagatgttgttgctaagaacaacagggcaagaagtgatagtggcagatttggtagagagcagaggataggagagagatacgcagtgtcgaaaagacggcctggccgctcgaaggatatgagtgttgggcttcatccggcagctagttcaggtctgatctggccaacaagagaagatatatagggaattcgttctatcaaggcagatcgagacatcgaatcaatttagctgttctcggagaaccattcaaactcgacaaaaaagacacagaacacggcatgcataccaatctgattctaagctccgttatttgttacgtcagatatattcttgctgttcactctcttgatctatggtaggtttgaaggcgaaagttggtgaagttgacaacgagaaaagatgtggtcactgctgggtgactaaccgtaaccgatattgaacctggtcacaactcaacctccacggctcgagtccacattttgtcgtatacaatctcctatccatcagtttccacaaaccatcgtatacccgctctctttcttattctcattctccttcacccttgttgccatgtcccgaactgtcacgttcaaaactcttgaccagaaggtaatgtttggccgagttcttcctgttcgcttgcttgtggtctcgaaacctgatgtctcgccttttccttgatctggatggtgtctattgaaatcgcttgtgtttcaaagagctttacagtctctgttaacgatgacgactcggtcagtctacttacgattgttttccattataaaatcatccttgctgacaagatttacgggtttatgtgctgatattgtagatatctactgtcaaagagaaggtcaacgctctcggcaagcctgttagcaagctgatttactctggttagtctgatagcaagtatcctggtggtaatgtgatctcgcctcaaatgtgtactcaaaaacccacgccttgtcttgccttgttgaaatcaattgccactcaggcaaagtccttgatgactctaaaacggttgctgagatcgatatcaaagagaaggattttgtggttgtgatgtttgccgtgagtgtaactccatgatcgatggtcacctctcacgcgttctttaacttatgtatacgttgtttgttctgtcttgttctactcttttctgtccccagaaagttaaacccgcacccaaagccgctgagcctactgcttccgttgctactccctctgccaccgctgcttctcctgctcctccgacaaccgatactacgtccgccccggcatctgatgccccttcgtcggacgtctcgatgtcggagccggctgctcctgctgctacaccagcctcttcgggactggcttcgaccggtttgagccatggatctttccgtacgttttgaatgctgctttttggccacgatacacgtgttctattgtgtctcacttcaagttgtcgtgcgccgtgactaacctgtctttgtttcattcatcacacccacgaattccagtcaagggagatgcattgcagtctgctattgcgaacatgaaggagatgggatttgaagaggctttgatcatgcgagctttgaaagcgagtttcaacaaccctgaccgagctgtggagtatttaatgaacgtgagtatatgtgcttcgccatctcggcctgttctgtcaaacgtctgtttgatgcataccattaatgaaaattcaatcgtttctctcgtattctagggaattcctgaggagtctgaacagcctacttctgttgcgtcgattgcgccaagcgccccggccgctgctgtccctgcctccgctggagccgtcaccgatgactctgctcccacttcggctcctgccccgtcttctggaggcgaaccggagaatttgtttgctgtaagtttttacaatatcttccagggagaaaattatgaacattttgaacgaattctaaatgccggcttggctcgaactttttctttttgattggtaggccgccgctgccgctatgcagcaacaacctggaggtgctcgctcaggtgccagtgctgctcctcagggagctcagggtgcaggtgccggtcagctcgatctaagcgcgttggcccagaccccgatgatgcagcaacttcgacaggtttgtctatatacattatcatttatagttttgtagttctgcattgacctctcaatcactcatgacgtgttccgattcagatggttcgagagaacccggcattgattcaacctatgatccagcagcttgtccagtcgaaccctgctcttggccagcaaatcgcggccaacccagaaataatcatgcagctctttgccggtgaggacggaggtgaatttggagaggacgatggagagtgggaaggtggggacgagctcatggctgctctcggaggcgagagaggtgagggaggtgaccaccagaacgttgttcaagtaacagagcaggagagggatgctatcgagagagtgcgtcatcatattcatttttgacttttggtcttgccttctcaagttttgcacgtcgtcgtgcgcgtcctgatttccaatttcttttccttttcctcacccttgttttcgatcgttcagttagagagcatgggtttccctcgaaataaggttctcgaggcctttttgctttgcgaccgagatgaagagatggcagccaactatttgttcgataccgccggagacgacgatatttagagcgaatcccttatttctgttttctctcgtttgaaaaatcatataaccagcagagagaaggagtgacacggcgacgaggaaaggtctttcttttcgtattgaagaccggactgtatttttctttttgtttattatgagcgttccctcttggtcaactttattctgtcaaagtccgatcgccttctagccaaagatcttgttctttaggctgggtgttggctcagaacctgtctagatcattgggaagactcatcttggatattgaaggtagcaaacatctgttgccgggtatttctttggattgctaaccaacgaaaaagatgagacccgataaaaaatcggaccggctgagcggttcggaattggatgataaatcaatgatgccttcggtgtctatagagtgcaccattatacgagtcagtttcggtctagtcctgttttctccggcattattcatccgcgcttcttggctttctgactcatccgtaattgtttgcctttggtcgtgagccgatactcgtcacctacaacatgttcattggtggttggctgggtttgaggttcgatgcgcgggctcctttcagagtcctaccacgttcatcgacacatgctgctcattcttccgctgtttgccttgtacacccgcttcctgactcatcgtttacttttgctgaaggctgtcatcgctgaccgatgtttcattctgatctctccccatcaacaccaccatcggtcagcaacaccaaacacatcgcttagacgccttcaggagaattgactccgttcatgtacatcggttctctttaaaaactgatataaaaatgaatttatttcaatttgttcttttcattcattctttctcatttctacaacaactctagagttttctactttcctcctcctcgtccatttacccatactcacatcatcaaagacatcttaggaaacagtatacctctgcatgaccatcatgcctgaattcacttcccctccaacgtactctcaagatcctccagagtactctccttcgcctacaggatctccagtcttgctccctctttcgattgaaagcgaacctttgatcaaagcttcagaagcgagcgactttctcgtccctctcggttcgtcactcagatgcgcgcaaacagagaggcactcccgttacctacctcatatcatcgcttccgcccgatgcatctcgctcacaaagcaacacgtcaacctcgttctggccgagcctctcgtcttcatccgcccgccaggtcagggctggatatcctctgggctcactcctgaatcagaagcatccaacaccattggcagggacggcagactttctggagtcgttcatgtcgtctggaccggtccagccaagcgagtgcgtggtgtgaaggttgaggtaaagtgtcggtacaagctgctggcgccggtaaggggagtaagcgattgggaggaaggtatcctgtttgaacgaacggtggaactcggtagcagcggcgcgtgcgagcagggtgtctggctcgagaagggtctgaacaggtacgtctgatagccctagatgttgttccttgcatcgcttgcgcgaagcgcagctgaccgggaagtaattattgcgcatcgcgcgtctaaatagtttcgaatttggagtcactatcccgggctcggctccgacttacgagcgatcgttctggggaacaacacactacaacgccacggcaaccgtgatgggaactgggtcctttctaaccaaggaaatgtcgacatctcagaatttctacgtggccgcttttccttaccgggaagataacagtgagaatgattcacactctgttgttttcctcacatgtaaccaccaacgtgctgactattctcctgttcggtttacttctcttctgaaattaagttttccaattccagtttgtgaaccaaggcgtttcgtcccacttcgatacgttttcttctacactctcgtcaaacgaattcatcgttgccgctccactctccgcctcactcactttactctccgtgccagccgatctcacaatatacgcgatcaacatctatatccagcaatacgtcaccgtgcgccaaccaaagtcaggcttgtgcgagactgtcgcgagctccaaggcttcgattgtgcaacagggcgcaacaggtggatatggcgccaaaggctttgctaaggcagcgcgagagagaggcgatatattgatggacgggcgggcgcatgctggagaactctggaaatggtttaaaattggtcgtctcgtaggtcccgtcttcattgcgtattgtgttcggatgcgaaaggcaatctagctgacgccatctgttgaatcatgcattccagcctacatcggatatcatccggccgacgactctctcaggcacagagtcacctatcagattttcctcagagttggctttcgaagtcgttttctcaagagatgaccctaaagtggaaaacccggtagtcaacatcatgacattgcacaacaagccagtgatgatcgcgtcgtacgtctggttcccatgctctttgaatttattcttgaaatggttcttcactgaccgtgtcatcaatcttctttctacgaacgctgaaccattatagttgttgttgtatgagcagtcatttgactctgcctatctattcagagccgactccagagattcagggtaaagatcgaaagagccgagactgcttgggttgcatgtgcgacatggtccgtattcttccgtacctttccttccttgaaattcttggttctataggtgcacagcagtgtgctaacagtctgtttgcgtttgatatgtgacacagacgtgggaaaagttagaacaacgagagctaaatctgttcaagaaattcgaggcggagacgattggattagtctcttccgggtctcatcaatctgatgccgaagcaaatcttacagacaatatcgactggagtacactccgtcaatcacccgggcagtatccaaaaaccctgacttgatctatcaagcttgtgagcatcaaaacatattacaatcttcctcagaggaaacacacttcatcgaacagttgtagagtttgttctgattaattctctctcatttgaacaggtacattattttctgtctttgattattttatgtcaatcattgacttggaacatctcttctcgtcggactgtgaaccggatatgggaagcagaacgaaacatagtcggaccctttccttcttttccgttcaatgtctatgtctccgtccttcggcaatgtgtttttcgcttggagagctgggtatcagtatattggaccatgccaaagagtacactatttcaaccaagccctttctcgtcatctgttcgagttttccctgctatacaaacttattcgaggggaaacaaccaatttgcgttccgaatcgtttgtgtatttcttttccgggcatctttgctttacgtcttgatactattcttctttctcgactagaagtcttgtactgtacctctttttctggtgatgtcatgagcgattctgtgtgagagccggcgctgttcaaaatcgcgatgccgaagtggcgcggcaatccggaagaagacgcatggaagctccgaaacttccggtggctattcaagcgatatttgaccatcttaggaagacataaaagagtagttaaaagaaggaagacagtcactcgaaacacaccatatcgccatcttcttgatatggatacatcagacatccctagcgacaaggagtttggggcagatcaacgagaattcagctcgaccgatgtctttaccgtagatcaccactctctccgagctcgcaagaaaaccaagccaatgcggttatgttattttcttggcatctcgctcgccggtctggtcgtccttattgtctctggtttctttatctacctcacttatttggtggcagagcatttctggcttaatttgttcgaccctcatcggtcggctacagcttctgccgatcatattgtcgtccagagttactacggtaaacgtgttcccaaatttgatgttgttgcgagcgtgttcgtcagactgggaggagaactagctgaagtaaaaataggcgagtatggatcatccgcccctttcctgaacgagacggagcaatttggacaatggaagtcactctacagtcagcgagtgttctctcaaatcgatcttaactcgacagaaaagattcaccacaagaaggttgacctacctattccttgggacattttgtgcgttctaaaacctacactcgtagtgcatctttctggctgacatttaaaatcgactttcttaccttatgccacgagcagatcccaattctacaagccccatacctactttcctcagatcgtcaacactttcgtgatcgtcccgtccagccccgatcctatcttcaattcttccagttcagacaacttaacgccattcgatttagtaagctttgcttactctaatctcactgatactccatggacccgatcagttctacagaacctgtcccgtcctctcgaacccgaccatgacgtcaagtacacaccagaactcgacgcattctacgatacttcagccgtcagagagtttgccctacggcctgtgagagataaatggacaagctttgatttaaagaattctacttctcaaggtttgaatcatacaaccaaacttcaacagcttggagcaacaacagatgatgcagaggaacgacaaggcttgcgtgtcagacgcaatgcaaccatcaaaattaggacaagaagccacctctcgatggctaaggcgaacccggactatgatctgtttgcatacatgtcaggacgtgacactgctgctaagagcgacgttcgtctcttccatttggttttgtggagactcacaattgctatttaattgttgcatctcaagccttccattcctttcttacacagccgatcttccatatcgatcctttgaacagaggaggtcctcagattggtcgcagaatgttcaaaaaattgggacattatcaatctcatattgtgcatagtcccgaaatggttgagactgatgcccgcgggtctttcttctacggaccttatacaacacttcgtacgtgctcctctcaaatcatctgctcatacacacgtttgccatgctccgttcttaagttcttcgcgtccaacatcttggcgtgcgttctgtcttgtagacagccatgctgccggaggtcaggattggttcactttgcctcgaatcaatgagtcttccgaaagtcaatccggtaagtacagtgaaacatgtaaaggcaaggcactattctgtcctcactcactcagtgctctcctcatctcttctgtttatcaaataattatcacaccagacccggtggtagttccttggcacatcaccttcgacctgttgtcgaacgcaaagttgggcatcattgatgttctcgacctgtttgatggcttagttgagggtgaccaacctgtggatgatcatcactcgaccaaggctgcttttttggaggctgagacgctcgaatatgcggatttcaaaagtgagagctagcttacattccttcttggtcatagtccttcctttgagtccaaggaaagtcgctgatttgagaggtcagccggtctcatatctccgctgatcattcaatgtttttgattctcagattctcttgtaggaaacaatcccacatcttcccagcgatctattcttcgtcgagtcttctttttcatcggaggccttatatctgaacccgtggcatggatccttcagctacactacttgtacactcgatcgacaagtacaggcattggtcttccttcagtcattctcggatcgtctgcccatctcgccttctattcaattttgattgcgctagcatcactcgacgctgagagtggcctgatcttcgcaataatattgtttgtcatacctgccttgataccttttgttctacaagtaaacctttggctggggttagagttcgcatggcttagttggaacggtataccggtcccagtagggttcaaaagattcaaacccagtcatgcagagagaatgagtcgaagaatcgatcaacaattcacatggatccagaggggcctcgtacgtcttttttcatatttcttggcgaccctggcgttttgatacgagaacgaactgctgaacgaaatttcatcgttttcatcttgatgcctatcaacggctgcctagattgtggtcctcttgacagttatatacatctactctccccacgtcatctcctcgccccttcacagctcatcgtcctcgcccagactctcgctgtcctctctctactcgacagggtcctcctggtctaaactcttcggagtggtgtcacatcgttacggatggtcgttgttgacttcaatcacgctcatgtcttctctgtcccagatgcttctcaatatgaggctgggtacgttcggtggtatgtacaaggtccacgtatggacccagatcattggtttcatctgtacgtctcttccttcttttaccccttttttttcttttcttctttctccctctccctttctgcccacccccctcgtttgatcgcgctccatctgtctttcatcgagcgctcgctaattctgtttcgctaccccttgaatgacggtatgaatgaatcactcagtcttatggacgcctgtagtcttcaagttcatattcggcaaatttgaaacgacggcccctctggatctctctgagttcatggtctttgcattcaatttggtcctattctggcaggctaatacactgcctaatgtaaagcaggatgaggagccggatgagtaaaccatctagaatgagtgaagaaaaaaaggttcagtgtacttaatgacaacctctgaatcgtcgacaattttcctttactaaagataggtaccatacttcagaaaatctcatgatatatcatttacaactttgtttcacgaatcgctttgaaaagaaggaaagataaagaccgatttcacaaaacaacaaaatcgacattggaagaaaaaaaaacctagaaaagccagttgtatatcctgtcggaattaagccaacgcgccaagaggatcgtaagcagggaggacgacaggatcttgatccatcacagccacgagatccttgtcggccagagacctgaaatgagaatgaatcgaatgcggatgggatttgtcaacatcatcgtctcattaaggggcacatatcaagcaaggcagcaaatgagagaaccagacatacttgtgaacgaccacctggtagacaaattcatcgaaccatctgtcggacattaccatgaaacctttctcgccggccgcatcggaccaggaattctcaactcgccatcgtaccggcttgccgttgtcatccaagtggacggcggtgatgaccatggcgtgggctatcgtgatcgtgaacaagatggaacaaagccgagaaacaagataactgtgagactgaaagttataaggggaagacgatagatacgaagcagagtataaatggtagccatactcattgctgaatcacccatcattaaccgctcagccttggtcattccaaagtccagcccgattgcgttcttgtagtcgtagagatcgagatccatctcacccgttcgggtagagaatgctccgacatcgcaaccaaagaagacggcctggttggctttgatgcttcggatcgcactctcctttagcttcgagatttgagtgttgacgtctgtttcatcatcgacgcggagcagataggtgagatccaaagctcatctaacagtttcaaaaccagatgtcaccaaatactcacagagaacttttcgtccgccccagatgtttcctagtcggtcgacggtgtaaagcttactgtagtcgttctacataacaaagagcgtacacaagcttggtgagtttcatcgacaacccagtcgagaaagctctgaatgaggacgcgctcactcttggatcgtgaataagtgagaagctttcagtgtaagggtaaggtcccttaaacttgtctgcaaactcaagtggagtggctttcaagctgtgatacttgccatccttgtcgttgtactcccaagtgaacgttacgtcgggcttgggaggcgtccccaaagcgatagccatcgtgtcgaaaacgtgctgcatgtattcttctttcttgattcggacagaactcgaagaagctcccgaggcgatgagctttcgaagattaagcgcggattgacgaagataagagctgatagaacatgaaaccaggagaggtaagctttgaatgcgcataggtgacttgtgggtcgatcagaaacaaacggaacgaacgtgaggagcgagttgagcttcccagagttggaactatggtacgtctcggggaacaagctcttcgggatcagcccgtacttctcaatcagtcccttggccatatcctgctgtccgccatctccaatcggagattggctgaggaaggtgaccacccggtcgtcgagaggtgcctttgcgagatcaatggagttctcgaggtaatagttagccttctcgagcttatcgtagaagaacagataaccctgggagagctcaaagtcgtcacccagcttgagagactgggtgacgttgatccgatagagatttgttgtagcaaaaagccctgtaggagaagtcaggaagaggttcaaccgaaagttacatgtcagataagtcgactatagatgtttgcggagaacgccgaagaggtcaagtaaagaagcgtacagcaacggccagaggacatttggttggtaaccttgacgttgtcatgtgcgatcttgtgcgagtaaacatgagggtccctgatatgggtcgctctgcttacgagagcggttgggatatcttgcttcgagagaacggtctgagagagtacattcttgggatctttgattgttagggttgatgtatatcgccaaacaggttcaccacggttaagggcaaatgatcagctgttattggataaatagaaggcatcgatagatgctacatgcaagaacggatagaacaaggtccgtactcttagaaaactctgcgtcccactgctggaccttgggaactgataagaaatcggtggccttgttatgggtgttgttgtcgtcagaggggatagtcggcgtggccgaaatgaacttctcggatacagtttgctttgcggctgaagatggagcagactgttgagatcccattattcttgcgtgtgtatgtatgtgagagaagaagagagtgtgtatatgtatgtgtgtgtcagaagagatgggagtgagaagaagcacgacgaaagagatcgacgacggataaaggcaagggacggattgcggacagtggaggtcgtgtgctgctgactaagcgtgttgccatatggacaccgccggctatctcctgtgtaaccatggttgcgttcacatttcagaattactctcaaaaaaaagtttcatagacattcaacaggaaagatagcaaagaaaggtaagagaagcaaggctgaatgggacacagattcaaacaaacaaaacaggaaacgtgtcagcaaatcgttttccgatcaatttcttttgtttacaagaagcttgaggatggggggaagatcagaaagctaggattgcattatccgcattgttataaaggcgcggggtcttaagccgctgaactcggaaacacggaccaaagcttgatattcatcatgtcgagaggattcgaaggtatttgtgtttagaaacagaatgaaacgcttcttactaacctgatggcaacaaaacagaccaagctggatggtgagtaagtatgaaaagaaaacaggaagggagaagaaaaacactggctaataaaggattcaggttgactcggtcacgtggatttttaaaactccggtcgaccctaacggtgtgctcaacaccgcgcgctttgtataggttcagtctccttgaaaagaactcgtatcttctaacactcgttcggatgaatgatccaaatggttagaaccagctcagatagcaagatactcaacagtagcgatgattgaggtagagcgacgatagatcgacagactgcactctgcaaaaatcgtgagttgtttccagcccagctgattacataagcatgaaatttcattccttgccaaatccgttgacttcttattcgttcggacgactctttcttttttcctctggaagacacactgaagatcaaccacacaaccacgaacacacaagataaacaagaatggctcccgctcagctggctgccaactctctctccacgccttcgacctcagcaattgaggctgcttccactttggcctatcagcccattcagactccggccgaccaactttctgtaacgtatgatttggaagcaactatcgcccgactggcttcaatcgaaccgccagcaaagaacgtcgcgcttcagtttccggacgagctgttgatcgactcggttgagatcttcagagctatccaaaaaggtcttgatcaggctggcaagggtggaagagcttgggttttggcggatacgacctatggcaggtatgattgccctttccaatggcttttctacgtctcaagtatcttccgttgcgacgcccgagcaaggactgacggctatcctttcctttgtttcatcggatcctctctttctttgttgtattgcacccaagcgtagctgctgcatagactccctttctgctcttcacattcaagccgacttcctcatccactacggccacgcctgcctgactcgttgttcagatccatcactcgttgaccgaattcattatgtctttcctcgtcggtcactatcgatatccccttgtgtggacgagctactagaggtcggcagtgaagactcagagctcgacggcaagggtgtgctagtgatgtacgacgtcggttatcattgggcgctggcggagctaaagcaagaggtagaacgtcgatgggccaaaggcaaatttcgagaagtcatcttttcgtccattgagctcggaggacagaaccagggaaccgaaaacttcaagggaccgcttctgtcgggcatgaaacctttagaacaaaatctaccggtgatatcagacacatcctgtcgatcgaacgaccttgctgctgctgttcctccaacaagttatcagtcttcaacagcaggctgttgttcaacttccttcccagggaccgcatcaagtggttcgtgttgtggctcgacttcttccacaatcccttctccaaatactacctcctgttgttcctccaccactcctttggcatcttctccatccacatgttgtgcttccactaattcatccatgcccgacatatcacaaccggtgaaagaagaagcatcggcatcactacgatcgtacacactaccagaaggaaagaccgtaggagattatgtaattttctacatcggtcagggtgagagcgtaccaatgcgaaatttgttggtgactcattccaagaactatgtacgtttcgccttcagtcatgtgctctctgcctatctccctgatctaacaaagaaactaatcatcccaaccatctttctatcttggctgattcacaggtttactcctacacacctccttcaccggaggacctggattcgaattcagacatagtgcctaccaaacctgttctccagagttataagacctcgaaactactcatgcgtcggtatgcagtgatgcagaaagctagagacgccgatgtattcggactcttggttgggaatgtcaaccttagtacggatctatctcttttcgttctctttctgccagtctcatactgactcagttgtgatgactttacaactatagccaactcgctgccgcttctttcaaaacttcgtgcattgctaaaaaaggccgagaagaagatttacacgatttctgttggaaagctgaacccggcgaaactagcaaacttctcagagattgaatgtttcgtggtgatcgcttgtggagagaattcattggtcgattcaaaggtccgttgtccttctgttctagccttcgtttttgtttttgtttttgtttttgtttttgtttttttccttctttcttttttttttccctttcatttcctttctctccttgtttgaaacaaaggcatacctgctctcggcctcccgctctctcctccccctaagctcgtcctgcccttcgttgagccttcgactcgatggaggatgaggacgccagcgcgaatctctcgatctgaacccccttagggacaaagagaaagggaccacgcttggttgtagcccagggggtatattcacccaggtctctcctctttctctttcccttccaggaaagagaaggagaagagatgaagtctattcagcccttttcttctcctgtagtggagaatggggtttacttttacttcgagattcctttccatcttttctctattcttcttgctttctcttgtctgagaaccgtcactttactttgttcttgagttgtagacccgttcgactgacagcttacttttcttcgcaactgatgaacaaaaccccccaatcggtcaaacaaaaaacaggacttctatcaaccgatcatcactccgttcgagctcgagctcgctatccaatttgacccagactggacaggggattatgtccttgatttcactcgtcttctcggtgctgattccgacccctcttcatccacttccgcttctaatggcaccggcgatgccgatgccgatgtgaatgaggaggaagatgaggaaagcgaaggaggagaagaatacgacaaggaagacccactttctcgacctgttttctctacgattacaggtacataccgacaacctaaacggttcggtaatcgcaccggtcaatcaacgacctctcaatcactgacagttcgatctcaagagtcgtccattgtttctgcccatgcccatgtatctaatccgagtgaacattttcaagcgagaacttgggtaggattggatcccagagtcgggctcgataaggtcagcgtgttagaggaaggaagagccggaagggcatggggttatgaggaggagaaagaaaaggagaagaggggggagctcggggcttgaacatggttgtatttgggaaatctttctggatgttgatcgaacagtcaaaactaccgtctcttccaaaatccacatctactttgaataaaagagcgaaatgcatgaacaactatgtcctatccaaactcctcaaagacaaatcttattatatgaatttgacaaatgaaaagggtaaagagaagaaagagatgttgaccgtcgggttcacaaaactttatagaatagagaatgaccaatgatcaagataggaaaagacaagaggttttggccctccctcgctccgcctcatcagctatcaagtaaagcgattgcctgttgatgtagaacctccaacacagtacccacgcattccaccgtacacaccagaccttcttccggcccaagcaccaccacaggcgcggccactgcttgaccttgcttatgaccttttggtctgatcaatcctttcgggtacctatcgaacgcagtcgatcgggcttgttccatcagatcaatcaaatttggtatcggcgtgaatctaggacgggtggttggttgatttgacggaggcggttgatggcttggctgaagcgcgttggaagaaagagtggatggacgagaagaatcttgaatcagatatcggcggtcttgacgattggggagcacggcgtaagtaaatccgtatctaaaaaacattttaatgtaaactcctttagttgatattacgcaaagagtacgcagcagatggagaaaaggaagagaattgagcaaggttgacacgcaccggacattgcctttttggtacaggaagcagaaagttgaaattgatcgaggccaaagcttgatctgaagacccggcttgggtgaagggacagagagaagtttatcgcttgtctccaagaagggaagtgtcgctcgaagaagctatcatcgagaacccagagacaggaacagtattagactaaaagatgcttgaaggcctacgctagacctcgaagatcaataagacgtacaaagaagcagtctgcaaaccggccagactcattcaagcgtcgctcgaagaaattcgttatattggcatgaggattctgtttcaccaagtgttttgtcgagggcaactcggatttgacatcggtggtagaaggtgtgggcccggaagagggaagcgtttcgaaggaaaggttgtaagatccttgcgataaactcggaggcagaccaaccttccatccaacagaaactgcaaggccctggaaggttcgatcaagaggggaaatgctatgagcttattgatgggcgggagcagataagaacaaagatatgcacgtacaggggcgtaaacgaaacgagcggtgtgtagatcgaaatgagtcatctgaaggtctggcatatttaaaagtttgactagagtcaaaacattatacgagcccgaacatcagctttgtacagaaacaacgcaaattggaaccgatgtactcaccctcatttgctatcgctgccagttttcctatcatactgaactcctcaatgaatgaatccacacaacgatcaatgtcctcggttacgatgtttactactgaacttatcgggtcgataaatacagtccccaatgaatgtagtttggtttgggtatcttgaggtaagcccagacgatggcgtaacttgaagctggtgataatctgtgattacagaagcataccacaaattagatggtttccccaaacagcacacaaaaaggcgggtctccagtccaaacatacggagaaccagataaaaaaacaggtgaataatggtgctgacctgggttttttcatctttccaccagttcgaaacttggaacgagacattcggcatcgccacctcagccgaagacaggttgcttcgcagaaggtcggatgcttgaacaacgatgataggaatgacggaatccgaagaaccagatttttcatctgctcgtctctttcctttacgggaaggcaggctagatgcatgcgatggtctagacgccaggtcgtacggtacatggcgagctttgagttgagattccactcgatggctagtcactcgtgcactacatagcagtagaatggtgtcaggttcgtgcacagacagaaaaggcagcagtcgaggatgagacttacatgcaatatcgatacagcctacgcaaatcctcaacatccacgttgaatctgtttaaacgagctcgcagaatcgagaatgatcagtgaaagaatatatgaatgtgcttcggaagatggaacgaacctggtcggctccacagtttgaagtcttccaggctgagaaccggttcttttcctctttccaagtatttcgctcgccggaaaatcattcgcagaatcgtctctcattcggcttactatattctcccgatcaaagaacccaatttggtcgacgaccatccatctctgcccaccttcgaccacagtccgaacggagacgagagcgaatcgaaaatcggctggagtcatgatcgtgacaaagtagtggttcaaagcgcatgggaggggcacatagatcaagaactgaacggcagttccaaacttgatgagctctgaggaaagatggaccagatggaaatggaagaacgaatgttaacctcatatgaaagagagaagctagaagaaagtcttacctccttgcttcagaggtaagtttcgcacaatcgcgaatcctaggtactgaagcttttgcgtcaacgtatctcggattgtcttttcaaaaacacatgcgtctatcaataccaacactaaactttcgacaggataccatcagcaagtatgaacaacgaaccgaaaacttaagcctcatcaagacatcatttaaagctgaaggagtcgggttctcgttcaacctagctgtcagttgctggagagttgactcgccggtggaggagatgacatcgtcactatctcttagattgattttcccagatcgaggatcgacaaatacgtgaatgaattgtttgccatggattctgacttgaagaattaacgatccaggatctaaaggacatgttacagacgaagattatgttagttgaccaaactaaaacgctcaagccactcggttattgagtcaagatttattgaaatcccttaccacgctcagccaaaacgatatccccgcccggaagatcaaagatcacactgttcatcgggtgatcaatcaccttcttatgaaaggctttgattagatggttcgcatgtgtcttcaacgagtccaacaacgttttctccaaatccaaatttgtcggatcaatcaacgcctccttcctactctccaacacacttgccaagtcgaccccaccgctccatttcttttccatctcccatgtcgtctttagaccgacgtccagaaccttgtcgctcactctggctgtgttccgtgcatcagagtttatagatggggatagagccgacttgacattcgtttctatctcgtttaggactctgttcattgttgagcgagcggcaagtgaagaggagacggtaggcgaaagcatgggtgtaagaactgaacttgaacgatgtggaggagatgatagagaggataaggaaattgtgagtgttccagcgatggaggtggtaatggttaggttggttgttgaagatggtactgccgtccttcgctgtcgactatagtattcaaaaagtcagcatccaagacgcaatcacatacgctaggatctcgttctattcattgggaacattagatccaagaagacagactcacggccaataagaaattttgaaagatcgccgatctttatccatctccatgttgaagcagtccacccagccaagagactgaattcgttgggcctgatgatacaggatctccagctgataagccaaactcaaagaatctatgtgaatgaggggccgaaagatatagtgtgacgtccattacacatcagtctcgatgcggaagttctcattccaccagagatacaggatatactcacgcaggagattaaacaccctaactaaaggcgcgtccaacactttctccgatttggtcgacccgttctccagtccactcgacaacacaacttttgcctctgaccctcctgacccatcaaatgctgaactggtaggtgccggagaattcagtccattggatagttctgatggaacgaatggacctccagatatgtcgacagatgaggtaagcaaagtagatgggccggaagagggaagggagtcgggagatggctgaagttggagtatagcagtccgacgaatttcttcgaatgttggcttgccagggtttgttgggaacactgtgggaaagaaaagttatgttcaacacagacgattctattgcaatctctacatctctgatctctgatctctcccctatctgtggctttgattgatgcgttgtcagatgccaaatgtgaaggaatgaagggaccaacattttttgacatcttccgctgaatccctccctccaacaccaaaggaaaactccaagtctagagggtaccactctcccccgttctttccaagctcattttttataaatcgctgctcatccgagtcaatctcgagcgggagctgagcgcctaatagacaaaaagatgcttgaaaagatcctggacacgtaaagtagaccctcccgtccgctgttacaattgcccatagaaacgcgtgttaagtctgtcatgattggggacggctacatggctagagcaaagtcaacacacctattcggtagtttttcatttgaataggaacaacctctatggccttgagccggtaagcgatcagctcgttcagatctgtcagaaccgtccgtatggtagccttcgataacggaggttctggctcaaagtccaactgccggaagagtacagcgtacatccgacgtttatctacagttgagcataattctactgttctcaagtaaataataggacatgtatacaaacctgataccgcttcggcaatcttcgatatgtgccagtggacaaaacatccaatgccgtcaaagtgtccggatttcttaacctgctcgtcaggtacatacacaatgagtaagatgagtgttcaaaacattttgaccgggaaaaaaggtatttagttccatatcagtaggttgtgcttcatcattcagctttcatgatcagacaggagcgaatcagacctcgttgttcccaagccagatttcactgcggagagttgcgagatagattgatcgaattcgttattctggcggttgaggaaaccgatcacgttctatcggaatgaatgttggtcccaaattcatgaagaccaaatttagtttgtcaacagcttttcattcgtatataaggtccagcgccttattgaccatgtgcggccggcatgaactctggaagtctgacgatcaacacaatgagataaaacgaaactcaccaagcatttcgcgacaacctcagactcttgactccacctgacgagggctaacagtttgacgatctgccttctggcatacagtgcaaactggaaaatttctcccgccctcgcaccgtcatgaagtgatggaaggacctctccaagttccatcatccgcttgtacacatccttgacgaccgcatctaccacctcggccatagggaccaaatctgcagccgtgacgtccggcaactcactttccaaggtccgtcgatatgctagaagatcatcatcagcgagtgtgctcgacacgggtggcgatcgtgatggatgagatataggtatagggatgggtgaatggaaggacaagttgttggccgaaagtttggatgaggactccatgagcggcggagatgggtaaccgctatcggtcggcgagggcttgacagccgatgcgttccggttggcgagagggatggccgagctggcggtaggagtaggaagatgatgggtgtcgatgacttgtgggtggttagagtgactatatgattgagctgccgacgacatccgagaagaaggccaggttgtcgcttcctgtttgacagccggacgggaaacaagagaaggaagattggttccttcttgattgatgtgacgtttttgttttctctgcgtgttaactgatacaagtacttgtcgatggatcgatggttctaccgagaatgggagaaaagaacggagacagatataatgaagctgagaagaaaaggattgagtgtagacgggaccgctagagggaggatgagatggaaaaagagtctgacgctgtagggatggaggggcctggatttggcgagaggccgactagacggtcctgattgacgacgatataaatggttcgtcaggagaagactagtgaaagtttctccttggaagtctgaagagattcctgaagaatgtggtatctagatcaaagacaagaaacaacagaacgacaacaaagaacaacagagagagaagaaggggaacagggattcgggtggtgggtcggggtgaacagatcggagggtctaagaagctgaaggttaaaggtgacgattttggaaaagagaggaaaactacaaatatttcgtagtctttagactacagaagtttttcgttttcctaatgaattttctactagctgtgagcttttcttttagtctatcgacatccatccatcctgttctgccatccatacctcgtcctcgttcccatcatcactatggcatcggcaacagagatcaaggccttcatcggaatcctccaggaggctgtcacgtccaaggatgttgcggtgcgttctacgtaaccgagtggctgcttatcatctgcattgtgcaagaccatgaggtgttctacacttggaaacttccgacgatccttctctatgtttgctcattcttttcgttgctttctgccttaacggttcaatccaacagaaagcagttgaacagctcgaaatcatcaaggataaagtcattccgacagaggagcttctccgagtacgttcatcctttatctgtatatcactcttcgcgactgaccaggcttgggctttcatgctcaccaatatcctctttctatttccttcgcgtcattcttcttctttctggctctatcaaaacctcttaggaaacaaaagcaggtgtagccgttggaaaactacgaagtcacgcgtccccgtaagctcgttattctcgtttgcgagctgcaagaaacgcgtcggtcgcgtgcctctgcctttgtctcgaccgctatccatttgtcacttacattctgctctgctcaactcttcttgacagagaaatccaaactatcgccaagtcgatagtcaaagtatggaaggacgcggtcgatgagggaaagaagaggaaagcagccgcctcgggagcaggagacgaacctgcttcatcttctcaggcgaaaaagaaggcaaagggcgagaagggcagtgcacctggtcggttcccttcgcttctcactctcatcagtatatcagtttggcgctctgatgtaaatgtcctcttcctgtactatcggtactctggtgcactcagtctctactcccacctctccctccagcacgaattccaacacaaaatcgacatcaagtcaagccggcaattcgaaaaccaattcatctcgtccgattgcccctcttccctccaaaggcacttcttcctccacatcttcctcatccgcatatggcccatcccatccgtcgctgccaactattgtctcaccctacccggaaactccaagaacttttaaagcggacaaacctaattcacccggtttgggaaacgatgtcagagatcgatgcgtagagctcgtgtacgatgctctagcgggagacagcaatgtttgtaagtttgattttccggcacaaggatattcctgctcactcaaagaagagatagtatacaagattgatcatcatggatctctaccgtttgtgcggcgcgtattcagccaaggaagtgcttctggagaaatccaaggctgtcgagaaaggcttctaccaggcttgctcgacaaaaaccgataacacgtatcgttccagttcgtaaacgtttcatcgtgccccatctccagagcaactgaatgtctgacaatgaaaacgcgcttcttgttcacttagaaatgaggggaatttgcttgaatctgaaggaaaggtcgaacccagatctgagagatgctgtggttcgaggcgagatcgaggcttctaaactcgctactatgtccaaagaggtgtgtcactgtgttctgttctggccgggtaatcagcttttctcatttgtatctatttatttgtttctgttcgtttgtaggacatggcttcatcaacccttcaggctcttaacaagaaattggaaaccgagaatctgttcaattctagaggagcagaagaaattaaggtacgttcttcttaaactccaacctcttttatttctcaattttgtatggttgacgtgagtttcattctttgttgtctcttttactcgttctctccgtcatattcttgtatcgatcaattgaacaggccgagacggatcagttcaagtgcggaaagtgccacatgcgcaagacgacgtattatcagatgcagacccgaagtgcagatgagccgatgactgttcgtctttctctttcttttgctcgaagagatagattctttgtacctgatgcttcaaggttttggtttttcttgtcatacccagactttcgtaacgttcgtttcttccttcttttcgttttttttttcttcttaaagactgaccttgtttacatgcatgccattatgtaccgcttcatagatgtctgaactgcaacaacagatggaaggtatgtcgcttatgcgtatctttctttccgttctcgacatgtctgaataacaaagttttggttattccatcatcatcagttctcataagcgccggtatcccgtatagaatgtgtttctttggttgtcctcaaagactatccgtcatatcgttctgtcgtttgctttttcctctacgtatctctgctatcgccattctcttcctgttgctcttactctcctcccttcttttcgcttcaaatgttttgctttcttctgaaatgtattgtggatgtatgatgatgcggaaatccccaacaacgttttggaccgagctctgtaaccctaacgacacaagttccctttgacgatctcccacgttattgcagcagcaacaacaacactatcaccagaggcagcatcatcactgctagcttacacatccttttgttcccacctcttggctgtgtttcctcgtcccaatcgagctgggtcaagagtgtcatgaacgactccatcgtcgacggctcgaagaaaaatagttctaagagcagatctctgcccgtcaaagcacgagacagcctgcacaatcttctcgatagggagcactctgtgagccctgctaggcgaatccttcccttcaacagggagactgttcggcagatatcttctatccggccgttcttcgacgattcttcaacgtcttcacccaaaaattctgccgaatgtgatactgagggtcgggaggcgtcgacctcatcgccaactggaattggacgtcccgagtcaactggtctttcgggatcttctacaaaggagatacttcacctcggccaagcaatagcatcaacatctactgcgccatcaacgaacatcgatcaaccaaacattgccagacctggttcttgcaagataccatcagctcctgtgcctacgcccgtgccaacgaggaagaacagtcgaacgttcttctctttcaaaaaggaatcggttccgcccctgctgagttcttttagaacgccggccaatctgttctcaaatatggactcgaagaacaaggaacgccaacagcaggctcatacccgacaggaaggattgaacgcttccaggagaagagatagaccgtctaataagtctgtagatatctcgtcgttctcattcccccaggggtgggacgaaacaccaggtagaggtggtatcgatcagagaaagggcaaggaggtcgaacatgcaaaaggagaagaagttttgtcggtcgatggagcggacaaaatggaggagattggaaaaccgtttgatgtttgtcatgttagttttgattccaaatgttccgctacctggcgagtgccttctagtcgtgcaagttggtattgatcttactcttcttgaattgttaggctttgcatgtagagtctgacgatctagccgttctaccgttagaatgggtggacgccttaaaggtatgttatagtcccaatctcctcacgctttcttctgtctcttgcttttctctattttacaaatcaagagtatgcgcaaaatgccaatctcaacattttctgttttgattttcggacattaggcccaaggctcaactcctgccgagatcctccagttagcagtctccaagtcaaaatctcatatacttcgtcaaaattcaatcaatctgccaattcctatccgccctaaatctccaccttcgccgcctcttcctcctccttcaccccttccgccccttcctcatcgacctgtttctccatctggacgacattctcgatcaaattctctcgctccagcgcgctcttggatccccttgtcaggtggaaggacggagaacataagatcgagattggcgaaacgaatgaccaaatcaaattccttactctttggaagttctttactcggaggtccgagagccagttcggacttaccagcatctccctcagaaactgcgctgaactcatcgactccgtctgcatctccagacgtcactcccatcaagataacctctcccattgttgtttctcgaaaatcatgtgtactcttatctccctcttttgtttcttcgccgacgccgtcatcggcacctcctctatcgtctcctcaatctcctccaaaacgcctctcgcctcatatgagaatgtcgagtatatcatcgatgagccctcgactctcgcttgatttcgacgtcggttcatttcaagtccccatacctccgtcaagtacagaatattcgaccaatgaatctgccccggataaaaacaatattccactagaccctcaagatgatttaagcgagagatcggcattccttgtggcttctcaccaacttcgctcatccttcttatctttctcctcctcaatatccggttcattttcctcggaatcgtctcctccatctgtccatctatctactccaggtcagactcgttcgacagcggcgagtccatctgttcagacatccactccttcggtcttttaccagacggatacatcaggttggcctcaacctgggtttgccgacgtgagaggattgtcgaaagtaactttggcagagtccgattctgcagtaggttgggaagaacgatgggaccagggtagaagaggagagaagagagccgacgttgaggtcgatgaggagatcgatagtgctgacgatgaagaaggtcgtacagaaaattctcatttgccgagccgacaagatggcaacagtcgtctagaacaaggcgatctgttcatgtttggaaggagcttcagcaaaactcaaggaccttaccaagctgaccgctcagatgactccacacccattcgatcaggacgacctctatctctagcacctagtcaatctaagagcaagcgatcatctacccagacgtcttactcgaagcactcttcttcttactcaatcagctcggctggttcatctcaggaggcagtaatctctaaagcgattcttgtcaggaatacatttttggtctcggacgtgactgtatcaaattcttcaagcgcctgatctaggagaatttttattctttttacctcatttgacgttcatgatattggatatctccttcttctttacacctttctcaacatcgtttccacagataccaccgattccccacatctgcatatatagccctatcatacttgatttcccctttcaaatcaaaccgtagcatatcttcatctctctttcgcatcaaattttgatacacatcacgatcgcactagtcaatttggtctataacagtctaacaccacacgtcataactttcttgcttccattcatatagcatagtaaatacactctctttcacttttttttttcacgaacaattaaaagaatttacaataacaacagaaagatgaataatgaagatacaacacaaaaactgataggtaatacaaagagacaggggagaagaaaagaagagggagtaaaaaattatatgaggagaaaaaacgattcagactcgctgagattccggcatacccaggtacgaatccctgactcctcctgtgtcaatcacgatcttttccagaacgagcgcgggctcgatcccccaaactaaggaaatagagacgatagccaaaagcacgaattagtccaaacagcttatattcatatgagtgtacgtgaaaaagcagaacgtactagaaagcgtgtgggctccagcggagcttatgggtacatcagaccagtcaggaggatcggcaccatctgtcgctccgtaaggaacaggctgaacaacttgggccgggtcgtcatcaatctgaatagcatacttgataggtctgtcgggcaaaaagttgaaagacatccccatataaaggttgaccgtcacattcccggacgattggttgttgaaattataaaagtcatatctttgtgttacagtgtagagaacaacgaaagtaagaacgaaggatcatctcagaatcaacgtcgtgatatgatacatactcgactcttggaccttcaccggcagtgaaatttgtggaagtcactgggaacatagtgactcctccggagagagaacgagagctataccctgggataatctcccatgatgtcccattgattgagctattccgagacatatgagcggcctccatcgagactcctccgtctgcttcgacaaatccggtaaagtcactagggacgtcttctttgacgacagtagcgtaaatagtgtaagtttgcgcgatgccggctggtagaaagctggggtcgctcgtggttgagttaattgataactattgaacaaccaaagtttatctccgtcagcgaagtatctcaaccaagaagaacgcgccaagaatagcttacagccacaatgctggaaccttcagggacttggctccagtccggaactgtcaattcgattctctgctgccaggttgattcatcactagcgagaactgagttgccggttgtagatagttcaacgaacgtcacatttggtgcaacgacaaatgtgtatttggtcactcccgaaccctgtccaacttcgaaatatcgagatttgggcccatattgagtgagagtgggtagcataggaggcggacagttgtatccaattgcgcattctgataaaagagagaatagatctcgaatttagatacttgcttggtaacgccatggtaagaattcgatccttacgattagaattatctcctggccaagcacctttggatccctgtgtgatagaaacaaatgaagagcacaccgtcagcaaacatgttggtcagataagagagtttcaaagagatttactttcctcgatagtgagtctcattgctcctggcaaagccgtctcagacccttggacccaagtgatgctaggtatcgaattgatcattggttattgccagtagtaggagcccaagtgagtttggtcctgtcgaacaagaaagtggtgaaagtgatgagaatgagaagacttcatcagcttgaaaatgccttcaaatatcaccatcatatgatcccattttccatttgagaccgaatggtactcctagacgaaggaaaaaaagggtaaattcgagattagatgatcgtatgtgaatgtggtgactgaaacgaaactcactctggtgatcgccgcatcctcacggaacaaattgagcacatcttgggccttggtgttggttgacatgtgggcttgggtggcgcgcagataattctctccagctcggatattgctacagaagcgaaaacagatcaaggcaatgctggtaagtcatatgttcgatcttctaaaccggcctggataactatataaacctacaggagagtgacagtataaattgctcggcatgggtggagaacaagctggaaaaaagaggatcttttttcatcaggcaacccgttatagatctcccaggcgtcgtcagtgacgttcttccattcctcaatcaccctctcagccctatttatggttgtggtagagtggaaaaggatgaatgtaagtatatgctcaactagattcgcatatcgtttggataaaaacaactgactctcgatagtctagatatatcaacaatataatcctgtagttagtgccatgccaatggaaagatatgtagatttcatacactccatagacaagaggacataccggtaagcgagtatgtatcaggctctgtcaattcaggcttctgcctggagacgtaaagcgtgtacctcgaaacgacgctggcagttgcagcagccacatctttaccaaactctctggtggcccaaagttcgacgtactcgttaagattatctttattccatcgggtggtatcatacgagtagtcgaaccaaaaactcattgggagctgcggaaaacattgacgatgttacggcaaaagacactctgagtgagagaaaaggtgaatgaaagtcgacaaacctccataggtttcaaatctccgacgttaacgatccataatctgtttgctccgtgtgatatggtcaggtgtaattgctcccagatctgatttaacaagagtttataagaatacgatagcgcaatcacagtccatgcttctaggaagaaaccaaatactgactttgggaatagagttggtgttgatccacttgtagtttctggggtcatcgatcaccatatcgaagtggtagtacaatcccgaccctcctagcctcttcttttcatcatcggtaggaagctatcatcacaatgtacaataatgttggttagcgaaagtgttgaccaacaaacggagaaggaggaaaagacgctcttacccttcgaacatttccaaaattatcatcagtccaaagtaaggtaatctcttcaggagcctgaagaccttgctcccagtatgactgaacctctttgaacaagcaccatactctggaaattcaagagaacagtcgaaggaagccgtgtatcttagcaaatgtctagtgcaatatagagttttaagagcttgaaggatattactgaggtatctcttggcttgacttcccggtgacgttggtcagaatacgttgttgattggcgacgatattttcgacaagagggatgttggccccaggaagaggaagatctccattacctcgcatccctacacgcgcaacataaagttcagcgctatcgccaacacaacttgagtacatgatcaagtaatataaacttgccaactgtatacaaagtctcatagttcttcgatcgttcaactccttccgtccaaaaattctggtttcaacacaaaaaaaatatcacttcagtataaactgatcacctgctggaggtaatcacgcctagaggagcaacctacgtccaaaaaatccttgtttgaagtataattccaatctccctttccaaagttggtccattctggtgtgtttctggccatcggctcctgatgacttgtcccgtactgaatagtttcaaattataataatcgagtgagtgaaactctacgtgaaatgatcgatgtggaaggagaagtgattacaatgactccgtattcatcggccagaagctgatttaaaggatcatcctgtgatataatgtacgtgaaccattccgcaggttgtcagaagtggaccatgaagcgttgtgaagaaaataattgttggtttacaagagcgaacatagcagaccacatcgcgggccagaacatgtttcctttcaagcgaagaatgagctcatagacactctcatagaactttgtgcatcagatatagaagatagaaggatttgagttctgtttatgatcctgatacataacgctcttggttgaagaagcacttacttcatgcttgaaaacagccgtatcattgttaccgtaatatattttggcccagttggtcagcgcaggttgatcatcattcaagaagaatcctgatcaaacagtcggccgaaaagttctcaagcaaggattagtcttttaaatcgagatagttcacaaggaaagtataagctgatgtatatacctcggtacttgacactaggttcaccatggccataaccgtctgacgaggaaaagtagacttcttcttgagaaggagtagccacatcagcccaccagttccaagaagaaacccccatctgctcggacagatcatataacccgaagatcgttccccgtttacttgaggtttggatgaaacacacaggcaagaggaattcccgtgaatacgtgacggcgatctccgaagcctgcatttacaaacttactcgtttccaacgatgaccaacgcttggtctactgcatccatcggagagtccactattaccattttaaaggcttcccaaataccgtcgatgtcggacacgttcacctttccgttgtctatcaacatctttatcaagctagattgctccaggctacctatgatgaccgcccgactgtactcggatgtgttggcctctagagagaagtcgtctttgatgagctgtggcgtttgtccggtaactttgaacaggtcggaagcgaatgtgctggaagctcggtggacgccgacataatcatcagaagaaacgagaagaactgtcgcctgggaagaagtgacaagtggaaaagtatccgaagtagactcgaaagaaatcacctgtctttggccaattgagagagcaagctgggcgaggaacgtcaaagaggccagcagttgtatcactgataagtgcaacatgttgaacctgtcgttgtcacaatattatattgccgggtaaagaagagacagcgcttcttcaagcagaatagctgccttttaaagtcttcgtcttataaattccagcgctgatgatgggtattgtggaaatgaaaggccaagagtgagatttcgtgtcggagggacaaatccaccgatgagcatctcgtaaaggtcatcagtcggaattcacggaaaaaaaggatctaaaatccgtccatatacgaccaagaaagaaggtggcagggagatcacagaacctcaattgccatggcgtctgagcagtgataacggcgaccgtggactcgatcaatgtgctcctcggacgaggtcagggaagaactttccggatgttcgggccgatagaacgggcgaaagatttctccgaaaaaactcctaggctgatataggaagggtatcaagatgagaaaatgcaactgtataattacaccctaaaggattcgggtgtgatcgaattgatgactgcgatatctttcttgagcttcagaagatgtgaatgaggattagaccgtcatgtttgattgatcacaataaaaggggtagaaagagggttcacatcacatgcaaagcgatcaaacatacaaaggagtaagaggcaaccgtttacacagactgaatttaaacattaaacgattggactccggatgtatagtcgcaagagtgatcatacaaacccaacgaaagagcctgttatatcggcacatccatcactctttccgactgagaaaattctccgcgcctgtcttcaccgcctttacagaatctaacaaacatttgcccattccagcctgaccctccccgggggttaatacgacaagccctttaccgccctgccctactggatctgtccattctgtgcttggctcctcgtgttcgacattctttgcggcaggcgacgggtgatcagtcgatgctgtgttaaatattgactgatgcgctagaacataagccgggtagacaatctggtcgaagctggagacaccatatacacattaagtacgcgttatacacatgacaagggaaaacattagtatgatccagtgttgaggcttgaatatatattgtaagactaagaacgcaactaattcgggggatcttgccagacttctccggctgcggcagcggattgagctcaatgacagccattaaagtcagttttcgagtccagacaaatatttcatgctcggagaatagagcgagcctagagctgagatacatacattgagttacgtatgtacttcgagcttctcttctagacttcaaggtagcgtaaggaactcgaaggaatattcgcacgtctagtttcgagagcacatcctagttacgaagcgcaagagcatgagatgtgattagtgatcgtccgaggatgaacaagacaagcgacaggatttctgtgaagacaaacctcatcccaatagacaacgaacccatctagaattccccatacgatctctactccctcctttcttgacttctgttcaatcccattgatcaaatctttcacttcgttttttacgttctctccgacagacacaccttcgagggtgttcagatgatcgtgtgtctgatggtcgtccggaagctgacccgtctgtttaaaatacgctagtgacgagcggagaagaggccagtctattgccgtggctggagagtcccaatcttgaacgtccgggtagagaggagaatatggaatcaagtgttgtgcctaagtgataggttgttcgaagaagcattggtcagcagtgttggaaaaagagaattgatagataacgaaatggacgaaaccggagcaaagtcgtctaggtgaatgatggttgagttcttgatcagtcgatgtagatacttggccaatgtcgtctttccagagttgcttgcccctctatgtttgaccgggaatgagaagagtatcgacaagaggaaaagatcaggtcagaagagatgtgtacactcagaagaccaacagattacgcacccgactccaattaatagcacccgtttcttgagagtaatttcgaccggattactcattgaaatataagacgagtctattctatgagtacgcttgtatctatattatgggtgcgtgtgtaacgaagagtttcttgtagaactagctggcagacaagacgataggaggagagaagtctgaagagaagattgaagatgttgtactggaaaaacaagcggagacgagcgaaggaaagcgtcgcttacataagccgaccatctccgcatacacacctcgtttgcatcgttttcagccatcctatctcttctcctctctatcaccatcagcatcatcatgtccgcccctcagacagtgtcaaaacctacaggacctccttcggattcggaagctgttggatccgatgccgactctgattcctcgtcgtctgtcgattctcaggaggaagaagaccggttggccaaggaagagtgggacagacttgtgtctcaaacgcagctacttataggtttggccgtgccattcatggccgcctactggggccgaagagcaggattcaagagtacgttttttcttttttgttgaagatttatcttgggtgtgctttattcgacaacgtacgatcactatgagttggtcaggtgaaggaaatacaccgctagctcgagatcacagcgattccgagagtttaccctgtccaatgaaaagatggtaattgagaataaaggagcttcgtcaggagtttcatacaagatcaatctatgaacgccaagaagagcactcctcgacctgcagagaaatcaagatagagtcgaagatggacatcgtccatcatatcctgacgaggaaaagagaaaaatcacgcgagtatatctcggcttcacgtcctccacgatttttcaatatcgcgtcatactcttgtctgaagtctacgcatcgaccaaatggacgattatcgagcctagcacttactttctttgaatctttcggtttacagttgttcatcgatatattgctctaggtttcacgaaagcattttggtttgggtggacgggcttactaggaagatgatatagttaagattgtacaaaaacagccttctgggcttcttttatttcgtcggctttggctgttgttctacacagctcttcgcctcttgttctcatgtcggaaggagcaaagatgttgcgtttctcattccttgaatacatccatatctaagacgaagcagtaagaaagaggtagcgagtcaaaacatcgaaagtagacagagaagagggagaggggtaggagacgtaaggcaacatcgagaaaaagctaaaactagatgacgaagaaacgctcaagaaatccagaagaaaggggagacgcaatcaatgggagaaaagcgctaagataaagaacttttgtgttgaaatgtgtaacatgaaactgatctaatacagagcgttgccagaccttgatcagatagggggcagaaagggtggactaccaagaagggagggaacaagtccaggtgggaagggaataggtagctagctacgatatacaaagaagcggaattcggggatgtctaaagaaatcttccgagatcggacgggccagccacaaaatagaactaatgaaacaagtcgtcgacgacaacacaggaagaaacgaaaccaaataaaggtcaaaagaaacaaatcgaggaaggagtatgcgttgagaggctctcaaagcctctcttccagagggcattgagcggtcatcttgctctccttctctgctttcaccatctctctacccatcctggcctgctctctctctaatattctcctcgcctcctcctcaacaacaccttcgccctcacctagcctgccgaccaaacctttgacaacttcggcctccatgcatcccaactcaaccttcttctcagcgcctgacgagccggcgacggccacccgacgtttcttcgagggtgaaagcgggatgaactgcacgagcgaactgtcggccaagtttgtgagcagggtaagaaagtccaaagggctcacgggcttgatgggagagtctttcgaggaaagcaaatgtttgtacgtcgagtgaagtgatgaggttgtagtgatctctagaccagcggacgaggagggagatgatgcggaagaggtcttcgtagcaggcatagatcggacggaaagtggaggaaggttgtacgagcttcgacgagagtgaacgagaagcgcgacgagaatcaatctggactggaggttgagcgcctgaatcttggatactgttagggatgacgttggctttgccttcgtcggcgtagtagggagattcgagagactatatcctagagctgaagtggtaggagaggatgagggcggagaaagagtcggggcaaagagtcgacttgcagacaatccagaggaagacaccatcgacttggccttgttgagagctttcaacacgtgaggcatgcctgctcttggagccgacttcgcatcgagagagctcaacattgcgttcacgacctgacttgccgaactgtccgtcgttgactttccgtccgacagatcgctaccgccgatgatagtcaacgtgcttgtcgagacatctagaccagccttgagaagagctttccttttctgctcaacctcgacaaactcgatgctgattcggcagatgtccaagcacattcggagatctccgttctccgcctgaacctttcgagcggcaagctcgatagccttatcgtccatcaacggcgtaatgacactatcgtccatctgctcgacgagcggaagaagtgttcgaagtcgggaacgaacgatagcggaaaggtcctgattgccatatgcagtgaaggagagaagacttggctgttggtccatcttggaaaggtatcgagtggcgaagtcgagggagttggcaatggtgatgattcggaggttaggaacacggcagggaagagaaaagatcgtctcaagaagaacaagggtgggtccagttggggcttgagtagagcattggagggagatcaatgagtctagctcatcgagtacgaggaggctaaggagcccaaataagaacgcgtaaggcggattccagaattaggacttgtttcttctcaatatgatgaatggacagttacgtacaaggtagactctgaacgatccgtcaactctttgatcaacaagtccttggcgtctccaacccttgaacccagttcaataccgagcgctttcgcagacttctgccatatgtttcctcctccaccaacgcagttcacgaacccgacctgccatccttttgcctgatccttcagtctgttagcaaccgaggtaaccaaagcagtcttgcccgttccgggttgtccggcaatatacattgttctgggcgagctctccgatgaggacgaaaggaaagattgaactgatcggcgctcgctatcacgcccgatcagtgtagaggaggtagaggtggatgcgtgggaggaacatcgaagaagggaacgagcaagagaaaagatagatggtaggggcgccgccttgtaaggggttgttttagaaggagttcggggaggggttgatgagcgagaagatgatgtagaaggctgttcggagaaagataatgttgatttggctgaaaaacgaagagcataaggcgaacggttagattgggtagattatcggtcaacattcgcgcgtcaaccaggaaagaagagtttgactgacaaatgttggctttgactgatgtcatctttcctctggagcgaggagtggcgacaagctcgtcaactgaatcgcacgtctttctcttctttgatgcgctcagaggtgggagctccattaccagcaactcatcatcagagccttcctcgtcaacagatatcattcttcgaagtccggccttttgggcggatatgctcttggttgaagctttctcggagcaactaaccggttgtattttagagggagtctgaggtagtttggatgtattgtatgaggtagaggtggaagctgtacgggcagacgacctggtcactcgagaaggggtagaggggatgataatagaggtcatagtgagggaggataagaaaggagttttaagcttcggggaatgaatagaggtgggttcgagcgtagaggaggagcaagggtttagaggagggggggtaacactgaggatgataaaaggagaaaaagaaaagaaaataaagagaggaacggagaagtgatagaggagggtggaaggtaggaagaaggtgaagcggaaagagtagcaaagaaacttacaagaaagcaagcaaaggggagggtagaatgatgctgacgcgtcttgttctgacgcgtatgttggaaggtagttcaacatgacgcgtctgtcatcaggctgagcgcagtctccatccaaggccgacatggatcccgtcccaggctgaggatcatatattgagggtcagctcctgggacttcaaatcgtgggctctgactctgctccggcggtctccagtgcggacgttctttttttcgccgtaaagtcctttggccatcaccattaccactccctccatcttttgatcagaacatacgacgacagtgctctcttcggttcacacatcctactcctcttgagcattgcccttggaatattagatcgttttgagcgttcgtcatggccgatcacgttgcttcttccgccttgtaaatctcttgattctctccaacttgtcaccttttttttcttccttctattcattgacgtttgcattctactttactcgatcccgttccttcagcacaaagatctttcgtcgctccaagtttgcctcgtaccaatcatcgataggacaggtgtacacttctccccgagcctccctcgttcgaggcgattggggtatcaagcataccgtttcttccaaatctcgaagcaacaataactcccgtgcaaggatccgtttcttgactattcctgaggttgattctgagcttgggttgcctgtctggaagattgcggacaaaagtgctcgatttgttagacagtggggaggtgaaggaatgccggccaggattgtctctggagaaaagtcaacctcgtgggtgacttacggagggagtgtaaaagaaccgtggaaggagcaaggaaacaggatcggagccgctcaggagtttgcaactctacaagaaacatcagcatatgggccaaacgaaaactttaccaaagacgatggtgataagatcttccgtgcgcccgacgtcgagctcatgactcaggatcagttccagacgtatctacaggacgtcaagagacttcagccagcctaccgaacccacctccacaagacaatgcttgctaactttgagcgatctcaggaagcctcgtcggccccgtcaaagatcaagaagaccgatcgggaataccatctacaggagcttgctctgtccaagaacatcaacccggtggcacagtcgaccgagttcctcaaccagcactacagagagcagcgttctcgagcctctagccgagacatcgcctcattcagacatcctaccgcaggtttacagtactctctacccactaagagtgctatggccacaatcaagccggtgactggataccactttgctggtggtaagaccggtacgaattacgttgccgttggtggtctgattaccaatactacgtcggatagccaaggagctggagcaatgagctctgtcgacctcggcatgagtgccaatggagaatggattgagggtgagcgtgacaacactcgagggcgacaccgtgttcgaattgccagcgctcagattgtagagcctcctcgagtggtggataatccgttgagcccgcctcctgctctcgaaaactcgtccgtcaacaatggacctagattcaaattcaatgcccccaacccgctctttgtcgatgtcaagtctgccaacccgccggtcgggaattaccacggaaacatcatctcgtcgaggcgaagttctcttcaggcggcagaaaatgaggatatcgtcttgggaagcagaagctgggttggtttgcctagacaggtgaagacaccgagaggatcgaaggacagtctgagcaggcgggcatctagcccgacagtcagcctacaaaagaacaggccagcgaacagggcgtttatgtcgcgattaggaaaggagtaattgaatcaaaatgaggtctttttctagtgtgctgattccttttcttgggagagtttcatatcgttcttgggactacgaggaaagaagcactgaaaaatcaaggaaaagaacgatagcagtgaaccaaatatctcgtgtcgcttggtactatcagtaaaaggagttgaaagagtcgacctatctgtttcatcgacgatctgcctgcttaggttgcagatgcaacgaacaaaattatcacgacgtaatcctcggactttttagtataatctactcctgattgaccaaaatcaagtgacagtaagatggccaaaggggagttgatcaagagatccctttgatacatggttttttgaacaaaacttcatttgtctgttttttctttttcggctttcgttttgacctttatggtaaaatctcgcgtgtttcaatatcaggcatctgaacaagtgacttgtattttatatgagcaaacaagaagattcattacgacttgaaagtcttaagaggatcctttttctttcgagcacctgcgctcgctccactccctggtcctgccatacctctacctctacttccacctcggccaccccttccacctcgtccacctcgaccacctcggcctctggatccaaccttgctaaatggcacgttcaagtccattccagtagacgtagtcgatccaccagcttcgacggcggcactagtaggatctccattgccagatgaggggccagcgattgcggttatacggggcatgaggtaagatggaacatgtttcatgtgagactggactctggtcggatgaagtggggcatcatgtcggaggtaggatagatcgttcgggttcatagcaaagtgggcctgttcagaaaaggaagagagaaggattgcgagatgcaaaagatcagaacaaggccaaaaacaatgacggacagagtgacacaatttgaaggatggataggtcaaagcttaccttgagtttctcagaattcaagagctctcttctaacttcctcccttctggcctccttgactgccttcctagtcacactccttaaagcatcctccattctgtacctgaaaccttcgacctcacccttccttcctccccagtcccactcctttatccctcctttaccaagagcagcctcagccttgatgcgct

SEQ ID NO: 2452 - DNA, 36807 bp, Xanthophyllomyces dendrorhous
tctcatccctcttggctccttccaggctcaaaatcttgtcttttccccattcatcagcgggaacgacgaaagagattgccaaaccagattggtgggctcgagcagttcgaccgactcgatgagtataagatcgcgttgtcgtcggtagatcgaagttcaagacgcaagaaaccgagatgaagtcgatacctcgggacacgccgaactccttgtcggctcgcttggacttccctgaagaagatttagaacgcttggaaggttgggacggcgcggcgcttggagagagagctcgttttgtagaagtggagggaccagcagcatcagcctcagtgattgccttcccatcctcatcattcccccgagaagtggagatgactgtaaattgtagatagaagagttttatgtatgatgagtaaacgcgacaagtgacagatgaactgatgggaagggcgtacactgcggagttacgtcctcctcttccccctccccctcctcctcttcctcttcctcttcttcgtcctcttcatcctctgattgatcatccgctccgagttctccttcatcggtagcgatgatgtaatcgtagacacccttattgaactcctgcacaatatggaacctgtcaattcaacagcggtatcacaaaattttagttcctcatctcgagattcaacccactcaaattacacgacaatcgcttacctggagtttaaaggcaactcagaattcaatacacaagccttgacaccaaactgctccaagaagagcttgagtcggtaacaccggtcgacctcgttcacgaataagatgcatttccctttgatgagcttaagcttgaggagcacataagccaacaagaatttgtcggtctcggacgtcttgacatagtactgcgtcagcgacgatgaggccgcagtcggatcctcctctaatcgaaggatagcctgttgaagaaagtgagtatgcttagcgcattgtcatctacaacagtaaactgggagaggcaacgaacagggtttcgaaggaccattcctttcaagagttcgacatcttttgtcaaagttgcactcatcaagaaagactggtacaccttgggcacatatcctccagagaagatctgctttacatcatcagagtgaccataggacaggatgagatcggcttcgtcgattgtcaacgtctccaaagaagatagagaaagcgcctggaaagaggaaggaagaacgcggctgatgagctattgggatataactaaaacaatgagcgtgctgtgtgtaaacgtactttggactgaagcaagataagagctcgggagggggtggatacaatgatatcaggtcggtcggaaagtaagattctgttgcccgtcagaaaaaataaccagcataacacaacataggtcagcctgggctgaatgctcaagataagcatgacgattccagacgcaccgttgaagctgggtactggctccgcccactacgttcgcaaccaagacctccttttcacagtaagagatcaaacctttaagatggttggtgacctgctcggccaactctttggttggaaccagaattaaagctcgagtctgctgtcgagccgggtcagagagctccaaagccttttgacgttcaagtaatgcaatcaacagaattagctttcatagttggctgacaagctgaaacaatagcatgtctctttgcgttctctccctagaatatatcagatcaatatttgatgtacccacagctttagtggcaagaatcttctgaactgtaggaatacagtacgctccggtctttccactaccagttcgagccttagccaagatatccttaccctcgatggccaaaggaatcgctttggcctgaacaagagtcggatgaaggaacttgaagtctgccagagatcgaaggattctaggatccaatagatgagagaagtcggcgaacgagttggtagaaaggagttccgacatggtcaagactagttcaaaagtagtccctgttaggtgggatgaaccagaaagttagcagcaaggattttttgggagatttcgtcggggatgaccttaatcagaagcagtacagtattcaaatataatatacaagaattcgagttatctcctctaccgtcacgtgacataacagctcgattagtttggattgctcaagaataattaaacccagcgcatatatatcatcaacttccttcgatccaagggttcccgttactcgctttgaacgctgctaccttgacaaaatcaaaatcatcatctccttctgtccaccattgagactgctccgaactaggaggaggtactgcagaagtagagatgtatagcaaactgagtcaacgtacgcttcatggatccaaccaccacaaaaaagaatagattcggaatatgaagcttacagcgtggaacgggttcctcgagggtgctacgaacagaccgtatcgaccgagacgatcgagacacggatgttcctgtaggatatgtcccaagcaacatcttgatctgatgagttatatctaatcttttggcctgatcaataatctggacatctgcctcgaatagagagaagacgggccggtggtcggacgtcttgagaggcgctcggaagtaacgactttgtctgagctgttaagtatgaaaaatatcgtgaagattgttaggttacatctcaaaaacatcgaaacgagatttatatcttaccctcgaacctctatatagaatacggtcagtccactataattcgaacaaatgagtacgcagttatcagctctcaagtaaattccaacaagaaaacattagctaaaatgaactgacagcaggaatccgagccttctcagatgtgtcgtaggtgtccgtcccgttgtcatatctacaaccagatagaatcagtcgaggcctgtgcgattaagagagacgcaaccctgtcaagtatcacgtacttgtaagtaggtctgaaagtgatatctccctcttggtagtcaggaaatatgtctgacttcgacatatgtcggtttagctttcatgatgagaaaagaataaagaatatcagcactgaatatgactacagccgagtacttaaaaccggtgacttacttgatccgcttctaggagcggttctagattgtcgtttatagctaaatccctgacatcttcgttactcatatcaattcgatagttgaagctaccgtaacgacgatgggtctggtaagcctgagaactacgttgtgaagctcatctcgaaagaagtagacgtactctccagcccagatgatgttcctgttcatcgtaaatgaagctccgttagacaggaaaatctaatcggtggcatatgtcacagatagcgacaaagaaacgtgactcactcatgactagatattgtctttcccttgagaaatcgaagtccagaatgaatagtccagaagtcggcgttcctctcagccacatttgagtggccagctgcaaaatgctgatggacccaaggatgacgagtaaaacaagcgaaaccgtatcagtagtgactcggacgtacccagcgaggacacttgaatgatgatattctcacagctgtcacaaagcagaacgacgaatcaaagatatccattcggatagctacccctcctttgtttccagacataccccgaagtccggtctatgcatttcggtcacgatcaaacagcaacaaaaaatcactttagtacgcgataaactgaacgaaatattgaaagaatgaatggagacacaaaccttcttggtagccccttcaactcgcctaactgaccccgccagacttgatttgataaagataagtagagccgttccgactagctagaagacacgtggacgacaccaatcagtacaacacgcaagtaagatgatttgacgagctctaagatgaacaagaacggacacacctgctcgcttctaatgaggatataatcatctttcttgtttggtctgttggccaaagtcgagatgatgtttctctcccaaacgagtctaaaaacacgttaagattattaagaatttagttagacatgcacccaaatcaactggttcgcctgaatggctattcccgtacctcttctcaggatcagtttggactatctgttgagcagtcaagggtacaatctcttggaatgctatagagagcacatcgggtctaccaattgaatgtatagaatagaatcagcagcacgtgcagcacagggcttttgtacacgactagagaactcactcagagacaccttcaaatcgcggatatacggtgaaaaaaggacacgcaacagtcaaaggtctagactcgattgatttttagtcagaaagatcgatgtgactgactggaggcagggaacaaccacggtatcaaggattctcttgggctcttcccattcaaattccacgttccagtgaagatatcgatttgtttgcttgatgaaaactctggttgtctgttgatatggtgtatacaccgaaaccagcaatgaacgaggcctatgggtcagtatctctcaagagcctattctaactagcacgtggcagacgtatatatatataaggctgacctttgatttaatcgatccttgagtaattgatttgcaggattgaatatctcgataggatgttgatctgccaacataccctgtcgcggaggagaaaccccaagaggagaagaaggtttaactcatgactgagctgtgtgtagcttgtggaatcagagcatagttgactaaccaagagcatatcgattgcaatctgtttcgtcttgtccgtaaatgtattaacataggctctgtattgatcaggaatggacatgagtcagttgacgcacatagcaatccgagccaaacattggcgttgagatgtaaagacaaacctcccgacgctcttcgatgcatcactcagcataccccccagtgttctctttcctgtccttgtgaatgacgtgttgatggcgccagttccagcatagaccctgtttgagcagtcaggaggatataggaagtagagtatcaagaacaaagaagcgataattgagtatattgatttagcaacatttcaattgagcctgagagtagaaggtgatatcactttgacagaacatctccgttattggcccagatatctgaatggcttgtccatagaagagggatgttactccagatagggttcacgctcttcaagaagctctctacagtagctgccgataagatctcgcccaccacctatttaatccatgcgtttgaagcaaaatcaaaaggaaaagcttgtaagttgttgcctgaagagaagatggggtgatgctggagcgaacagaggaggaatgctcacattagtcctgtccagacaatccaagcaattaattctcatgactcccttctgctcttccaccaccccccttccaccttttccaaagtccacaactgtccaaccgtcttcctctaacgcatttcgcacaccctcgacccttctgacaccttgtctgacagactcaactccacctactcgaacggcgccatggaagtcaaaatttgtgatagaagcaagaggtggaggaggcttcgaagcgttgtagacgcgaaggtggttgttgtagtttgtggtcaaaattacttcgttatctttttgtcccagcaggctatgatgcaagttaaaatgatgttgaaagtcaatcagtgactgccagctcgttctttactctgatcaacgacgattgtattcgatcaaaagagaagaaaactgacttgactgcatggaccgatccatacacatgcaccaactcgtcgaaatgtttttcgaacgccagttgagcagctgacatcggtcttgtgatctggattttttgtccaaaggtttggaacccagcttgttcccagaacaaaggaacgcttcctctaagctgtgtccatgatagggatatgtcatcgacagtaagaatagtttccgtctgtcaggatgaacagatcgaagatgttagacggatagaagttgcgagtgatagatcatgagattcatccacggagaaggccggagcgagggaagagtagaagtgacagagagtattagagcgagagagatacgcgtgtttactgtcagtttagaggctttttgacgcggttgttgatactgctgacgacttgcctctacaaaattggccacgttaccatcatcatcaattcctctggtgttgaacctggttccggctctgcgccaactcaatctagaaaccaaggcgagcgtcatcggtttcgagagctgtgggagtggtattgtcgccatctgaacaaatccttggataacgggaatctatgaacagtatgataggacatcgtctaaaatcaaaaccgggtcgcgctcgatagatagaggactagtcttagacattcatgagatgtcgaactacgaagaggtcaataggacgtaccaagaacccataacgatcaaattcgtctgcctcttcttcttctaatccatctctccattctcgcagcccacctaacatatactcgttccagacaaacctcctatcctcgttcataccctccttgccaccttcttctacactggtcccttccctctcattcctcttgaccctttcctctagtctactactcaagtcccagtcgcctctatctgcgaaaaagaatgagccagcttccaagatcttttttgttccctgaagagggtgttcgaaaagagattgaggagagggtgatggattgggagaagcgtatgagggattggtcgagaccgattcgtcgtatgggtccacatatgagttggtattggcgaccggagaaagaaatagttcgctatcccatgaagaagttgtgagggaatggaagaaaactgatgtgatcttggatacaggttcttcttggctcgtgctgcagttaaagggaaataagatatacaaaagtgtttctttttaggaagcgtttgagcagtccttgcctcgagaatatccaacgaacctagtaaccggtctgacatttccgactgatctgctccctgagattaagcacagaaaaatctctggtgttggactagaggttgtgctcgatccgcctccgcctcccaccaagcctatgatgccgacgatatcttggctccattgaacacaatcgtccagttcaagttctgaaacgggaataaactcaaccaccgcggtgtatgcgttggaatcagaaggatgactaaacacgagagctttgggtgcatcaaggctgggaagaagaatgagaagtcgatttggagacgatcgtttgatatctgaaagttggaaagacgtatttggtcagtctgatgcaaggaatgatcggatccaagccactacttacagagccgcatgatggatgtgtcaactgtttagatcagacggcgagacggatcgtgagtctttgatcgactgcagctgactgagtttggtttgaaataggaagctggtcgatggcttatatgctctggatacgatggatgacgaagaagaaagaagagaagagataacgagatgaatgataaagtagatagaaaataaaataaaaataccgccttagctccatcaaattcttccttacctatcatctcatctcgtctcgtgttatgccatgccatgccatgccatgccatgccgtctgatggaatgttgcctcttgctcacatgctcgccattacaaccaatgtttttcttggtcggctcgtcgagatgtcggtttcgtgttcaagagactcttctaccgtctagccgctcatcctgttcactgaacaatgtctcgcgaatattgacgcaagccagtctctcttcagatttactcatcaatctttcgtaggtaatcatttataccacactggtcaacccttcctggtcttctcgacatctggattccctaactccttctgtcttgcctctccgctccgatgaggtcaagaaaccgtatcgaaaaagtcgattgatcgagcattctgagcgtattcttcctttctcagggtctcctccatcttctcatcctttatgacgctcgcaactctctcggcctgcaaaccagcatcatacatgatcccaatccgtgcgacttgagcaattggaatccttgagtacgaccactgtgctcaatacatccagtgctctctctgctgtgctatcaaacaccaaatttgaagaaaaaaaatcaatcatataatatataatacgccgcttacctaatccgccctggatccggcacatggctataaccgagatcacctgttcaatccatcagctcggtcgattctgtttgctccttccgtctgatcttccatctcgtctaggatagacatgctatcacttaggtcactccgctcgaatatcaacaagactgttcctctcccaatccatcctctcgtcactaggcgtgtcaacattcgattcatgtcttcttactcagcttcaggagagtcgactctgcgtcctcctccagacgaggtcctgactcggatcgcatcttatatccaccagcctccttcgttcacgcctctagcctaccagacggctagactctgcctgttggataccattggttgtggtttggaaggcctcagagtcagtggtgagctaagagcggtgatgggtccagtcgtcgaaggagcggaactctcaaacggtgagcacaggtctcgtgacttgatctatagatgcatttaagatgatatctgaaagagttttcttgtgccctctcaggagcgaaggtgataggaacgaactataaacttgatcctgttcaagcggcgttcaacatcggcgctatggttagtctcatccaacttcttatagttgcgccatagtgttcaaatcccagctcacttcgagtcgttgcgctcgatttcctgtcagatccgatggcttgactttgtacgtcagatcttgcatcatactttcatcgcaatggacatccttcaatttgttgagacatgacatgttttgttttgtttttgcttttggacagaacgactgcttcttagcagccgaatggggacatccttcagactctctagggaccatcttggcgatcacttcttacctctctaacacggatccatctaagaagtttaccgtcaaggacgtcttggaagcaatgatccaggcgcatgaagtccaaggtggtcttgctttgctcaactcattgaatagggtcgggttggaccatgtagcatttgtcaaaatcgcatcgtaagtgatctcgcttctcatcgtctcgttctgggtgagagatcaagataatgactgattctgtttacatggagtatctctacagcacggctgttgcctccaaactcatgtttgttccgataagcacataaaagattgatcctatctaaaactgacaatatgatgattgctatctggcctctgtattcaggggttttactgaggagcggactatagatgctctctcgcaagccttcgttgatggacagtctctcagaacctataggcacgctccggtaagtacttttcgtttcaatcattcagcgtctggtaaacaatagtgacactggaatggatattggcggaaccttgctcgcttagaacacgggaccccgaaagagttgggcagcgggagacgcatgcgctcgagctgtctggctttgcgtaagccttttctcccagaatttaccacacaaggatgcatactcactgcgtcatcaaggttgttctggtctggactactaatagttgatggtcaagaaaggtcaaattggctacccctcggctctgaccgccaagaaatggggattctatgacgttctatttgccgtgagttacctcttgaacgcgcgtcccctgttctacataccagcctaggagatctgaatattgtttttggttgttggtttagggcaagccatttgagtttcaaagagaatttggctgctacgtgatggagaacgtcttgtttaaggttaggaatatgttatacgtctgtaaatcgcgcttcattcttgttcattcgaattcgctgatcttctttgacttctttttttttggatccgtgatagatttcataccctggtgagtggagtaaaaccaattgcaaatcattgcctcgaaactcaactgaccttgtagaacatgtgtgacagccgagttccatgcccaggtcagtctgttcttccgttcgatacattaccgccttgcgcgtatcactctaactcatacgtgcaagatgacatcgctaccgtatgtcttcttctggctatattcagactgctgtagaggccgcacacacattacatggtgtcctcaagagcaagggactctcttcagatgatatcaagtctgttaagatcaggacgcaagaagccgctatccggatcattgataagagtggaccacttcataactatggtgagttttactgctttcctctctcttttctactacatgaagcgttacactaaccggatcacatccgttgctttggcgatccaacagctgatagagatcatacgttgcagtatatggctgccattccactcatctttggaaggctaaccacagaggactagtaagtcataccgatatcctgcatatgtttctttatacgaatgtgattcatgaagctgaaattgagatgaacttgcagttcggacgatgttgcttcggatcatagaatagatgaattgagagaaaagatggtttgtgtcgaagaaaagcaatttagcgtggactagtgagaagctttgacctcatcgtcgcatgttccgatactgtgcccactgactatacttttgcgcgcatgggtgatgtatctacactctgcacggctttcttctttcgtttagcttggatccagaaaagagatcgatcggaaacgcgatcacgttgactttgaaagacggaacggtgttggatgaagttgtggttgagtatcctgtaggacatcgaagaagagttcgtccgatctatcacatttgtctccaacccttctgaccaaaactgagagatgatttcgttgattctttccttgtcttgtcttctcgtcagcgagatgaggggacccccttactacttgagaaattcaagaggcatatcgtccctcacttcagccctgctagacaagaagagtatggcctatctcgctttttcattctactcatccattgctcatcctggccccgcgctgatatctggccttgaaaacattgatgatgttgatgacaatgataggatcatggcagcgacagttgatctcaaacaactggagcagatgcctttgcaagatttcgtcgatctatggattcctgagaagtaaactgagcgttgagcgaccgagttgaggaaatgagtattcataccgttgtattgtcgttagctgttgttatttctcctttcttctctcttctttcttccctgtaccattgatgagtgttgtcgtcaagaacgttttccctcatctaatctctccggcatgtatcgtgaacggaaaagaaggaatgcaagacatgcaaggagaaagaagaagcgacataaaaatctgatcgtgtccggccgaccacagttgttgttccctccgttacctttgcttataccgccgcctcaatctctgcggcctcagcctcggcctcagcgaccgcctcctcttcctccttttgatcgttctccaaagcctcggctaccaactgttcggcttctactttttcttcgccttcaagatccttgaacgggatcaaaggttcttcagccgctttcaatccgatggaagcttccaacttttcttcccttctcttcttttcctcctctctcgccaaagcctccgcctgcctctcctggattacagtaggaacaagggtaggagatggatcctcgtcgtcgggtgaaccggtggcgagatcgtcagcacctccatgaaccggaacgccttcgtccctccctttctcaaggatctgttggccctgcgcatcggctgctacagccggatttgcgtcgaccttggggtcgaacacgttcggtcccggttcgatcttgacgttgaggctcccggccgttgtcgattgggactcgattggttccgggaacaagggactggtcagaggcttggaggtggtgatgtcgtagtccgatagggagtcgtgaaagtcggcacacgaaaagtcccaagatttcctccatttgccggtttcacatttcgtcttcgtccatggagacccgtagcttaacgggctatatcttctgaaaccgaccaacgtgatgatcacgatgaccaacgcgatcgccagtctagatttgggtctgatcttggaagtcgccatgtcgaacaggacgcagagtagaagaatggagaaccagagggcaggaaggtagtgatgcaggaagagctgtcgttgcatcagatagaatggaaagtagtgtaggaaccagccgccaaggaggaaggccaaggtggagtcatatcggacgatcaaagctgggtatgattagttcaaagaggagcgaggtatgaacgcttgatcaatagtcttcatcctgacctgtgggacgcgtgatctcggtcgaataaagagaaagtggacaaacggtggtgtaggtctctgaatcctctcttcgctctcagaatcaacaatcctctgaaagccatgtacgtaagaacggcgaaggtgctgccccaccaaacgaacggattaccaatcaaatagatttgtcggtgatccttaacccagaagttctgtacgtggtatgtaattagacataaattgtggttatcagaccccttgatcgcttctctttttttcttcacgcacagagtctacgaagaaggttgaggaagagggcaaaaaagaacacgtacaattcctcgacgcatgaaaggccaggacgtaggtcttgaatcatatgcgtgtctatcggtcaatccggcgttcgtccgccacatcaccgcctgcagttccaaaaacttggacaagaacccgggtcgctcgtagttgactcgatctgctccagatggtactgtttcgtttcaagcaacaacaaacggaggcgacgggtaaatgatatattgcatatctcacgttggattcccagatagatgcaaactcacaaagagggttttcgtttgtctcgatataccacagtgaattgtccaaggaagggttcttgttgcaggtcacctcttgctgctcgaatccccattcgggtagcttgaccttatgagagaacaagtagcaaccggtgagcatgtgtcgaagtctaaagtgcgagcgcagtgttcggagttgttttcgggcagatttgttgggagagtgggatagttcaaaaataaagatgtcgtttctgtatcaagataatcacagcacaaagggacaagaggtgtcagagtgtcctacaagaattcaaatgtaagtatatatacgaaagttctgactaacgcatctccctcaaatccctcaaacccgtaaccgctaacttcctgctggaagtcgacctcactgattggcggtcggacatcgtgactgtggagtctcttttcggttcctttgtgaagaagcttcacctgatctccatcctttacgtatttgattgggccctcttgtacggaatgggtcgtgttgacgataagccagtcattgttgtcatctttgtggggatacaaggtgatctgttgttctgaaagattgcatgattcgttgttgttgttgtcatcgtcatcatcagtgttgttgttggatcaacctgggactacaaatcaaaggggtgtcggaaggacttacgttgagagccggaagggtaattatgcggatgggaatggaggtaaccgccctgagtattgtaatgtcggatactgacggtcgagccataggccacctctagatttgcacagacagagaatgtatcattttggttagcttgtccgtagctctgagggccctgccaaaaaaaaaaagtgagtcgtccaagtgaatgagttacacaccggcaaatgtgtcggccatgccgtgtcccctgagtgtgtgctggaactcggagctcatgaaaccatcaccttctccgctagaatgaaggagccagaaatgaactctgaaggtaaacatgtacaccaagatgggcaccatgacgagtcctgcaagcctggccacaaagtgtcttgcccacattcgcggcttgaccttgatgtctcccagaagtgtccataactggatcaccgtcgagaatccgacagtggcgatagtgaagaggcctacccatttacaactcgcgacgaaacctagattcagtccggtggacagaagccacctccaccacgatcgctggaaaggcgcgtgggcgtcttcattggagaatcggcagtatgagaagatggtggtggcagtgaaaaagatgagtggggagtcgagcaagattaatcgggattgagctacgagcgcattgtcaaatagaacaagcgaagagccgagtagggaggtagttgtggtgcacgacagagatcggagtgttaggtatgttaacgggacgagagaaacgcccaagaggccaggtagaagccgcatcatcacgtagggaacagaggcatcgtattctctaaagatgtgccgtcagatgaaagtagataaaagtgttggtagttcagcagatgaaaggaagaggaggacaagaagaagttgatatagctgactttgcgatgtccttaaagtcgtcgacacctccttggtagccaccgagccaggcggcgaaggtgatgagtagtttggctagcggtgggtgaacatccataaagaaggtatgtcggatgtactgcagatcaagtgaacagtaagcagtttggttatgttagggaccggcatgtaaacagctagcatgactatagaaccgagaatgattaccttggaagcaaatccgccaaagtgaacttcatcgaatctgaaggaaagcaaaagtaggaaggtgagcaaggctcagtatggtgtacacacagcagactgaggtgcagaagacggagaagcgaaaggaaagagaaagagaaagagaaagagatatataaacagcaagagatgaaaagaagaaggagacagaacagagacatacactacacttgatggctcccagatgttccataatctgactaccaacgagagagcgacgacggaagcgacgaggaaccactctttcctcttgatttgagaaccgaactttgctccagcaagcgaactggaagaaggcttgaggtatgctgacggcgaatcataatgatctcttgacctaggctgaagcagcctggcatcagcttcgtgtattctatttggcggaggaggtggtggtggaaagaacggcgaaggtttggacgccattgcgggttctctgagttgaggtaatggacacgatgggcaacgaggacgacaaagagtaaagatgatgtttagacagggagatggcaaagctgtgcaaaacgtgttaattttgggatgaaccggcctggttcgagaaacgaaccgctcattcgcttagtcatcacactccttgaacaacgaaccacccccaacaacctccaaccggaccggttcatcgccctacacgttagggttatccatcggtctgtttcgctggcgctttctctttttccgttttacttctgtttctttcttttccatctccttttcgacatccaactctcgttcatctttcgtaccgctctcgttgaacatttcgtcttgtctctcacatcttttgtcttcccccgttcccggaacatctacctttcttactcgtcaacggattaatcgctcatcggacaactatggcctctcttacagctgctgaacttcaaaaggttggtctgtcgttattcgtgatttttctttctttcgctcttctcttcttttctttttctcctttcgtttcgtgctcttgcgtctttttcttcttccttttcttctttctctttcttctttctcttttatgaccttgtctatctatcacttcatgcgtcaactcgctttctactaccttcttgttctgacgctctcttctctcctcttctctttcttcctctctcctattgacccttgttccttccttcctactcttctcagcgacacgctctcgaaggtgcccctgatcctttccccgcgttccgagaggaaacctcctctcctcgaccttcctcgtcccaggccaacggcaagaaggtcgggttcaacactgattcccaggacgccttcccatcgctcgctccctccgccgctccccaagctacggccaaggtccctgcttggggatctggcaatgcgaccaaggcccgaaccgctcctccaaagcctgttggcgtaactgcgtcggtttctctcgtcgtcggcacggtcactgaccgagatggcaaggtcctcactctatcgactgtgatgaagaaaatccagcaggaaacctcggtctcgctcgaggcatccactcagaaaaagacctcgctcaccactttcttcatcaagggtcccaacgccaaaaccgtcgaacaggccactaagctcctccgcgccaggctcagcaagatcgtcaccttgaccgtcgatgccccgctttccactctgggaacgatcatcggacccaagggagcaacccttaagcgaatcaccgatctcactggctgcagaatcaacattcctaagaaggacgacgccggcgctgcctcggcaccgcccacacaggctgatttgtccactgactctgactcggaagccgaggaggaagccgatgagcccaccacgaccatcaccatcgctggacctgagccctctgcgctcgaggcccagcgagagattcaatcactcgtcggagagcgaacttccaagacaaccgtccgaatcaaggacatccctccttcgttcttccccttcgtttctgccaaggttcctcaacttgagaagacttacggatcagacgttggaaaggagctccgagtgcacgtgcctccgccggcgatgctcaaggtattcaaggcccaggctgacttgttggagagcggagccggagtgaccgatcctctggatgtagagtcaagcgtcggtggtaagaaggacaagaaggacctcaggcttgttgtcagcggagacaaggaagcagtcggtaagaccgtccaggctatccatgagatccacgaggaccttgtgagttggttgtctctgcatgcaaagaaagattttttatttttcgtagttgaaagaaacatgctgatacataaattcttgcgcgcgcgcgcacacgctctggcttttagatctccaacacttccactcttagcgtccagatccctaagcgacagcaccgattccttgtcggagcgaacgccgatgagatcctgtctgcacatgggtgtattgttgagcttccttccatcgagtgagcatttggctttggtcctcgccctttttctcacttttctttgatgtcaccatatgcatcgagctgatgatctttcactcaaccaatcaaatagggatccctctgacaacgtggtcatccgaggacctagccagcagcttgctttggcactgggtgccgtacgtacctcttccggttcctctgcctgttttcctgtccctgccaacctctcttctttgctttcgttctccaaaggccatggtcaaagccaactcgatcgctgtcgaatctcttgatttgtgctccctccaccgatctcactcttctccctcctcctcggctctgccgtttgacccggtaacccatggaaagggattgcttcgataccttcaccgatccagcaagcttcgacagattgccgaagctaacaacgtgaagatctatactccgttcgccaaccagatcgagtctctcgatcaggtcaacctcgagattgttggtgaggacagggagagcgtgaaggccgtcaagaaagagctcgtcgagctcggaaagggtttagggccgggacggatggaggtgattgagatcgatcaacttgttcacaagttcttaatcggaaagggaggactcaagtcagtgtttccgtctatcagatcccttgctttacaacttttcttttgttactgacccgatgtctatacctgataccgatggatcatcaacaggatgcaaaagttctcttccgagcacggcgttggtgtaatcttccctccctcttcttcgaccactccatcggatgacgttctccttatctgccctccggtacccaatgaggcccagcccacgtctgctgccgatatcaaagctcgagacctcaagatcaaggagaagcttgcttttgtcaaagatgagctccttaagttggcccaggaggcagaggatatcaagacccgggtgttggacatcgagtccaagtggcacgccgcggtcatcggcaagggtggagtcgttctgaacgcgttgatcggagaggagaaggccgtgtctgtcaaggttggatctaccgggacgtctggtgatgatactatcaccatccgaggacccagcggcgaggttgacagagttgagaaggaaatcctcaacatcgtcaaggatgccaaggaggacttggccatcaacggatacaccgtcgagtttgcggtcgataaggcttacgtcggccacttggtcggttctgccggatcctccatcaacaagcttcgggacgatcttggtgtcagagtgaactttgacgatgcctcgcccaacggcgctgccgttgataacaagaagaagtcgactggagccaaggcgacgtgcaagatcgtcggacagagggctcctgtcgaagaggccaagaggaggttgttggctcaggtcgagcgactggcagacgagacgacgatctctgtggttatccctcgaaagtaccacgcctcgttgattggaagctccggcaagtacgctatccgattggaggagaagtacggagtcaaaattacattcccccgagataaggagtctgatcaaaagtcagacgaagtcctccttcggggtggcaagaagggtgtcgcctcggccaaggctgagttgctcgaagcggtggagtacgagaaggagactggacagtcgctcacattcacgattcctagcagggcggtcgcaaaggtgctcggcaaggccggttcccagatcaacgagatcaaggaagagactgatgctcagattgatgttgaaaaagccgagggaggggcgaaggagacgacgatcaccgtgttgggaaccaagaaggctatcctggctgccaaggctgccatcctcgctatctctgaaactgtcggagaggagatcacgacgacggtcgagatcgataaccagtaccatcgaacgttgattggacctggagggtctcgattgagggaaatcgtcgcttcctgcggcggtccttccgacgctagggcccagtcgggtttggtatcgttccccaagggcgcagaaaatacaagcgctgtccgacttcgaggtgagccttcgctgatcgcaaagatcaaggacgagcttgagcgaatcgtgagcgagctcaaggacaggatcatccttggtgtttccgttccgttgacgcttcacgcctccaagatcggtcgaggaggaagtgccctgaacgatctgcagcagaagacaaacacggtgattcagttccctggaagcagacagtacggctcattcggcgagcccgaaaacgcttctgaactgaccgaggctgaccctaagacaattgtgaaggtggctggttcgaggtcggctgtcgaggctgcgatcgagcagctctctgtaagttgggatcttgtcaaatttgcttcaaacctctttctcccgcgtatctgacgtttctatggacttttttttttctctctctttcgggtttctttgatataatttaaacacggaaaaaaaaagattcaaccggacgctcctccttctcgcacccgaaccccccagccggatcagttgtcggagacagtgtcgatcccggaaaagtacgtgtttgcgatcactcggggattccttttcaggaacttgcgaagcgcaggggtgattgtggaaaacccgcctgtagcggagcaagaggatttgcctcgaccgactaaaaagtctgcggagggatctgcggaaaagggatccacccgagacgagcgacctactggtcggatcgaccaggacgacgacgacgaagcttacggagcgtacgaatctgagctggactaccaattcgagatctacgatcggtatgccaacaaggatgagacctcagtcgagtgggtgttgaagtcgagaaaccaggcttctttggacaaggcaaagaaggtgatcgaggaggctgttcagtctgctgagcaagcccggtatgtcggtatccttgccggtttgccccagtcttctttgtaagtagagacataagtctttcttcttcattttctctctgtgatcatcccagttttctcgagggggtctctgattcggaatttaaacctgttgcagcgctcgaatcgtgggaagcaagggaacgaccgtgtcccgacttcgagccgagagcggagcagagatcattgtcggtaagggtgattcggatatcatccagatcatcggcggttcgtatcttcatttgtcctatctctttggcttggcatgagacgcatcataatctgatttggtctacaattctcctttgtattttccccttttatccctggtcgtctaacggtgaattagataaggagagcattttgcacgcaaaggaggcgatcgtcgagatcgcgtctctgcccgaccgatattaaggtccaagtttaactacaccatttttctggattccttctatttattttccccctcacaaatcactctattttcgtacttctatgttaccctcccctaaaatttgtccaataccctagttggatttatccttcttttctttgggcgcgcgttttctctctctccttttttatactttcagtttcatatttcttttccttgcaactttctgggcttttccttcaacctctccaagcttctattctgcctcttgttctcaaaagaaagaaagaaaaaggatttaccaaattttctgccttgtttcttccatctcttcttcctttttatgctcttgttgttttcttctttcagtcaacaacttttcttctcagtgataccgactgggaaagaaaacaaaaactcctccctctaagaagattgatctgtactaggaacaaaacaaagagagaaagatagataaagagatagatagacagatagaaagaataaatagagaataaaggaggaaacaagagagaaatcttacaaaccccgaaatcaatgcttgctctccccgcggctgttcggtatttccatccgacaaggcggacaaataagctgcacgtttgaacccacagaccgggttcggctctctacctttggctcctaggccctgattctgtttttgttcctgcattgagaagaaaaggaaggggcaaaaaaaccatgtgtaagtcagatgccgggcaaaaagcgtcagccgcggacaagccgacgattgtccggggaagggcgggcttggccgaactctaaatttcctcatttattttggccaggcccgattggttctcagaattgatagagaaagaagaaaacaaatcgagaaagaaacaaaagaggaacggctcgtggaaatccgtagcgttggggggagaaaaaaatattggagcatcagacggcctgatataggagagaaagagaccagaagaaggccgggcagattcaaggctcgggtaccttatcctaaccgccggtccgtagcgggaggagggattcaaggggagagggcatcctaccggacgggcgctgatttggctcccaaggaaattcaaagagagagaaacccagacttgctgaaccgttcgcgaggccgaccgcgcatttgaccgccgtctagggcaaggttcatacagaaacagctattgttcctcttccacgtttgaccgctatgtccggtttgtactcaggtctataggtgctggtgcgtgtgtggctgactattgattgcctctctcataccgcctcttccgcgcctcatcttttgctgatcgcccgcttctgacgtgccgcctggcctccatgaggctcgctatcaagtttgcagatcaatatctatgtttgtgctgtcacccgacggcttttccggcgctccgggtccctggatgaccctgtgcgcatgaagtgcaatgggcgctcagccttctggtcgcacaaattaaccaaatcacaccacacacacatactcacatgctgcttgctttccgtacttcgctcctctcacagtctctctcatatacgctcagaggactcactcactcatccacccccttggtcttactcagttgcaccctggctcactcactcacactctcttctttcacgctcctctcatccgtttattttttcttgcctctcctcctctatttccgttttcttttcttcttcttcttcgccttcgttctttttttccttcttccacttgaatttttcttcttctcgaggtctctcttctctcttggatctctccttgtccttatccgtccttttggggagggttcacggtaaagctcttgctcgcaccttctctcgacacggctcaagatccatatttcccctactcaatcaccactgctagtagcttgcccaagccttcatccaaacccatcatcttgggcgataagtttcccagacaaagaaacgttgcttcatctctctgtctctctctgtctctctctctctgtcttatcgatcgaatcggccatccaacgatcttcacctggttaggtcttccgttcttctcttttgggtacgtacgttccttcttctagtgacccttgagacgcgttcggcccattcagccgaagtgaatggacagtcaggccaggcggatccggctcgtttcccacgccttcttgtccgttcactcaccgcgcttatttccggcgaacatctctactgttgtctttcatgcatcctcaaacaaaatgccgttccactcacttcaaagacttttgctttctccttttattctatcaatctttctgttctatggccctctttgtttcgtccttctttttctttgccaatcatctggatggatccttccacaggcatatcttgttcccggtttcaactcgttcaaacctgctttgaattctctcccttctttctggttcccgtcttgcgtaggcgctgtcttcaagataaaacaagagaagaaaggttactatcggtgggaaaggcaatcagtatcgtctagaaggtagaactagtcgtgatgaggcaatcgtcctcctcgactgcgttctcatttttctcgtcagaagcaaactcagcctacccttctcctcctgctcttccttctttctcttcgcatcaacaccatccatcgactacttcttcaacacaaccttcccggccgtcttcttttcgttcgtttaaccaacaaccgaccggcccgatcagtctacctctcttgccgtcaccaagaaagtttgaatgcatcgaacctgatctcgatcctcgatcgacatttggagatacgacatacgtctactcgtttcttcctcccggacacgtatcctctctggtaccggcttcatccggttcggttgccgaagcagaggcagaagcagcagcgacagccgttctagattcgataccttcgagttcgacagcgcaacgcacgaacggaaaccaatctatcggttctgatgaggacgaccacgagaaagactcagacatgtcagaccatgaatctggtcacggatcgagaaaccagaacgctcaatccatcgagtgtggccaggatggtggacagacaccggaagatctagcgcggcgtttaggggatggctcccagattgaagtatgtacctaatctgtctcacatggtcattcgactgagaagagacttacacaacccgtcaaacttcttctcgctgcttcgcatccatcgccgtcaccggcccctcccattagataaaacatcgtcgacgaacaagccggcttcaattcaacacgttggaagaaacgttcttgacaaacccaaagcctacaggcacacagcgaaaagagctcgggtcaaagctcgatatgtcccctcgggcagtacaagtctggtttcaaaaccggtgaatccatcatcacctaagtctgattgagtttcggaagctggaatgaaagaagaaagcaggacaatacgttacctcgttggaataggttctgagatcgaggcatggttgtggctaacgttcgcttgtttacttatttatcttctctagtcgcgccaaagtcaagaaccaagcaaaaaaggcggtcgagcttcaagcaaagggtctgttcatgcctctgttgagagagacaccttttcctcctccttcttcctcttcttcttactctattcatccgaccgagtctttggcaggacggtcggggaagctggctgtgggaccgtctcctaatgaaatcgcacaaaagcatcctcgatctcgacatccttctgaggcagatgcgtactcgttgacctcggcccggacgtccatcgatggcaattccccaagcacccctggtagcatgcttctcggtcggatggatctcagctcaaacaacaccaccggcggctcgctcgccaatacgtaccgacagcacaacggcgcgtcgcctcaactagcgagtagtagcagcagcagcagctctagcataggagcatctggtacacacattggatcgatatattctcccattatggatcctcgaaactcactcgggattaacaggagacaaagtgtgccctcctatgagtcgacggatagtctgatatgcagacaggaagaagcactttctggctctattctagggcttctcaaagtcggcccgaccactcaagcagacacataccgcagttcagccgaagaggataggtccttcggagaggataagtcttccggaggatctgccgctcctttggacaggacggcaacaggaccttcttcggttgatcgtctatgcagaccagagagcggtcaactctggaacggactatatccggttacccctaccggtctgccctcccagaccagacaaagcgaacaaagtgatatgcttccgccgccggttccggtcggttctcatcgtcgaccgtccgttgggtcgacgacgacgacgacggcgatgagacatgcaccttataacccgtccctctcatcccgtcgcgcgtcggtccccgcaaactcgacttccgcctctgcttctgtccctgcctctgctccggcttccacctcatttcttccaccggtctcgaccacaggaaatatgtcttggaacttgacgccaatcgaagaccacgagggggcagaagtttacgctcagattcctcccgtaccgcccccgctatcggacttttcacagccaccgcgtccgccgccacctttgcaggttgatccatcctacaccttcgatccagaattatattctatacccactcatcaaccgcattcgtatcaacaagcccaacacttgtttcagcctttgcccatgcaacgatcacaacaaccacagcattatctacatcatcaacagcagcaactctaccaacagtatcagcagcaacagcagcaacaacagcagcagcaacaacaacagcaggccgactcttcatatgcattccaatcatcatcagtcacactggttcctcaatttcaacagcaacgacaacagcagcaacatccgtcttcgcgacctctcgagtccttaccaaatggttctctcttgtttgggtccactacggagatggggcgtgcagtgcatccgtctgaggctcgtgtggatggtatgggtcctcggaggcttgatggtccacgatcttcaggctctatccaggggtcgggaatgaactatggctatcaggaacacgcgcttgagatccaaccttcgacggagttgacaaacgacacctggcaccatgcccaggacaaccagttcgctaggagagaatctgcgtgagtcccatggtcgtttctctgtatctttgtttattgttgtctcgcgtgaattctccattatgctgtacctaaatccattgtttctatgtttgttttctggctggtcagtccggcgcagtttctagacgacttttcctcgatgagcgtgttagctatgcgggacggcaatgcttcttaccttcaggattactcttctgtcgggaacccgacccaagggacgaccgctcagtcattagcgataacggcggcagcgcccttctcgtatatgcagaatccagctacaggaccggtgaatcagaattcaactcccaattcacagttgcaactggttcgtctatcgtgcgacgtttcttgtagcatcagtcgagagttctaatctgtgaccttcccccccccccttttctcctatcctttcgtttgcaactttgttcgggttcacctcaacaaatatacaaacaaaccaaaccaaaccaacaaaacccgattttaagtcattaaagcaacaacagcgggatgacatgaaccaagggctttcgaatgagcatatttcatcccttcgttcctaccagcatcctcttcctcattcgcaagcgccaggatcggagcaggaaacggatttttcctccggaggttacattcgtatgaatgaggatggctatccgggctatccgaacttgcagagaatgtcgaccttggctccttccgataattcatatatagattctatctcgccaaagcagcagcagcggcagcagcagtagcaccaactgtcttgtccaggttctgaccccgatttgactgtagattctggctctgctttggaaaatgattatcaatcctgggtgcccccttcttctcctcttacatctgaatttcgcttttcttgttctccttcttcctcccttctctgatccttctcctcttttcatctcgtcatctatttattcattctgtgtctttgtctaaattccttctcgtgccttcctcttccattttattgtgatttatttggattcagccagtagagtctctcccgtttttaatgcctgttatccttcgtgttgatataagtcttcctcctttcctccttcctctttcacccttggttaatcctactacgggtattttcgtcattgcagttcctcaaattgtacaatcgaagtgtatccctgcgttctctcagatttactacttttcaaaatggaaagaacaaaacgttttttggtttccctttggtcatatcaaacaaccaagaaggaggtgagattagtgtatcttgttcaatagcgccgaacaatgtgtttacctcgtcactgacatcccttctttttcaaatcgaaagcggctgatgagctctggagcattggcagggccgagtgcgacggcgcttatcttgtactgtggattggtttgctcatccccatcataaacgaatcacctcgcgccttctctttgtgccaggagaacttattgtattgaagggacagacatttacctgtagaagaattgtatcttaatgccatcgccacaaattaatttcctctctgttgctgtatatcgtatcttctgtcctattcatcctggcacgtatgccagggctggtctgatgatatcaaaggctgatgtggattctttagctctgcccaagcatactaaaggtggagaccgcagcggcaggaaggcgctgatggatcgtttctgcttatattcatgccgttatctcgtcgtaaggtattactaattaaactgtgacgacggaccgcaagcgacagatatagatagcgtccatatgtgacatttacgaagacgcgtgtcgaataactaactaaaaagaccagatatgtgtcttcggttctttcaacagacggttcgatcggcatcgcttcagactcatttgatgttttgttcaacgttcgtcttgcgactgatcctctgccttactctatctagagatagagaggatcagaatgacagagttgagccaatcagccatcattctgtttctctctgcttacctctatctgatcggccatgtctacaacctttccgggcatgattgttataattgatatcactcttgcgtctttggtacaactcgatgtatgggcagatgacactcccagtcgtacaggagatcacatgtatatctcatttaatttcgcatgagaaattctgagcgtgggatggtcatcgttcgaccactctccaggtaaagtactgattggtcatatcaacacaccgagccaaggtcgagaactgccagtgaataccacttggtttgtttcggtttttgagatggctagatctggtttaggaaggagaaaaaacgccaccataaagtacacgtactctattgtagatgcggtgggggtcactcattcagacaggaaggaaggtgcgataaggaagcgacaaaggagaacatgacatccctgatcatctcgtattcaaaggctaagatctccttcttattaccaatgaactgctttccgaaacctctttattcaagtcccattcttggttctgaaggatgcctctaattgatacgacacccagagctttatcttatcggttgtttggacgagcaactctttgaaccccaaaaattaaggctgtgcttgaccgtgaaacttgacactcacgtgaaaaacctaagagtctcttcgcaaaccgaccctaacgtaatcgggatggaaaaaaatccacctttattggagctcgcgtttccctctctttccttctctctgttacctcagacttcaaggtatgtattcactgtttggttaactttttcagttgcctacgcccttggtggcactccgctcggaacaggagcatcccggttgctgtccatccgccctggaaattctttgttcatgtctcgtcgtccgtcggcttcttcctcgcccccccgtctgtgtcctgggaaagagccaaactcggagattagtaaggagcggacagatggagagcaaggatggtacttgctgaatcgagggataggattgggactcaagtcaggtggagaggacgacttttgtgttgagacctagaccatcgtatcatgacatattccctcgagacgccgagacatgaacatcgaattttttggggactagataaaagcaactaggacaatgctccacttctgtcgggtgtaggcttctgttcattttcctgaagagaatacaagacactaatcgcgtggacatcttgtcttccgttttacttgcttctttcacaacaaaaattccttccacctctatcgtcgtcttcaaatttttatcgcctacccctttggcttcctcgaccctcaccgatctacattcttccttccctcgcatcatttgttctctgtttgcatctactagatgggaatctcaagagactcgcgacacaagaggtcggcttccggtgccaagcgtgccttctaccgaaagaagagaaagtttgagctcggacgacagggtaagagagggtgactatgagtgtatcccgtgtttttcgttcgaatgctaattcatatcgcattgttgttcagccgcttctaccaagatcggacctaagcgaatccacaccgtccgaacccgaggaggaaactgttcgtttttttgaatcaagacaaaaaatacggctaggcgtcataaattgactttgccccccttccctcctgctatgttttcgtttcgacgttatacgtatacagtgaagtaccgagcccttcgactcgagtctggaaactttgcttggggatccgagcactgcaccaagaagacccgaattgtgggagttgtgcgttgaaaattttccttcattcatttccttccagacatgcatggaatcatgttactgattggttttgatccttttcttattttctgttccatcgtcaaactcgccgcccagtcttacaactcctctaacaacgagttggtccgaaccaacacccttgtcaagggagctatcgtccagatcgatgctactcctttccgacagtggtacgagacccactacgctcagcccttgtcggccaagactgctaagttgtctgctcccgctgaggagaagactctttccaaccacgccacccgggttatcgccgagcgaaagaaggaggccaagctcgaccctgagttcgccaagcagttcgccaccggaaaggtcctcgccatgatcgcctcccgacccggacagtccggacgatgtgacggttacatccttgagggacaggagtacgagttctaccgacgaaagattctttccggaaaggctaagcacgccgcccaggcctaaaagtatcatccttgtgtctctgaaacttatggtcatgaaggttgtgtaatagatttgttctcgtgctttagtcttgtctcttttttatcatctcgggtccaatatgttgtttcttcaacaactcaaagacacaatacgttaaatcacgggagagaaaacaaaacatgcttgtctgttcagttcagagattcttaaccaaatgagcaagaaaggtcaatttgcagttgggcacctcttgaaggaattagtgaacgaaaaacaagaggaaaaaaatcattcaagctttcacatatgtgtatgtatatatatcatatatgtacattggatatatgcatacttttcaacccaaacgtctccagtcagttgtctctttcttcctcttcatctttgtctccgtccagatttgatggataccgcttatttcctgaagacgaactcaaggatatatagatgtagagatcacgagctttgctctgtcgataagatgatgtacccaaatgtaaagagaagagccgagatggatagatgtaagattatcaagaaatcagatcgaaggaggagagagagagagaggtaagagttcgagagggaaagcggaaagaaagggatcaaagaggtatcggcatgatatgagaatgaagagaacggcagcttcccgactagagactctcatatcctcctctgttggaagaagacgatgatctggaagttcttcggaagttggaagtgagatggttgaatagttcgatgactaatccggctgttggttttttgtttttttttattaaaaaataaaaaataaaaaatcaagaaggacgagatagtgaacaaagtcaacagattagcgaagggaaccaagatgattgaggttgaaatgaaagcggaggagtaaaaagaataagactcgtacggaaatcttgccagaattgtctacagtgaggaccaagagaaacaagttagcaaacaaaaataagaagacaggcgacgaagaatcaaaggaaggacaaacctgtgagggaccatatcccaacctttggcatcgtacgtcgtccggttatggtagatccccagaccgaggtagatcggaggcacgaggagaagtctggaacgtgggagaggagaacattcagctctaccacagaatcaaggatggcgaaagcataagagaagaatctctcacaggaagaagaaccagccccaaaatccggaagagcgcttcttgttcgaattgccttcatctgaggaaccatcatcgctgtcgagcgcctttgggcaggcgtgttccgatcgccagatgagggatagtacggaatcggagtacgacagaaactcaggttccttttcggattgctcggaaggaacacaacggagggcgatcgagagcttttgacggtggcttttggatgacaaagtacaacagatatagcagcgtttagcgacgaaacccgaggtatgaaaggaaaagagagacctctggacgtacttgttccattctccgccggtatagttaccgatgacgtcgtagcatttctttcccttttcttgaccctgtggacaatctatctggtgttgaccccagatgacttgacccggaagatcgatcccggggatatttgagcctgctatcggaatcaccgagatcgtcctgctcctcggatccgagtttaattttatgttctcgaccctcagacagacggtcgttcccagtgggcactgaggtatgaacacaagcaagatattggtcaagaagccaaggagccagcccaggcagaacggcctgtatgaaagaaccaagagaaccatgaacgaacctggtcagcctgctcgactccatcctccaactctaagcctttgccctcgccgccgcagaggataagccggacggtcgagagggtctgtgtaggcggtgtaggctctgtgagtcctgcccgatggacatcctggccgagaagactgagatcatacgtgtttgacaggccggcactctttgagatcacacaggacacatgggcctgtgcgtttgcgaagagtgccaggctggagagaaggagggcgcttgtcgggaggagaagcataggagatctttgagggaaaccctaaattaattgttctagacccgggatgtgtcggtggcttgggagaagagtggttgagtgaattaagggggggtgaatgagaagaggataagtgactctgagaggaagagtatgaaggcgaaggcgaaggcaagggcaaaggcagaggcagaggcagaggcaacgtcaaagagagaggccactgatgagggagaacgagagagcgaacgtcaaagacaggtacatagagattagatcgtggttgccctgacgacagccaggcgtacggacttgtttacgctcgcttgctcgtgcacccactcacccactcacccactcacgcgttcggagcttggggcactgcggatcgatcaggcacgataaccctaacacgagtaccttttctctcccctcgctcaccgctctataattcgagcgttcgcgtccgtacaccggcccgcttatttgtattctctctattccattctgtcgaatttctctccccctcgtcgctgtcgtcgttgtcgtcttccttcttctttctgtctctatccatctctatcctctagcttccttgtcccctcttttattcgtcctcttccttctctccttcatcactctctttacatcaactcgctcagatgggggccggtttatcaaaagcactcggtttgttaattcaacttctccttctgctttctccctagcccatctttcagacactcataactgacaggactcattctaactcggacgtttgcccgtttgataggaaagctgtttgggagcaaagagatgagaattcttatgctcggtttggacgcagcaggaaagacgagtgagtcttcgtccttctcccttctgtcgacccactctatcaacaaagtactctcgccactagtgtcgtcagatacagatcgaaggatcgccgaatccttggcgtgttcatccttctctaatgtcttctctggttctcctcgtttcttcttatccctttccacttccttccgatctcctcacagctatattatataaactcaagttgaatcagtcggtcactaccattccgacggtcggtttcaacgtcgagacagtcacctaccgaaatgtcaaggtctgttacttttgtcctttgcgttccgtgtttttctaatctgactgtgtctccaaacgctatcgttctcgtctagttcaacgtatgggatgtaggaggacaggacaagatcagacctttatggagacattactatactggcacccaagtcagtctcttctctcctgtgtgcctgggcggttgttatcgtgtccgcacacatgcatacaccagctgaactcaactctcccttcctgtttctttcttcttctttctcttccttccagggcctgatctttgtgattgactccggagacaagtcacggattgacgaagcaaagattgagctcgagcgcatcctggccgacagagaaatgcgagactgtctcttgctcgtgtttgcaaacaagcaggatctacccggaggtctgtcttccttatagattcgtctctcttttcatcttcagattcacgcgatcgattctgaagcctcttctatattgtattctcctgcgacagctatgagtccggcagaggtgacagagaagctcagtctacaccggatgaaggacaggagttggtatgtgcatcctaggtacgttctcaaccgatcctttcaccttcggatgttcgaagaaacccatgcgctaccgcgttgaacgacactcattcgaaattttccccggtcattccagttgcgcgacgacgggcgagggtctgtttgaaggacttcaatggctgagccagaatgttaaatcgaaatcgtgaggatcaaattggcagcagaagaaaagaagaaaatgcattgaaacgcagtctgggtctcctttttccttttgggttttgtctatatcgtcttgatccctttgtatttctctttctttgcggttcttgtttttcttcttcttctttccctggctttccttgggtctctgtgagacatctcggcatcccttttcctttatttctcttccgagtccttgttttcaatactctccgggctgtcgaaaagacgtagacgtccgtcctccgagtgacgtgatttctttctacactctcttcctcgttgggcacagttattttctttcattctttaattccccctctctttccgttctgttctgttctattctggtattcttcctccttccttctctcgttccctccttaccggataatctatataaccaactctacgatattccctctttctcattttggatctgattgatctcgtcttgtctctttctgtttttggcaagagtattcataaagagcgagtttttttttcttggtaggaagaaagaaagatccattcacaagatgtctccttccttgctcttttgttttggagaagttcagtccgagggatatcatacaacctaagaagaaagaaagagggagaagagagaaagtagacggacagaaggatgcatgggagggacggaaaggagcagatggttgaacgtaagaagaggagggagagcaacgaaggtagaagagggacgacagcggacgagggtgcatgcacaaacggtctattgtgaacaacaaaagggcaaacgatcgagaaacatggagagagaaacgaaaccaaaaccaaagccttgctcctttccccattggccccagcaaagaaacaatcccttctatctgacctatccgctcaccaaccgaatcgtagttcactcctagaatacacaggtggcttccactgtaacttttccggaacgatcctcctccgggtcttctttcgagctttgttgaaggtgtcgagaactccttctgtcaggacgatcaagtgggaacccttgtagaacctcagcatggagtatgcttggcagctgtgtgttgtggtattgaaagagagttcagccaggattcgtcaggatatcggagcagggaagaacattctgcaacatggaaaggataggaggaaggaagcagagaaagaaaggacgaacgtatgcataacatccgcatgggtaagcgccgtctttgaagcgatttcatctatactgatctccccttcggtctgtaacaatagttcaattatcgtttccgcccagtacgctcgataacttaggagacctagatctgataatggtttctccggactacccagctttccctttttttttattttgaaggaggaatacaaagtgacagaaaagtggcttttagtatgtagcgaattaagaagaagaagcgatttggtgggtggatatttacctcaatcttgctcagttcgtacctgatatacaaagagaacataaagacattcaggttctgatcagctccatgagactaaagaaagagaaaagaaaaagggaagactgacgaaaattcgatgagaagtttaccgaagccatgcctttgatgttgaggtagcgtcaggatacaagcgacgttatacccatctgccgattccttttcttttgaaaagtatccgatcaagtgacaaccagtgtcgtccctaacggccatgcagtaatataagaacggatcgacatcgtagtagagcgtcttgtgatcgaggaaacacttcgagagtagacacaagttcctgcaccatgtcttttgtttcttgccatcgatttcgtagaaggaaatgtcttcgtgcctgtagatctcgttccctggaggatgatacagcccgcatttggtccgatgtcgggatagcatcagtggcgacggccaaaaggacagacacatctcgcagatatacaacaccggaagatgggcaaattcggatggataaggggaaaagtaccaagcctcaacttcgtgtttcccaatttggagtttgtttagattcttcactcgagagacttctccgtgagattgagtcattgaacctgacgtccgaagcttctcgatctcttgttctttcgagaaaacctccggaccggtctgaccgttcagaggtgcggacagggaaccttcagccagaacggattcagcaggtgaggccacttcttctacctcgccttcaccatcctcgtcatttccatcggcagaggtcgaacctgagccagcaaggccgggtgattctcccaacttgcgcttcttgccatctgtgcttgctggtgttgacgtcggcgtcgacgtcgaagttgatcctcctgtcgccgccgctgctgtcgtcttgttggctttcgagttcttcgacatttgcgacaacgagctcgcctttgtcgcctttttcaataacgacggtgctctcgacggcgaaggcgcgtttggacctggcgaatccgagggtttccttcctctcaacaccggcggagcaggccattccatctctcgagtcaacacgagccgagaggacggaacccattcatccagtcgtttgt

SEQ ID NO: 2453 - DNA, 823 bp, Xanthophyllomyces dendrorhous
ctacataatggacgtagtattctttgagggacgtttcggcttcagtcgtaccagctcccgtcatcgcggcggcggcttgttgttgacggcgaccgtagattgatgttttggcatctctagcagacaggatctctgcttttcgttcttcgagctgaccagacgccagcggtttctgtacaaaaagtttgttcccaacggctacgctctaaagccgaagacaaagacagacgagggacgatcagtaatcaaggagaaagccgggaataagcgtagaagatgaagagaaatgaacgaacgtcgagtgtatagctacctccagccgagattgacggctgcccgctaggcgtacggccgtccgaactaggtcctggagtggaaggagccatgatagattatgcagacaagagcaaggacgcggtgatagaggtgtgtagctgaagaacgcgtcaagaccgagtacgggataatgaaaggtagccgttcgttcttatttgtattagcaagaaagaagagaaagagaccttgtcaaagtaagaacggaaaggtgaatcgatcggccttcttgcttacgagtgtgtgaaagttgtaatgtgcttacaaggaagaagttgataaggtcaacctaaagctaggaattaaccggtggcggatggtgatgattagcgatttgacttaagctaccctctctgaaccgttgagagaccaatatgtcaatagtgactatgagaactttccgatagcttttgtgagcgtgtgagaaaactgttgtctatgagaagatggatggatgtaccaagtatatttgtgtgtgtgtgtgtgtgtg

SEQ ID NO: 2454 - DNA, 5259 bp, Xanthophyllomyces dendrorhous
tgtgtgtgtgtgtgtgtgtgtgtgtgtgtgtgtgtgtgtgtgtgtgtgtgtgtgttctaggcgagttgagtccttccagaaatcccaaaagtggaggaactttttttttgccttgagacttcttcaacctcactttacccaacaaacaggatcataccatccttcagaaaccattcctacacacatacacgaacacacacatgacattccttacgccccatcttcatttcacgtcatcttccatctcttcatccgctcggtcacctctgccgccagcagccacgacggtactcctgtcggacacgatctccgctccggctgatttcgtgttgcttcattttgtagctactcagttgaaagctacgaagagcgtcttgctcgtgggatgtggagaaggagtagatcattacaaggccatatccaagaagatcgttcgtccgcttcccgttctttttcgtgtttgctcaatgagtttgctatgctcatcattcagggagaatcctttcttggccgcaacttagggaatttctttggaccaacctaactttaaatttcatgacgcgctctctgcccagtctcaatcgtccgctccgtccgatctgaggaacctgtttgacagtataatcagcttagtcgaacggcagcagaaggagaactcttctccgtcagatggaccggagagcgaggtgatggtggtgctcgatgatctgagcgctctcctctggatgggagccgagctggagactgtgggtagatttgttagggcactccaagcatcaagccggaaggttcgtcgtttaattatgttttgtgtactatgtgaagacattcgaatcctgatagaggtttcgtatcttgtatggatctttcctcttgagcagctcaacttcaacattgtatatctggtgcatacgattccttcgagcgcgtccgccgtaccagaagatgaactcttcaggctgctacacccctcggcagacctatggattcgtgtacaaggtctccagagtggtagaagtggggatgtgtctggcgaggttggtggcttctctcttcaacgcattcttaatcaagtatgctctagactgacacttgtccgttgccaatcgactcgaaaatagttgtcgtttattccttctcctcttctcgactcggatgaagggttccctcgcacagagcctgggaaggagcttcaatataaactcggagatagtggtgtgacgttcttcccgaagggtacaggtcagggctttttgtgaaagaagtgtctagacaacataaagatgaacttaaacaactatcagaaaagggtagtgcggtagttcgcactgaatctgttccttcatcgcctggctttgagcccatcgtcgactgcatgcagtgagcatgtcatcacgatgagtgaatgagtctacaatagttaatgatgactgaggcagacaaaaggtgcgacaagcctatggtggaactttcaacaaacccgccgaaaaccacctagtcttttcccatcctgcctggagagatctcgctctctcctctgatttattgctacatcaatcgtgtggtgctggtgttcgctgatgtgagcgggagctgtctggccgggttgggtgtctggccggatctggaaggtttctctaataggcggactacaaagattcctaatggatgttctcgattgttggtattacagatttctcggacgatgactacaaactcttctaatgggcccactaggaagagctccagacgaaaccattagacaactttgtagtacgtcgaatacaagggtttgtaatctctaagatactacatatatcttctattcactttcaaaaagcattagagatttctgtattgcacagcttttttcctcctcggcctcccgccacacactcacctctctaggtcttccttttttcccgttgcgttgcgtgtgaaaaaagcctttagaaaaaaaagaatcatcctttccctcccaccaacaaaccctccgttcttctttgttccctgtttctgcatagatcgcaatgtctcttgctcgaacccttcgactctcttccatggctacctctaaggtggccattccttccgttgttggcgccggaagggcctacagctcgcttcctaccccccaggccagcagcaacggaatccgacataccgacaacgctaacgtcaggaatatcctcgtcaaccttgaatccacctgggagactatgcctcagactgagaagatcgaggtcaacaagatcctcgaggaggttcagaagggtgtacgttctcttcttctttatctcttgtaatctttaggactttttttccttgtcgttttctcttgtttttcctcttcttgggtttcagtcttctcttgctttcttttttttcttttctgatgagctgattggccacatgtttctcttattctacttgttgggaacctttctcacttacctctgatccgatggtcccatccaacaggattggaggcagatgaccgttgagcagaagcaggccggtacgttcatcgcgaatcctcttattctatcaagaaacgattcttccgagttcttccagctcctttccacacatccatctgccccgatcatcgtccctatttcgacctctctccctccggaagaatctctatctttgaacgagattttgctcgtcttgaagtgaacacgcagcttacatctttttatttatatgacatgaaatcacgcccttttgcatctcttgctcgcccattggtcgtcctccgaaaatagcctactacgtcgctttcggagagtacggtgcccgacgaaagaagtcttctgtttatgagaccaaggtcgtcttcatgatgattcttggtggtgtgttcactgctgctatcggatggaacggtttccgaatcatgggttagtactcttttcttccttccctcgttttcctccggaacctcttgatctgaacgagaccttgctgacgacggattttacctctctctcctttgtttctttttccctttctgtgttgtcttgtatccgcctaccttgttctccatcgccttgtccttctctgatgatgccacacagcccctcctcctggtaagacctcgaccatcgagtaccagcgatccatgaacgactatatgaaggagaagggagtaagttttgaatgcttttcacccaactcttatgaccgggcgggagtggatacggatggtttccaacaagaaaggattagagcgtgatggatggggatagagagagtcagaggaagagaggaagagaagcattgagatctgaagcagagtaatgaaggaagaaagttgaggtcaggtctggggctagggctagggctaggagttctcgtgtttcgacctttgcaatcgtgtccagacagacggacagcgttcttgtgattcccgaagagagaccatccgattctgctactgcaccacgtgtcgttgtttttcctctgggaaacccgattctgaattttgctgacatctacgtttgtgaattggaaaattatcagcacaaccccatctctggtatcagctccgaaggatacaagtatgttttctttcctttttttgcattcatattgtgcgagtgaatggtgagaacagacccgctgatacggcttctcctcttttcttcttctgtctttttttcactttttgcttaaacaggggcaagggaatgatccagtaattggaataggaagattgtatcggagcacatgcacaaggacgtatgaagatgtttggtttctcttaatggagtttttactccgccccttctttcccctcttgttttctttctccaaggaagagaaggcctgtgtgtttttgtttttgttttgtagatgagagaactatgcatttttatctgtccctaagactaagagggtatgtgtgtggtcagagatcaggacgagagaacatcgcgtgttccgggagttcccgttaggctgaatggactaaacggggccaatgggctgtgaacacgcacagaaagagctacttccacggtcaaacagcatatccaggtagtctctgactacttgtagcgcaaccggtcacagatgctgttgcgtacaagctttacaaccgagagcacatcctctgcaatgacagacatgcctccttcctagcgtcaaccctgttagatggaagcgactggacagatctactgaaagactagtgttagatgttagaactcgccgaacatggctagtaacccttacagagactttttcccttatacatacgtcatagcacatttggtcgatagtcttgtgagggtttcctactttacaacctgggttcttcttgctttgtcctgttcacaacctatcaccttctccattcaactgcctgagattgctttaagccgtctctcgtttgtatccataaagaagtctcgaaagatgacgacgcgtgttatgcaaagacaatccctgttgaaggttcgtccatttctcgaacgctttctgcttctcccgtcagactgcctgtgtagaaccaactattgatgaattgaaactttatctggtaatggacatgtaaacaacgctgatctagatcggatcggttcaagcgatgctatccggaagatcagtcatgatgggtcgtataggatatggccacaaatccggatcgcccgtcatccagagaggatacgctctcatccctcaagctgatctctcaacacccatcggatctgctacacctttgatccctggtgcatcggcctctagtccggcaccagcttcaacggtggtaacgccaaagaaacgagggatcttgtacagattgattagaggaacgatcatcttgaataccacactgtttgtcgtgggtctcgtgggtgccggtggtctctgggtttactatgggtacattgcacccggcctgacgatctataggaggacgaaggaaggcgttgtgtatgctgtcggggcttatgaccgtgggaaaggatggtattcttgtaagttcgagggtacagagtttcttgatttctttttgtgtgctgtgctatgattctcttcctacttcttaccatgttcgacatctttgtttcattctcgctctcactcccactctccctctactccagggggccgtgagaagtacggatactttttcagaggtgaatccgaggatggttcggtaggctcggagtctgaccctgtagtcggtacgaaaaggggataaaactagggttgtgtgtctatgtatctatgtgtgtgtgtgtgtgt

SEQ ID NO: 2455 - DNA, 17464 bp, Xanthophyllomyces dendrorhous
tgtgtgtgtgtgtgtgtgtgtgtgtgtgtgtgtgtgtgtgtgtgtgtgtgtgtgtgtgtgtgtgtgtgtgtgtgtgtgtacgtataggatgtaccgtctagaatactctcagagtactccaatcattcggctgttcttgcgccgtctcattcaaagagcaggaaagagcacgagaaggcatgctagaaaatcacaccacgagtatcccatctatctactcattcccagtttcaatcgcaccaccactccgtcgtctgtgtcctgcgcttgtgaacaccttcctcgttcctccggaccatcttatccaacaagacccaagacctctctcactccctaatccactctgaacgtagaaaccaacactgagcagaacatacaatgtccaaacgcgagctgtgcagggacagcgtaagaacaaatgaaaaattccgtcttggccgactcgccgcgggcagagagataacaagaaacgattaggaaagtttccaatcttctagtccgacggctagtcattagggaatttgaaagatttcctcgcctttagtctttatcgcctttccttgcccggccgttcaaagattgttataaaggatgaggattgatccatctttttttccctttctctttttctttcatcactctcttcaacacaaacacccacacgctcaccacacgcccctaaatcaccttcgtagtacttactctttttataatggttgctcccggatcaaaaggacgagtgcttcttgcttactccggaggactcggtacgcctatctcttctttttccatctcttttcagccttagtcggttgtctcttgctcttcttgtgtgcaacaggctaatcgttcggttcattggcttgtccgctacagacacctcctgcattctcgcctggcttatcgacgagggctacaccgtcgtttgctacatggccgacgtcggacaagacgaggttcgttcatttggagatctcccctggcctttttcttgcgctaaagacaagagcgcttatcggacatctcccatcttgttctttgttgtcgtgtcaattttttttccctctttgctttcgcctgattcgtttaggactttgagatcgctcgatccaaggccaccgcctgtggtgccgagaagtacatcttggctgtacgtccgactgttccttctgcttatctgtctggagctcgtagcgctcgcatcacactcccatgcttatctcttacgcgaccgatcaacaggatcttcgacgagaatttgtgaccgagctcatctaccctgccgtccaggccaactgcatctacgagggtgtctaccttttgggaacctctcttgcccgacctgtgatcgcccgaggaatgatggaggtcgcggagaacgagaactgtgatttcgtggcccacggatgcaccggtaagggtaacgatcaggtccgattcgagcttgccttctacggtctcaagcccgagatcaaggtcatcgccccttggcgaattcccgctttctacgaccgattccccggtcgatccgccttgcttgcttacgccgccgagaagaacatcccggtcacccagacggctgccaagccctggtcgacggacgagaacctgttccacatctcttacgaggctggtatcctcgaggacccgaatacgacccccccgagggacatgtggaagttgacgaccaacccggaggacgccccggagaccccggagcacatctcgatcgagttcaccaagggtatccccacaaaggtcgaggtcccatccaccaagaaggtggtgaccgaccctgtggagatcttccttaccctgaacgctctcgccagacagcacggaatcggtcgaatcgacattgtggagaaccgatttatcggtgtcaagtccagaggatgctacgagtctcccgctgcgtccatccttcgagtcgcccacatggatctcgagggactcacccttgaccgaaacgtccgtgcgctccgagatcagttcatcaccatcgctctctccaacattctctacaacggatacttcttctctcccgagcgagagtttgttaccgccgccatccccgcctcccagcgaacggtcaacggaacggtccgactcgccctctacaagggaaacgtcaccgtgtccggcaggttctccaacgaaggcctctacgacgaaaagttcacctcgatggacgagatgggtgggttcgagccgaccgacacctcgggcttcatcgccatcgagtccatccgattgaagcagtgggcaaagtcaaacgtcgccaagggccaggcggccgttgaccccaagtcggtgtacggtaccagggagtaaacgtccgctcctcagtctccctttccatttccccctcttcttgaattgaatcaacatttcctcctctacctctaccttccctcttttctattctaaaaaaagtctaattgtgtgattcccgggcttctctcactcttatctgtgtacatgcgttctctgccttgttattcctctacttgagcattttcttttctctctgttcctctccctttatatagtctcgactcagttttatcaaaaagaaaaattgacatcgacttgaatgtgtgtatgcatatgtgtgcaaagagactgacatcaagatcaacagatcggaaaccaagtacgaaggaaaagatatgtagggtatagtccgatcgtaagaagtaacaaagaagaagaggagagaccgaataggacgaaacctatagggaagcaaagaaaaaggaaggagagtagatcatgtttgattcaggtaaagtcgaatataaggtaacatgtgagataggaaacaatgaagacaatgaaaacagacagtcaaagacagaaagagaagaagacgaaaaagaaataaagaaagaatgaggaaaaccgtgatggacagacgaaggaagaggaaatgaaagaaaagcgccagaagctagtgaagaatacgagaccagtccggaatagaggaagaagaaagcttttttaaagttgtgggagattaaaatagaaagagagagagagaggggacgtgtgctggagcaaaagaaaatgaagactttggtgaaaggaatgttgaacctgatcgacccgatcaggtgattgaactcgagaaaacaagtgagatgagggatgagacggaaccaaggatgagcaataaagaattcaagatacaggggacctgaaggtaggcatctatggccgagcacaaggcaaggtgtagaatggatgaatagaaaaccaaaaggaagagaaaaacaaaggaaagaagaaggaagaaagaggaaagaagaaggaagaaggaaaaagggctcaaccgagttcactcgtgactccctcttgcctcgacttttttgtctgtcttctcacatcccgcttgattttccattcgacgagaccataaagaatggcatcgacgatacctgaagcaaagattccccatctagattgcgcacgcgcatatacgattatcctctgaatgtcagtttactttgtaaagaacaatgtactgaagagtagaaagaagaagaggacaacgctcacctggagaacccgctgagaagagggatagggtgcgggtggaccagatcagttatgatcctggccaaggagagcgtaaagaggacgacgtaggcgatcttgaaaatgcgcagagataagaatgtgagacgagaagacttgcacatggccacgaatgacatcacgaggaccaagaaaaagagaaactaaccggaaagagaatcatcaacaggctagcttttcggttcatgaaactagagagtgattcctgattctccctgctctgaccagaagcgaggtgagcaccaggggaggccgagccatccaacatgtctttgaagtccatgatgcgatcttggtcgtcatcgtcatcgtcatcgtcaatctgttctgtccttttatgcgaccctgcaagttctgcctcgccgagctctgtcgccgggggtgtcgctggaggttctcttactgtggatcgtctggccgggttggcggatgcagaagggatgtagagatccagcggtggggcggaaagtgagtcgacagtggagatagtataatgcagagaggtcaacgaggacgaagcagaggcgcgatcggacgtgcggtcgggagaaaaagaggaagaaaagaccggcggttgagacgtatgggtcgattgcggagggtgttgagttgatgatgtgggcaataagtctatcggctcgcccgacgggtttatcgtcgatgacggcggtggtggtgaaaagagaggggggtgagaagagaaggacgaccggcaggacgtctgaggaactatcggtcggcctaatggtatactgtccgacgggccgccggaggcaatggctatcgacggcggagaataagtttgctctgttgattgatgaatcggatggagacaagcataggaatcctccgaagatgaaacgctcggtctgtgttggactagtgctgtcgatgtgaataccgcgattgaaggcttgtgcaccaaagtggacgggtccgattggatcgatcctgtcccacgcggaaggatgggctccggcctgtcacaggacggtcgacgactttctgggacggtctctgggatgtagagatcgagtttctcccaaggagccgaattggagtccttcctgctggcataggttgaggaggcaaacgaggcaatgtcccctcgaagttcgatttcttgtacatcttccgattcccccaccttatttctgtgtggatctgtgggtgtgaacgtcgagggcaagtcatccgagtggacgcccctttcgattcctactcgacggcctaaccggctaccctgcttccaccacggcctcgaggatcgtgttccatttgaacgatgagctcccggtccgacggtatcaacatcggttgtcgtacccagcggtcgcgatctgatctcgtctgattgagattggctcgagccgaggtagtcaagtttgtctggccgtcggagaaagtggaaaaggcggccgtagaggacgacgatcaccagaaacacgacggctctagggcaaagtgcgctagagggatagatcgttgagaagaaagggggaggtcgtaggagaatcagggactgggaaacaaggaggatagaaaggcaaagactaaacgcaaactgactagtagtctccaaagaacgctggccctttatcaccaatgtagcaaaaaccagaggtaaaggtgaacccagtgactcgccagcagacaccagcggcgatgagggagagtccccacatgataggagggagccacatccagtatcgctgaagatacctgacataacgggagagaggatgaagtaggatgatgtaagttgctacgcagagcacgatggcgttgatatattctggttttgcgttcgacgaaaaacggcggattcacaaatacaacgaagcgatcagaactcagcgcatatgaggaggtgtggggtctgggttgaacggagagcaagaggaacaagacgttgggacatgagctaaagagaaacttacgggtccatatggatgttaaaaggagaaagccgatagccgaacacgaatctggacctggagacttcccggtcacgagatagtatgttggcgagagaattccaataactctagaaaagagtgtaatcgaccatagaggagagaaagaaagaggaagaagaggcaaaggaaagggaccagaagtgaggaaaaaacgacaccgaaggaggaaaacaaggagatttgatcagacagtgaacctgttgtacttgacagaaagaacgaaaagagacaaaccccatgaatctgttgggatcgaaattgaaaatgtggtgggcaatggcaacgaggaaattctgttcaacttgcgaccagagacggacaaaatcagggcacagaagaggaagaaaaaggggagactcacaagtcggaaaacacaaggaacatcagaagtctcgttctgaccgtgctcgaccttgctttgaactctctcatgagtagactgatcaagactccagaggctggaggaagggagaagggaattagaagcaaacagaacgaaaggagaatagagagagagaaacctgtcagccgtgtacgtctcgccgtgccttatagatcaagttcgttcaaaatgtggacggttgagacatacacccaagaatggtcagaccaaggacgatgacatcgatgacagatccaagttgaccgagtgatttggagatcggtccgacggattctctagtgtgaaggtttgtgcgtgcgagcacactcatctatggaggtgtctaagtcggacgggttggagtcagagaaggagcgaatggacgagaccagagtcgcgtcaagccggcctatggaagatgtattcccttcttctttctcttcttctttctcttcttcttctttttctattattcctttcttgcgtaagagtctatctggatgaatgacaaagagtttgagagtgttctataaggctaaatgcactgtgagggttgaggaagggtacgagtaaagacaggcgtgggtgtgggtggtgagtttccgtaactaacgtggtcgtcgtggtggggaaaaagaagcggcggcgcaggcaaaaagccggaaaagggcgccagaaaggaaaaaaaaaggtgcacccgatggcgaggaaaaatgaaataaaatgaaataattaagtaaaatatatctcaccaaatgaaaatcatccatcgtgttctctctgtgtccttcgagaggagactgccatcgaagtatgtctatcgttcgagagtcagatatagtatgtgtgctaggatcgtcatagggaatgtcgcgctttcctctctgtctctctgaaatggatacggatctacttattcaacagtggcgtttcacttcttgggtcggtcattcttttccgggctcgataattggaacgacctcggttgattaccttggcccttccttctccctccttctctctctcttttggcccattctgtttcatttgtctcatctttctcttttctcctctcacttgtgtctgatcatcccttctttctttctttctttctttctttctcttcctacacgatgccgtattctgtctatttactctcagcttttacattcacgaaggtttagtcataataccctgtcatctgaagatttaacgttcattttgtttcccttaactttcttctttcttcccttctcttttccggcttcctgattttcattctcttgctcgctttagttctgttgttcgctttgttttctcgttcttatttggcaaaaggttgcacgtgttgttgatcgaggaccgcgcagtcggacgagacaacattcatccttccaaacgccgcctcaagtgatgcgttttaatgtttgttatcttcctacgcctaatgggtagaatatctctgattacatctcctcagcaacatcggatctatcttgtccctctttgcatttttatttattaaggaaaacccacatccggaggatagatcccaaccactaaagagagagagagaaagaagccggttaaggtttaacgctgtttcgataaacatgttgatgttcgatctacccagtcttcctaatttcttcgtcttgtgtttctatttttgttttgttttgttctgttttgttttgttctgttttgttctgttcttcctattctgtattccatgacttcatctacgtttccttggtatatacaagggctcagacacaaactcaaacagaggcggaggaattgtttataaagaaatagagcgtttctcttccaagaccatgagaacatgacgtggcgccaccttggatcttgaatcatcccagccgatatcagcttggtccagaaaacacgatcgaaagagtacagccggctctcaccgtggtgtcatagagtgagatgtgacccaagacgatacaatcactctgttcttatcttttcttcttgtctgtagttgttaccacctagaaatccatctagatagtccattccaatcggtcgtccgatcaaccgatattttgtctctccctctatctcttcatcaaaaataacatgattacagacaatactcagttctgagtttacaactttggctacttgctacttgtctgtgaatgccctgcgggtatctgacccttgcgacgcctcttcctctcacacacaactaaccgaaccgatatgttcagaatcatgcgttgcaaaatatttatctaatccgcccatctccgatccgcccacctgattttcaaaaagaaggattcagtttgaggtcctcttctaaaaaagagaggaaaacgtcagatttcaattcgcctgttgttctgtaccttcttcttgctctttgcaactgaagcaagccaaatgtcgagtgagaggcaataaaagataaccaatctagatggcgagggaaaggaagagggtttccgcgcaccgcgcgcccacgcgctcgcagcaagacaatccatttgcccgcgctaaccgcttcggtcggccaaatccttcgaactccgcgagatataacaatcgtccatctcgttaatcagatcatctagtctcaacatcataccaacctacacacccactcccacacttgttcgtctatctaacatgcctcccagattctcagccaccaaacgagtcaggtcgacagactctcctccgattcctttgatagccagctgggcagccgattatgatccttcgacaaatctcggtagacctctgatcggaatgagtcagggtgtaccagggagcccacctaatccgtcgtttactaaaagactcagcgaagttcgttgccatccttgctctctgactctccattctggattagcccagaaagactgacagactatagctcaaacttctacttgctaggtcgtcaccgatccatcgtcgagcaaatatggcgcgattttaggagacattgccctcagagaatcccttgctgatgactacaaggatgtctatggacaagataatcctaaatggggagacgggtctggagctggtgttcaagtcgaagatttcgcagttgtctgtggagccaacatggtacgtctcaggatctaggcgctgataatttctttctggattctgcgcttgagagatgctgatagttatctttggcgtatctgagcaggcttttatggctacgatcatgaccctttgtgaagaaggggacgaagttattattccttttccatcgtttgtattcttcccaatgatgtggggcttctttgtcgtctgtctcctgagcatttcttacctcgttcctacccttcactcatacacccggacagatatttcaaccagacaatgacaatgaccttattatccgtcaagcctgtccttctctatacccaatctccttcgttcattcccacagtggaggattgtcgaaagctcatcagcccacgaacgaaagcaattacgctcgttacgcctaacaatcccacgggcgcgatctacccaccgaagactttagctggtaggattgatcaatacttctggctgtggaccgtcttgtttgaggagaaagaaacatattcaactgaccgttgaggctctttctcgtacgtatcctccggaaatcacagaatttgccggcctagctagggaacatagcatcgcccttattcttgatgagacatatagagactttctgcccccgatacaaaccgatcgacctgatgttcatatcagaggaaaagcacaccgtctgtttgatacccctctttggagggaatgtgtaatttcgatgttttcattctcgaaagtgagccctttgattctttccatgcgcatgatcttgacaaccttcctggccactaaacgtttttggggggttgccggtcgcatatatcgtttcctttgttaaaagagttacgccatcccaggtcacagattaggtgtcctcgtagccgatccttccttcttgaattcagtgtcgaccgtgttggattgtatgcagatcaatccgcccagaccctctcagatcgcacttgcacctatcatgaaagatcttcgatcaggtctcattcagtcagttcttcctctgttctcttgttcattggtaaaaactagcacacacgtattgacaggaaaaattcgtatctacttgtttttacagaacatctctccagtttacaaaactcctagccgtcttttcggaaaccctgtcaacttgtcctggttgggaagtcctttcttcaggagctttctacgcatttgtagcccatccattcaaaggccattcgtctctgagggtttgcgaggtgttagctaagaagtatggtgtgatgactctacccgggaccacttttgctggtggtagtgatgttgatgatgtcgccaccatcaacggtcatggtgccgccactgtcaatggtcatggcaaggtgaagaaagtgaaagcaggaggtcaatggttgaggttcgcagtcgccaatgtagcagaagatcaagtcagagctgtaggtgataggttaagaagcatgaagcttgaggatttagagtagagcatgacttcagagatcaacttttgttgctttctatcttctttcttctttccttcctcttttcgtagggcgggattgttcctttcttttcagagaaagggtgtctttctttctatcaacatgttgtagatcatcttttccaagtagatttgtttctttgcctttcgcctctcccaggaggtttgtatgcttgtaaaaatgtgcgagtctttccttctccttgggttttgaagtgtcgcgccgggcttcgatcacaaatatagattgtcgtgctcgctagttcgcaaacttgcaggatactgccattatatttgcccctgctcccaaatagccggtcaattccgtttatcacatatcctaataaagtcagacatcaaagaaaagcgtcagcatgtctcatcagatgagtaatcgagaacgaaaacaagaacagatatggctcgaggcgacagattgacgagaggtcttacttttcttgagtatcggatgcgggcatttatctactcgatcttcagaattcagatccgttttcgaaactagaaatcagtcgcccgaccgccgtacgtccattcgttacccaacaacggatctttcttcggtccgccctaatcatacataaaccgagttcaaataggatcggaaaaaaaaggataagaagaaaggtaagaagaaaaacttgattaatcccaatcgttctgaatgaaagaagaaggagagctcgggaacgtaccacctctccagtctgagggttgacctccccatcaaaatccggcttcggcttccttctcaggtcctgatgaatatccgagtcgggtacattcatatcaaccgtctgtgctttcttctgaagcgcttcaaactctctctgaagcgctcgaggaagtggcggtggtccgggacgagatcgaggggtcgatggtggttgggatgatgaggcagagtcaaaggtgggagggctcatcgctagcgttcgagcagcgagaaatcctcgaggaataaagccagcgcgggaaactctaataaccgttcgggcgaacattgtggtatgtatgtgtgagagagtgtgtgtgggcgtgttctgtagaagagaagaagagaaagaaagatcacggcaatggacgccgaaggaaggcaaagtccgaagaggcttatgtaagcaatcatctgtgacgcgtcgacgcgtcagtcacgtgcttaaacacgtcgtcatatcatgatctatagaaacttgggaatgaaacccgagagacacgaagcaaaaagccataggcatcagagcatgagggtgtagtatctcgggggaacgctattatactcacgggatttgtatacgctgagatgtagcgtagatagtgtatagctctaggtagatcaaaagttaagggccagtttcttcgactctaaattaattttttccctcccgcccgagaacccagtctatccatctcccggttgccttacttaccgcttgacagagtcccacagattcttacactcctcatcagccgctccttagaggctcttcatcatttgaccagttaacatataaacggacaattaaatcatccctccttcacttctctctatctgcaacaaaatcctaaagtatataccctcaatcatggagcctatggatgttgagaaaccgatacattcggttccggtctccaaacctatcatccctactaccgatttgaagaaggatgtgccactatcccctactgttgagaacgggaagagactcaagtctgagaatgggagcgatgacgacgggaaacctttggtttgtgtcctgtttattcttaataaacacgggagaaattcatcgagaacgagtctctcggttggactaagaaccctggagaccatccctcgtccggttgatttctgacgcgtcttctcacaacttctctctctctctctgtcatttgttttctaatcgttgcccctcatcactccaactgaactcaacagtcaaagaaacacaaaaaatctgctcttcctccgatcaagaaacggaagactgcaatcgagagcagcgatgatgatgacggagaggactctgctggagagcaggcggcagagcgtttggcagagaacgcccatcaggttcgttcctgtttacacacgcgtctcttctgacacccgaatccttctttatctgacatctgttctttgtgtatgcgcgctaatcgtgattgctcttgctgactgatggccgaattattatcaatcacatcattgcttgttaccttcggtctcttccggaaaatctcccttgattcagatctattctactgctgtcaaagttgaacccattccttctcagggaaaggaaccatcatcgcgcaagacatccgcaggatcttccgacctgtccgacgacgacgttcccttagctaggtcatccaagcacttttcggttactcccgccccagaggatatctcaatcaatggaggtgatgatagggagtcatcggatgaggatgacaagccattggcgaagcttccgtcactgaagagaaagaaaaagccgacggtcgcggtcgattcggcggatgaggaggaagtggatgtaaaacctttgaaggataagttacccgcgctgaaaaagaaggtctcgaagagagcgacaaaggaggacgaaggttcggagactggtgagactgatgagaacgacgcaaccaagaaaaaggctgtagccaagaaagtcaagccaagaaagtctaagaaagataccaggttcgtagtgctttaccctctgcttcatctacttgtctctttccccaatcttccatatcaaatgtgtgttgcttacacattatttcttctcgtttttgtctgctcgcctatcgactcgtttgttgctcactagcgaggaagaggattatggcagtgaagatgagaagccattgaagaagagcaagaagaagacaatagtcaaagacgagcctgtcagcaagaagactgctactgctacaaagaagaaggagtcgactcctgtcgccaagaagggaaagggaaggaagaaggaagaaaacggagatgatgaggtcaaggaggaggaagaagaggaagaggtggtaagtcaaacacaaccttgggcgaatgctcttctcatcacccatacagcacgctgtctgacagcatcaacattccgggtgcttttctacacgtattttctctcagtacaaatggtgggagaatcaaaatcaggacagctcggtcaagtggaccacgcttcaacacaacggggtactcttccctcctccctacgagccattaccgtcaaacgtcaagatgctctacaatagttagttcccactgatgacgtctgtcgcctggtgtttgcgaaaagtaaatcaatattgactcccaagctcttccggtctactcattttctcttctccgcaacagagaaaccggttgaccttcctcccgactcagaagaggtcgccaccttcttcgcaaaggtcatcggaacacagcacgaggaagatacaatgttccgtaataacttcttccgtgatttccaaaagattctcaagaagttccctcctgtaagtgtgtttttcgctaaggttgagaagatcatctgattcaagactacgcaagaaagcaatgctaaacattgtaaaaatcatcccttctttgcatacagcgagacggaactcagattgaatcccttgataagtgtgatttcagtcagatggtcactttctttgatgccgagaaggaacgcaccaagagcactccctacgcggtcaagaaagagttcgtctttgtctttatcttctttcttgtcgatcgtctagagaaacacaccctaacaattttctgtgccctaaaataaacaggcttcggaagcaaaaggacgctgacgaagcaccgtaccagtactgtcaactggatggacgtaaagaaaagattggaaacttccgtgtggaacctcctggtctgttccgaggacgaggagagcacccgaggaaaggaacacacaagttccggttggcccccgaagatatcactctgaatatgagcaaggacgcgccgatcccggtccccaacatcccaggccagtggaagaaagtcatcaacgatccttctgtgacttggttggccacctggacggagaatgtaaacggacagacgaaatatgtcttcctggccgcaaattcctctctaaagggacaatctgatatggcgaagtttgagaaagctcgtaaattgaaggatcacatcgctcgaatccgaacggactataccgaggctcttcgatcaaaggtcactcaggacaggcaacgagcgacagcgatgtactttatcgatatcctcgctctcagagcaggtaatgagaaaggagaggacgaggcggacacggtcggatgttgttcacttcggtacgagcatgtccttctcaccccgcccaggacgctcgagtttgatttcctcggaaaggattcaattcggtatagaaatgttgtagaggtggacgagcaagtgtttaaaaacatcaagcttttcaaaagacctcccaaaggcgagggagaccttttgttcgaccggttagatgtccgttgacttttcttttttcttttcttcttcttctttatcactcctcagcttcactgaaactacaattttctcttctctacgctggaaaaaccaaaaaaaaaccacctcacttgcttgacagacgaccgggctgaacaaacacttgggtaactacatgcctggtctttctgccaaggtgttccgtacctacaacgcctcgcacacgatggagaagcaattggacgaactcacaccggcagatgggtcggtagctgacaagctactggcatataaccgagcaaacaggatggtggccgtgttatgcaaccatcaacgtacgaagcccaagggtcacgaggaaagcgtgaagaggcttcaggaaaaggtcggtcgtcttcttgttttcttacgagagtttccttcagtctttcgaaggtgaacacaggtcaagacggatcgagttaaaaacaaatgtttcttctctcaaaccaggttcttgcactcaagtaccaaaggctgaaactccggcaccaagcttggggattagatccaaagtttaagaagaagggcgtgtttgcgacagcagaatccgatctagaagatgactggatcaagtcccacgaggaatcgcagaaagagattgagattgaacgtgctcgaaagagattcgaaaaggtttgtccagtgtatttttgtccttctggggttcagttcgatcgaagtcctaatatgcatatgtatggacgctagaccaacgaggtgaaaagagaggcgaacgacgaggaggaagatgtcaagtcactcgccaagacgatcgagggcatcaaggaaaagtgggaggcgatcaagaaacagacgaagcggggtgaaggagagcccaaaaagggctgggatgaagaaaaagctagggaggctctcaaaaagatggacgatcggatcgaagcagccaagacgagtatcatcgacagagacgaaggagccgaggtcgcgctggggacgtccaagatcaactatatcgatccgagagtgacgatctcttgggcgaagaaacatgatgtcccggtgacaaaggttctttccaaagtcctgatcgacaagttccagtgggctcaaggggccgaaccgtcctggcggttctagaaagaaaggcggtcttgttttctcatctcttgtttctcaactttcgtctctcattttaccttctttcttccttccttatccccaacaagcgagtctaagtagctcgtccatctctggatcgtcttgtccggttcgccgggtctgtcatacctgttctcactcctattccctttgatcggtcctccttttctctctctctctcgccttgtctttaccttttcattttcttctaccgatccttcgtcctgtctctgttctctgtcttctccctattttcttgtttctcttcgttcgtattcagccaataattcacgattcgtaccccatcgttatgaggaagctcaaactccggaaagaaaagacgagaacaagacagaagagatggaaagaggaaaaaaggaacaaagaacagaaagggaagggacagaaccgagaacgagaacgcaagccgacaaggtgggtgagtcgcactttgcgcgtcggtcagtcggccgatgtgtgatacggggtgtgggatgtgcatcaaacatttcgcaacaggacacaacgggtgacgatcggacgagcagagaacgaaagcacgtaggatacagaacggcgagtaagaaacgagacacggtggatgaatcgatcgaacgaacgtaatgtctaggtgttgtcttgtcccgaaacttgttgacaacgaacctgcagcaagtcagagtgaatcgatatgaatatgaatatgaatatgaatatgaatatgaaaatgaaaatgaatatgaatatgaaaatgaatatgaaaatgaatatgaatatgaaaatgaatatgaatatgaatacgagtaagaaaatatatgtccagattaaacatgaagatagaaatagagatagagatagagattgagaaagaacagtgttgtgatacggatagatgtatgaaggagatctgtacagaacatatcgagcgtaggatgaagaaagagggagaaaagtaagaaagaaaggaagaaagccgtgtctttcggtttgtctcaatatatagccctcgtcctcctgcttgggatttcgttgttggcttaaaaaaatttgagttttaaaaacgtctatttgacaatctaggattatgatgaggagaatgtagaaagaagtaggatgggaacagaacaagaaggagggcagaaaatagaagagtagaggaagatatcgtgtaccgaagatcagagaaagaagaaaaaaaaaaaagaaaaaaa

SEQ ID NO: 2456 - DNA, 3727 bp, Xanthophyllomyces dendrorhous
aaagaaaaaaaaaagaaaaagaaaaagaaagaagatcagaagtcaaaggtcgaaggatcaaggtctctgcggaacgaccgtcgagatggacgggcttctcgagttcttctttcctcctactctgatcaacagatgatcgtcatcctcctcctcatcgtcttcgtcgtcatcacccatcgcggtactcctcggtccgacggcgggcacgggtgtgaagcccatcggtttaggtacagctcgtgtccctcctggggcggctgtcgacaaggaagaggccaaggcagaggaggaagcggaggtggtcaatcctgctgaagctgttggtaagggtggtgctgctgctgctacaggtgtcgaaccatcggtcgtctgtctgaacgactgaccgtggtcgggtgtggacgatccatcgcgcaatctagatggcttgggaaccactggagtaaggccgttggcggcgacggctcgtcgactgatgtccatcaggttaccttccgactgggttcgctgcaggttttcggattcatcataatcaggcaacccttggacggccgagagtgggacgacaccaccgcctaggaagcctcgggaagctaccgagtaggaaggaacctgggagagcgcgcttacgtcggtgtatgaactctgtctcgttggcgcttgcgacccggcaggcgagggaccgggagatggtctggtacttccaccgccaccgccaccgccagtgggaccggagttgagaggagcaaagtgagcggatagactggtcgagctcatgttcggtgactggagtggagtctgctcgccggagttcaatccggacgaggtcggcttatgtttgtgatgaccaaactgggtgaacggtttcatcgctttggaaggaatgttgaagagactgtgaccgtgcgagcctcttcgctcaataggaggagggccgttggtgaagctaccgctggcactggcactgctgccgccgccggcaccggtaccgtccaaaccaccggagctggccgatggctgggaagccaagctttcaggttgttgcaacggagtcatcatcccgaaaccgcgttccggactggacgcccgactggccggtcggctgctacccgaacgggttctgggcagcctgaaacctgtccggctggaagatctggtctctggaggggtctggtgaggggatcccggttgggacgaatggtagatctcttggccgttcgggtttcctaacgcgccgagggaaagcaaaagctctgaatctgcccaggagatgttgggtcgttcaggaatcccatccgggtcgttctgtggatcctggccgttcgtagggagcgacgagacaagcggtctcattccgaactgaggggatccaggtcgggagcccggtcgggaggacggcggggtgtttgcaggggaccgcctggaccaggcagcagcggtcgtgccagaagaagaagcgacgttggcgttggcgactctgtcgtatacgtggttgccgtatgagggcagatcgatcacgttctcgttctccatatccgtccggcagccgaatagcacggatcgggtgtgagcggacgcgatccgggcttcttccgctagcgaaggaggcaaaaccacgatcgggagcgcacatcttaattcggaagctgtcgtggggaagattcgaggagaaagagtgtgtcaacgtcgggtttcaaagaagatgaacaagaggcgagaggaaaggcaaaagaagatgaaaatcaaggcaggaaaaaaggaaaagaaaaagacccactgtgtccatccggattactgatcacacagctccacttgatcttgtgagagacaaagactggatggatggaatgactgggcgtggtccaggtgggcaaggggatactgatcatggtgtctacctcgctatcaccgagctcgacctctctgttctcctctctggcctggaggtacattgcctgggagtctgagtgtgaggctgtggccggatcgagaccgccgataaagttgatggtctggttcgctccggactcggtctctgatgagatgctcgtccgggggatatcattctgatcggccgagctggttcgacctgcgccagcaagggagtgaacttgggggaagtatccgtctgggccagcgccggcggagcccgaagggatgggagccgttctgggtccggtggctgaccgggcgagaggcgtgttgtttgtgacgggcgtgctcaccgggctatcctcctcccgaggtgcgtttggcggtcggatgtagttgggggcatgcttctctcgatgaacgtaagccttgccgtttcggatgtcgtgtctgattgacgcggcgacccggacgtccggatgagaagagtttttggtatggaccagggtgtactctttgacgacggtcgagatcgaggtgacgtgcacacccttcatcaacggttgaaatttgacgacgatcgggatgttgtctcctgcggcaaaggccctgggaagggggaggggacggaaggaaaggaaagagacagaggaagggagaaaaaatcaactggacgtcaacctgggcaagagaaaaaacaaagagagaaggactgacttgtgaggcaaggtaagcgagtaagcgaccttcatcggccaactgttctcgatctccaacgtctgagtgaactcgagtgcttccgaggtgtatgtcctgagaaggctgacgttcttggtggcctggaagttgctggaaaacgcaccggaacggatggcaacggcgcgtaatttgtagctgacatgggcctcgttgttccatgttcggagggaggaagggaaggtggtgtcggattcgatggtcatcgagaacgggaaggagtggatcccggccttgagggtgtgggtctgttggctggatttctttccgctcccgttgtttgacaaaaagttccattcgtggttgatgattgggtgactgtggtgatgagatctgcttcctcctctgtaggaagagcgggggtgaatatcagcaacgatggaaagaaagtcagtgatttgaaggccatgttgatgtgagagaaagaagaagaagaagaagaagaagaaaagacaagccagagaaagacaagctagagaaggaggagaggaagaaaaagaaaaagaaatagaaacagaaacagaaacagacgaagcacagaaagggaacctacccagcaccgtctccaaactgaactttggccttgccagtcagagtcagcacgacatccttcaaattcgtgctctccaccagttgcaacaccacagtcccgcccaatctggctgggttggtatcaccgcctgcgcctctgaggacgacgtggtcctggtcgagatggatctcgacggtggagtgaccgtggtggccgtggtgaccggctggggtatgaaaagaggtgggctcgaacccggcagtcgacggagtgaacgggaagtaggccgacgaggacgacggggtggacgaagagtagggtgtcccgttgctgtcgtcgttcccccacgagccttgggacccggcgggtgtctgtgggatgggcacgttgagcggactgggacgatgtccgcctgccggagtgtttgctccggaagccaacccagccggggtggatgtgcccgaggagaacgagggcgttcgctccgtcgacggcgtcagaagcgagggcagatgggaggatgaggtgtgcgatgagagccaggacgagcggggcatcgttgtggac

SEQ ID NO: 2457 - DNA, 816 bp, Xanthophyllomyces dendrorhous
gtctatggtctacgtgagggattgttctgttcgctggacgagctgaccgcttcgacaacacggacggacggagggacggaaggcgagaacggccgggggggatgctaaagcggaaatgacgttttccgggatgggattttttttcttttcttttccttttttttttcttcctttttttctatctattttctctgtgcaagcaacggggggatcgcatagagcaacagaaggggagcacgggtgagtgacgggcgacttgagaacagagcgagatgccatgccgtttgcccgggggccgacggacctatcagcggaaacaagcggaaggaggatacgggaagaccgcgaccaagatggggctcacaatctaaggggaggctttggactgctagctttcagcccagagaacacggacaacgacggcgggcggggggaaacgctgggttctttctctctttccacacgggggcttctgttccggcggtctgggggcgtgtgtgggtgtgtgtgtgtgcttgggcgtgtgtgtgtgtgcttgggggagtgtgggaacggataacaagcatcagaggtctcgacggaacgacgacaagaaaaaaatcctccttcgccgtcatcgggggggaaaaaaaaaagaggccccactgaaaaaacattaggaattttttctaatgcacactacaaaaactttgtagtctctctctcgagtcggcttgttcttgaacgtgcttgtgtcgtggggtggtcgtgtgggtgagtgcgcgagggtgtgagagcgttcatagagcaggtctcaaggctgctttcgggagggtc

SEQ ID NO: 2458 - DNA, 24023 bp, Xanthophyllomyces dendrorhous
aggtgtataggctgcttcggtgaccacttgcgccgtgcgccgtgcgccgtgggtcagttctctgcccatgttcttttggcttgactgcatggcctgtagttagcttgaagaaacatctgttgcctctgtgctttcgtggttgtggttgtggttgtggttgtgcttctgtgctccttgagcgagcctttggtgtgctctctttctcttgcccatctctttcttggaactgaaaaaaaaaggaaaagctaaggctttgtcttttgatacacacacacacacacacacacacacacacacacacacacacatacactgcgccatgtatagcccgctcatgttctctctctcgtctacacagcactagcagccaccttggaggcaagaccagagatcagctctgcgtgcccatcagtctttgggtccatcatcttttccacctgttcttccgtcattgaagccagagctacaaagaaggcaaacaaagtcagacatcagtgaacggcttcggcccgcttctttctcttttcacgccattcttccttccctccttcaagccctcttccctccttactcgccaacgagaactcacctttgttcaacgcatcagaccgcccgtcagcctccatctcgacatcaccctcagcatcttcttcggcatcatccgatcgatcgcccggtctcagtccagtggggaacagcgttgcaaacgtcagataactcgtatgccccctcgcatcgatcgccggtcggctcaggttcatcccgtacggtaccgggtcaccccttcgtttgcgaaccggctgggcgacttgtcgccgaccgtccttctccctcgccggcgcgttctcctgggtcatcagatggtcgatcaactcttggtcgacctcttccttcccatcttgagcctctccggttccttccccgttctcgtccgctccggatgagacctgtgggacaccgccggaagcaggcgaaccaggcagagaggtagcggccacctttcgtttcttggaaagtgcagcctcgatctgatgccgacggcgggcttccttcttgacctcttggtcttccaactttttggtgaccgagcccaccggaggaagcgcgatttgcgggttcacctcgtgttgacgcagtaaacattcagacatcgagatgtctttagagggtgtgggtgtgggtattggcaaaaccgagagtcacgttcgagaaacattgtcaacgagttggcccatacacatacatacacaagcagtactgaagaagagctcaccagagaacccttcggacgaaagcatcgtcacagtacgcaacacctgctcgatacaaggagagaaacaacagatcctcgtgatcttgtcgttctgttgtgcacacgtcaagtagcgttcgtaagtatatccgaaggtcgttcgtgagcacccacccctacacccacacaggcatacagatcagaacgaaccttgagagcagctttggcactcttgattgcttcccacggagcgggtagatccagaaagactttgaaccgtccaaaaacaaagagtcacacccttcttcagctttttgccagacctctctcgtccgtcctgggctctcccctaaaataaaaataaaataaaaaaactaagaacccaccggcatcagccacgttttccaactcgaacccgtccttgcagacgttccggtgtctacatctcaccaagctagacatgccatgatcctcaaactcagcctttgctttctccgctcgcggttggtgaaactcgaacgaatgtaggaacccatgcggggcgatcgcccgggccacggaatgtgacatcgagccagatccagtgcctgttgagtttcatgttggcacgttttcatcccgtacggagacacagatggttgtcagtcggcgttgaatggaaagaaggacatccagacgcgaacacaatcgtagacacaatagcgagaaagaaagaaaggaggaagacgaaccggcctcgacgacgatgctaccaggtcggacgttcaactcggccaggatataacttatgtcggccacatacaagatctgcgtccggtggggaagagccagcgtccatagctcgggtgtcggtcgaagcatccatacgaatcctttcccgtttgcagaggcgacctatgaggttgttcagtcgatcccaaaaatgcttccaacatcagtgttctcgttctcgttctctcatccctgcttctgattgagcctcaaggtaaaaagagatagagaaagagaaggagaaaaacacgaggaaaacaacaacacgcctactcaccctgcttccaaaggggacaccgatcaggtctgaatggtgatacattccgtaccggttctggatgacctctcccgattgaatcaccacaggctgcatgacttccctggtctggattgatagtcgtcaacagaacacccaccacatcagaacaagccaagccgtgagatcatttctcgttccaatatttttttttaaaaaaaagcatccaatggacaacaaagactgacgagttgcatgatcaccaggtctccttccctcatgaacttgtggtgagaaaacatcggatagacctctgatggagaaggcgccgaggacgacggagggacggcagagccggtgtatgaactcgagctctccggcacatcgaccaaaggcgtttccaaagacaaatgttctgcgctcgtcgtcatcttgagctgtgaacgaacgagatgatgtagtctagaatacgatcaaaagaagcaagccagcaaagaactcccatccctcactctctcgtacgtgcttgagggggaaagttcgaaattctgtttgggttagtcaccgaaagaatacccggctaaagatttcgttcacccccgccagcgccatcatcacaccaacgaccatcaccatcagtcagccaggagatcgagctttgtttgctggtttctagctcagagtgtgtaccctgagagccaatcttgctgttgtgtatagagtgttctgtttcctctctttctttctttctttctttctcgaattgcgttcgctaatcttttgttttgttttgtctgggtctgttcatcagctcacttagtcatcgttgtttgtatccctcaaaaaggcaagaactgttcaagcaccatgggtctttggctagcctgtagacaatcggccttgagaccatgctcggcctcgtccgtcgcttctctgtccgtccgttcgtttagcaggtcgtccggcctacacagtctgcatccgccagaacaaagtcagtcatagtattctttattattccctcttaaagtctctcttcttgtccttcatacatactttgctgatcacgactcttcaatcgactcttttgtcatttgtcacacacacacacatataggttcaaccctaccgttcgcgcctgcacgcccaaagagaattaccctaagctcgttactctcccttcacaggagaaagatcccgataaccatgatgaccgcttacgactacccgactgctctcctcctctcgtcctaccatgacttcccaaacacttctccacccatcgttgcctcctctcctccaccggctactacaaccgaatcggccgccatgccgagcgcgttggagaccgtcgaagctcttcacccaccttcctcggcaacccctttggacggagtccgtcggacgaccgcaaaatcaacctcaccactcgctccgccaggacttcaaattgacatgatcctcgtcggtgactctctctcccaagtggcgctcggccatccgtctaccacggccatcactctttccgaactcattcatcacgcccaagcggtccgccgagggatcatcgtgtccagctcgttctccactcaccctacccctttcctcgtagcggaccttccgttcgggactttcgaacgatccctcgctcaaggtgtcgactcggtcatccggctcgtcaaggaagcccaagtcgacatggtcaagatcgagggcggacacgagctcgttccactggtccgtcggttgaacgaaatcggggtaccggtcatgcctcatatagggttgaccccccagcgagctgtcgccctctccggctacaaagtccaaggccgaacggccgagtctgcccaaaagctggtcgacctcgcgctggagttgcagctcgccggtgcgtctggtctcttgctcgaagccatcccggcccggctggcttcctatattaccacccggttagacatccctaccatcggcatcggcgccggcaacggcacatccggccaggtcttggtcttcaccgacgccctcggcttctcgaccgccgacggcggaccgtccgcgcagacgaaccagcaaccaaagttcgtcagacggttcgccgaagcaggaagagaaatgagaaaagggatcgaaggcttcgtcagcgccgtcagggatggaagcttccccgggaactcggagagttactcgatgaacaagggagagtgggaagattttctgaaatcccagcagaagcatcacaagacggagtgatcttgaaaggatgaagttaaacggaagaaaaagtcaaggccaaaagaacaattcaaaagattcaagggatactagaatatgggctgtaaattagatcatgtgtatatctcgctcaacttcaagaaatctcttcagacgttctttctcttgtgtatcacgatgtgactttcctcgaatgggctcttcagttactgaaaattaaacgaccgacacatccagagaacgacaaggattctttctatatgttttagtctccccaactcaaacctcttcaaagcctgcctgactgctttccctccttgacagcactcgcccaggacgttccttccttggtgaacgtttcctccaactcatccttgatctttctcggtaggccgacaccggcgtaaccgaaggaagtgtacatctgaacggccgacgcaccggctctcgcgaactctaaagcgtccgaaccggaagagatcccaccacagccgatgatgggtgtctcgaccggtagtctagctcgaagcgcgcggacaactttgagagcgaggggcttgaccggtggaccggagagaccgccgatttctttcttgttggctgttgtttgttattgttgttatgaacgtagcaacacacaccttcaaaacgtcaggacttatgatgcaaacagtgaaaattgtatgtctattgagaaactagaaagaaaaaaacgtaccggattggagatagtctggcctggaaatcgtcgtattactaacgatgacaccgtcgaccttgctctgcttaatcgctctggcaacatcatcgatctcttccgtaccgagatccggtgcgattttgaccacgacctttggtcggacgccgtcatgggtcaccaagctatccctctctttgacgaccgtggtcaacagctgacccagcctatcacctccttgcagcttcctcagcccaggggtgttgggtgaagaaacattgatgacgagcacatcggcgtacggtccgaaagttcggacaccgagcttgtagtcctcatcggaatctgcggcagacaccttgttcttgcctaggttgatcccaagcagccgaccaggaatgagcgatcggggcagaccaggtggaggtaaaggagacgacgcgggtcccttggggaaacacgaaggagggaacatcgaaggatgcgttcggtagaaggaatccactcggtcttggatatgggaaagcgcggtggcgtgaccgagagagttgaaaccgtatcggttgatgaccgattgatcttccaccagtcggaacattcgtggtttcgggttccccggctttggtttcaataaaagattggagtatcgcatcagcaactcgtagcatctcagatcttaaggagtccagattggatgactcacctgaggaagaggggtcacactgccgatctcgacgtatccgaatccaagatcaaaaagacctgttgacacaaagaaagacgatggttgtcagtgtgatgtaaagaggttatttcccagagtagacagagctctgtctcaccatcgatggcctcggcatgtttatcgaatccggctgcaagaccgactggattagagaccttgtgtccgaacaactagagatttcgttgattcagccagacaatctaaaatctcagcttggactctaccggaacatcggagaaagaaggaaaaaagaaagacttacctcggtcgttagtccctctgcatcaacccctcgatcaacaggtcgtccgaacggcagtctcaaaagctgaacggccaaccaatgactctgctccgcgtccgttagcgctctcgccaacggcatgatcactccggtgtgcacagctgctcgagagtcggtgtaatacgcatagccatagaggagggctgcactggcgacgagaccggtggtgtacgttcggaacgaggaccgaagtttgaacgcgtactcggacggaggagagctagacttgagacgagaaccgataggcaaagccagcctgaccactgatggccgtgcggtcaacattcgaacagacatcgtatatttcgtcgtgttatctgtccgacgaaagccgagacaggagtgagcatgctattatactgacaaagagacgtgagaaggatcagcagaaagacatacaagcaaaaggaaagaagttgatcgttgagagggaaatgaaaagataaaaaaaaaaattaaaaaaaaaaaagaaaaagaggaaacaccgagaaacaactttccatcatcttcccatcagctcttgttcattccaagacgcatttgagagcagtgtcgattgttgtctagatatcttcaagccgttccaatatcctacttcttgtagagtgtgtctatgtccctgttcaagctgggtagagcgttcggtgtgcgctccggccttgcctcctcgtctctctcctcctactattccttcggctctcgccggtcggttggaaccaacatcgtagatgatctaaccgaacggggatttgtcgctaatatcaccaggtgagtgatgtaacaaagattccaagtccttcttttaactggtactgatctgtccttgctcagtccaaagttgaaggaagcaacgatgaaaccaatctcggtatacttaggtgtggatcctacggccaaatctcttcacgccggtaatttgctcgccctactgggtctccttcactttcatatcaaaggccatcaagtgtttgctcttgttcgtcctgtttgcttctactgctcgtctctgggaataaacttggcctgatagccaatctatgttattgactctcgataggtaggaggtttcacaggatctatcggtgatccctcaggtcgatcgtctgaacgacaagcgctgtccccagccactctcgccctcaacgtcgaggctattacttttcaaatcaacaccttcctcgagagaggccagagatacgcaacaaagtattcatcagactatggaaccggaaaagctggagaactcaagtcaccgaaggtggtgaacaatatggattggtcacaggagatcactctgctcgatttcctaaggacagtagggaaggaagtcaaagttcagcacatgctcaacagagactcgtgagttgtcccggctgccagttgttctcctcatttcctaagcttcttcaacaactcttgatattcttcttctcttataccaaagtgtcaagaaccggctgtcgtcggaagcaggaatctctttcacagagttcacctaccaactcctccaagcgcaagacttcctccacctccataaaactcaccaggtgactcttcagttaggtggatccgaccagtggggcaatatcacagccggtatcgacctcattcataggtcatactcggcagagtcccgggaagggcacagcaaatccacacacacaccggcagagatagaggagaaagagggcttggctgtcaggaaggacaaagcgtggggtttgaccataccgttattgacgacgagttctggagaaaagtttggaaagagcgttggaaacccggtctggttggacgatggattgacgagcgtgtttgacttttatcaggttcgtgtcattaaactgatcgctgctttccacctattgaccatgtcctgtcggaactgataatcctacggagagttgaatagttcttcttgagagtacaagatgcagatgtagagcgatacctcaagttgttcacgcttcttccgttgaaacaaatagaaaacatcatgaccgatcataacgtacgttgtgtttttactttcctccatcctcctcccttcaacgctttttacaagggaaatttccccaacaacatgcgtcttccatgcgcacatcttttacttgatttactgcaacatctcggacgggacacttcgaatttgaatactaataaaatactccattagaacaaaccggagactagatcagctcaacggatattagcttctgaagtgacggaactcgtacatggccgttcgtccttttcagatatcttgttgttgtttttttttgttttttttttctctgatctatcattgaccgtaccactcgattggaaactcaattgataacagaaagaggactttcgaaagcccaaacccagacaaagatcatctacggctcagatctccccactttgaccacctcggacgtgctcgaggcattcaccgatgacccgaggttgaaattcatcagccgggaagatctggatactaaaatctcggtgttgatcgcaaaggagggcatggttccatctagacgttcgtttatctctctcctttttcctctgctactacccatgatggattttccaacgccaactttcatcaactgccacacacatatacaggtgcagcaaatacaatgatcacatccggtggatttaccctcaacggccaaaaggtaaccgatccgcaatcgacactttcctctgtctgcttgatcgacaaacaacttgtggttctcaagctgggtaaagccggaaactttgtggtctgtgtgaaagatgaatgatcttcttctttgtatcttaagttgtatttcatttcccttatctcaacgagagggaaaaaagaccattagacagacaagatgatcgaaggtttggaattgaaaaatgaatcaaatccgtgcataatgtttcacacatcgtcgggctgaacaagcgagaacgccgagtgaagaaacgattctaactaccctttcataaatataagatcaagttaccgtctttcagaaaaaggaaacatctctagataagacaattctccttcaatcgactcgaattgcggctatcaaaatttaaaccatgtaaagtcagccaggtggtttatgacccgtatggaaaaaaaggatggagaaatgcattgtaacgtaccatacagcttgcgaatcgcaaagtacctatcaaacaaagaaccacggaagtttaataaagacaacacggatggggacgagcacagaagaaaaggacgcacgaagcgatgaacccgatggatcctgtgaggaggaagttggccattgccagaagaactctatttttttgaggtgcccggtagttgcaacatgatcagctcgatctcccgttggcagcgactggatatgaggaaaaagagcaaagaaaatcttacaggtatccaaggtagaggaccatactggacagcccatctagtgagagtctcgagccccaataaaacaatccatagaggaaaagccagatagacgatccaccgccgatcaagaacgaacgccattgccatctaattcgttgattacacaagcgtatcaagtttgatcaataaataagggcaaacgatcagtctcccagaacttatcgtgaatgaacatagtaaggagatgcaacaaaccgatactcctcagcgcaaagcgtaaagtctacagatcgaaaggtcagttaaattcttttttgtgtataaaccgaagtaaaaaataaaaaaattgaacgacaaaactaaggtcttacaggtgaaaagaatagtgatcgtagctgtggtcaagacaaccacgcagaaggtcaagaataggaatccgaaagcactaaaatatcaatgttttggcgagtcatagatcagtatatgagtgatgtgaaagctgaagtataacgagaaatgaactgactagtacgccttggatccgaagagactagaaagaacgactgcggtcatgaaaaaaggaggattacaaatcaatcagacacagatctgacgtcaaacactgtgggtacaagaaaagtatcgatgtacgcacagaaaagctcgacaaacgcggccgcccagggaagtagtcccgcaagcaacgtcgcaggctatccgaaacaataaggatgggtgaatattggagtcggtgaagaagcagagacattatcctgaggacgcttacccatttcttcagatacgttggacccggagggatctgacggggaatctgattaaccttagtcgggtgctcaaaccccttattcagattgaagtgatcggaaaagaaaggtcagacagcatgatcttcacaccatatcatgataatacagtattgtatataaaagtttggaagacgcactccgtgtttaataccaaggtaagtccccaacacgttgagcggggttgagatcaagaaccaaagcgccacaacggccaagatcgttccgaacggaacggctccagaggacccgcttgacacgagaacaaggttcagtaggaagatgactgcaaagacaattctgtgttgattcaatgggaacatgggaagcaggtcagcgaatctcattctgctgtggatgagtgcattgttgaacgtgaacttacgtggggaacaggaaggaggtgataaagccaagctttcggaaatcttttccgtccattgaagcaaacactctcgccgagacatatccagaaatactgaaaaaatttatgacggaaagaagcacttagttgttgttcgaggttgcttggaaacactataaaaataaaacaaggaagaaagaacacatacactccgaaaagggtccatgataggatcatgactgttgccaagcttcctcggttactagggctcaggaatccaagaagtgcaaacccaagcgtgacaaggaccatggcggccagctgaattccagtaccggtcatggccgatagcaaaagaggattgacgggtggtcggaaaacctcgccatgaacgagtttccaaccaaagtcttcctgtacgtcctcctattgtgagccaatatgtgttgatgagcacaacagtattcaagataagggcaacaaacggaagattgatcaaagagggcactcacagatagatcaaccgcattgtatcggtgaatatccttaccgacagttcggatcaataccatgctgaccatcgtgcagaggaagataacgatgacgagcgagttgatcaagctgaaccagtggattttggggtcgaacacgtgcagatagttgtcccaccgaagtccccatgggatcttggagggctgtcggccgagtttgaaaaaggtgttaatgacatcaggatacacgactgacgtcgaatgaggcagagaggaagacaagcttacaatccaagcaacagagtaggtgtagaaaagctcgttatcagcagtctcgctgaggaccatcctcgatgctgattgacaattgggtgttgttgatccagctgtcatagaagcggttctggttatatcgttcaagggaaaaaaacgtgtcaaacagagcgttacaagaggtacaaagtaggagtgcaatattccgagctcacgatcgagggttcatcaagacgcccacaactcggaacttttcattgtctcgagtatgatacctgaaataaaaggatgtgaaacgtgagaccatcagatacgttgaattttgatgaactgttgagtcaaaatgtgactatcaagacatactgcaggaagatatcgaaatggttgttgatagctgggacttctggatcagtatcatcatcacctctagagcgatcgagagatttttaaacatcaaattgattgggtcagcatcttcagctgagtcaagtaacatcactgatttgagcgcgggcgagacttacaagtttacaccacctatatcataaaatttctctttcgttctgacatcaattttgatctctgccgctggaagcttgtccaccaagaagttgaagccatagtcttccttgatgagctggttgatgaacggcgcgtcaccagaaggaacagacgagctacataacgtctgacatgtcgagctgatgtcatggttgtcaaaagacgaggatgtaggtaaaaagagagagagagaggaaaaccattaagatttaaggtcttgtttaccgttttccgcgcgcgctcggaattctgattatgattacttacttttccagcattttgatctgtacgaagcaaaccgaaaaagaggtaagcatacgaaatgagctgtggacgtacagaagcagtctgattgaaagatgaaaaagtgtcggtcaacgaacttcgaagggagaactcaggattctgtctccaaataggatactacccaatccttctgtctgtttttgaggtcctccttcgggcgagcaaaagtgaaaccgaggatcgtaaaagtcatctgtagagtacgtggttcaggtcacagtttgtgttcagaagcggctacgataactgctttaggttgtcataggcttacacgagatcatagatcgctgtagggtgtatcacgtagggtaggcaagcaagatgagcatacacattttctgacaaacagacgtgttatacaacaaggcaagccactaacgagtttagaattaagcattggcgccaggtggttgacaaacacctcgaccttttcaccctttttgtagtcatggggagcagttcctgcgatttatcaagagaacagacgtgagccatccgacttcgaagaagacaacggacgattgtaccacaaagaaagctctccataaaaccggctgatcgtctggacagattcgatctataggcagagagaaagatacgcgtttatccgatagaacataacctaccagggagatagaaagcggacgctctagggattgcgatcaaccctgccaacagcaggctagatatctgaagcatgtctggctttcaagacgacgtgaattgataggacaccaagaaaaagaccaaaagatgatggtggatgatagccaaaagatggatgaggccaacgagatcaacggccaagaatgcgggcccagtgtgatcaaaaactgtaaccagggctttcagttaccaagcgcatacatccatcagcatacatccatcatccacccatccatcccagccggcgatcatcacccatacagcatacagacagccaggaaggtcgttcaaacaggttcatcatgtctagttcaacagtcaagcagggaccgatcatcccaccgtacgtggcttcgcatacgatccagtctctcatcgcttcggtccttcatcaaacgggttttcaggcagcccagtcttcggtgatgctcgaactagaggatctcgttgtgaaccgttcgtgcttccctccttcttctcactttcttttgctcgtttatgtcagccaagatggatagattggctatcagtgaactgacgcgtctttttctgttttgttcctacagagatcactgcgctcgcaacggcagctaaagagtacgcgtctctagcgaaccggatggactatactccgttcgatctgttggaggcatgtgaggaagaaggcttttcaactcatgatctttggaagacagcaaaaagagggaaacgtaaaggtttggtcggaatttgtgaggccctcttctgaacttttgtaaaacctgccgttgccgttgctgtttgagatctgatcatgatatcattgcattgcattgtggttctatagcaacacgccaagcgttcgaaattcttccttcccctccttcccccccaccatttttaccctcggactcggaagacgacgagctgctctctattcaagacaacccttcgtcctttaagaagagacgaagcaaacgacagaagattgcagctgcttcgagacccgatcatattcttcctcatgcccctccatttcctccgaatcattcgtacatggctacacccgcttctgtacgtttcttctaccactgctcagcgatacctgacttctagtctgactatcaaactacttcgtttcattcaaatacgatgaacaaaaacctctcttagctcgctccggtccaagctcctaaagaaccaccaacaatcgcctcgatggacgctaagctcgctcaaacacgacttgtcgaaggcgctctcgcgagactgatcgggaaaacaactggaagagacggaaaggataaaaagaggggcgtagtaggagacaacggagagagagacttggcaggtgacttgggaatggtcaactattgggttggtatagggggtcgaaggaaaggactttgaagagagcacgagtcagtgttctttgggtgaggacggaaatgatccgcaacgagcccaccgacatgcgaggacggatttgaaacgccagccgacgacatccaaccaatacagtatcaaaagattcaaaacaaaacatcgcctctcgagagactatgttctatcttccctcacctctcttttcgtgccgacgatcctgtttaggtcaacagtttatccatcagaaacttgagccaggatggatgaacgacgacatcgacagactgcgcaaaaccaacagtagattgcacaagccaacaattcaaacaatcatagtcataataatcattgcatcaacctcaacatcctcttcactcaattggtcagaagccaatctgaatgcgagagcaagtagacaagccggaatcttaaacaagtggaacgagtacgaaaagacgattatatgatttgacacgctatgatacccgaatcggatacaagatagatatggtcttcatttcctttttttaagcttaaccaacaaagaggaatcaccgacggacaacccaaaaccaactgaaacacaagagatgagatagagacaatgatgagaccggaaacagaaaggatggaagagaaaacacaacgaggggtaatatggttataagaacagagcaaaaaaacaagagagacaaaaccgaggttaaagtagagaatgatgacataaccagatagatagccaatgtctttaaatctactgaaagtacacctttgatgtttaaaagcgttaaacaaaaaaatcagagccgatcttaagtcaagaaaaccactctaaaaaaagccagggacatacttgttgaacatctgaaacggcgaaaggtaagttgcaagccggacattttcgctgtctcgtttggattcgtgcgtccacgcaatccttgcagaatgctgataggacaaatgatggatgttgtgaataacttcgatgatcaagatcgggcacacacaaacaaggggtggaaaaacatactgtgcatgcatttggtgaggcagtgagatctcatacgtaattggcaagttgagcatctcaagatactctacaaaagttcaaaacaaatttcagcatgaccaaaagatgagattcggtcacttcgggaatgctcaagaactaagggaacagaacgaacataaaggttgtttctctcttcttgaaggctcgaatctaagccaccggaggaaactacgcttttggcctttcctagcgctttctctgacttctccagtgccgcctctttacgttctatctctcttttcaacctggcgagttcttccccagtcgacatatgggatgcgcgttccttctcagctatggttatccgagtcgtcaacgctttgtttaacttgtgtcgatagatgaacgataaggatctttgtcagcatccccaagaaaggaaaagaacaaaggagcataggcaaaagaacactcacctcggctgaacgacctttctcagattctaacaaagctttagattctgcgacctccccttgaagcttgttcactcgttcttggaatgctttcacattcgttcgtagcatggttgcctctttctctctcgaagcctgaagatgatgccatcagtcatactactcattctcgaggaggaacaaatctccaagacaaggaagggggaaacgaaataagagagacgtacaagcatagcagaaagaccattctcagactcggtgagcttctcgagtacttttgcttgcttctccagattcctcagcgtcatcttcttttccgattcgacagcctctttagctcgcatagcagcaaagtacttgttgtccgccttcgctttctttatacgagcggacaaattatgagacagttgttaggacatacactcacaaggagagatgcaaggtaaagatacaaacctcggtggacactttgaataatcgatcttcgatgtctttcaagttgagcatcttactagctgccaatgcctctgcttcttcccatgccttcgatagacgctcgacctccgagtacaacgcgtccatcgcctttgacgaccattccatcaaaattgtcagtgcgaacaacggaggaaacttttgagttgcgtaacctcaacggggtaacttacagcctcattctccttggccttcaagtcgaacattttcaactccttcgccttttcctctaacctgatcgtcagtaactttatatctttccccacactcggatctggacccagcaccttctcaaacgcctcgagtctcctctcggcctccgctagatcttgtcgagctttggactcggatgcgagtaaggttttcagatctggtttcgaaccaatttggaccagttgttgtgatagagcgttcatcttgttttcagtcgttctaaaggacgaggtaaagagtgaggtagaccaacagaagtctctgatcagattcaatcacaaacttctgtaacaaagcgacgcgacacgatgagacatacaaaaacttggtttccagatctttcacgtacgaagcctcgatagactcctcttcaagatgctgaaggaggaactggaagatttcttcgctcccagcattagctgctaatttcagtttgagtctgcctacctccgagactagcgtgagaatgcgttcctaaacatataattccattgttttcaaaaacaaatatctgatcagtttgattctgatctgaccagttctcctgatgaatgcagcgaacatgaagaaaagtttagtcagcaaaactcacctgcttagtgtttaccaaattcatcacttcttccgtatatctaaacctcgtattttctaacgtcttcttctcgtgcaactcggcctgacactcgtctctctggtttcgaagtctggcgagatcgctttctcgtttaccaagttgatttctcagtaggtccacttcggctgacgaggcatcctatgttggtcgagataagcgttgaataggttggtcaggtttacgcgctgaaaagtgatttttgaaaaactaaggggaaaaagaaactacaaaacgaaccaaagcagtatcctcgaaagtcttccgattgtctcttaacgcgtcggcttcggttgtcaatttttcaaagagattctttgcctcggccgcctcggttttgaaggtagcgacttgtacgaggagttgtttgaacaatccgcttcccgctatcaccgattccgaaggatgttcagcctttgttacgcgcagtgtccagaaaagtattctcagatgagctagaggactcgatcaaggaacagcaagcggcgagatgaaagaacacatacctctgaacgcaagatgtccacctggatttccaaccttcgccgatcgtctctcaatcgattgacttccttgagtctgctttccgccagaaatcgatcttcagcttcagatcctccgcctagagctggatgagctggagtgctcgcggtcgatcctaccggcgttccttccatctttccatccgatccattcacaatcccgggagacgccacagctgcgctatcgttcatgtgcacatcactatttgactctgattgggtagaagggacgacagcggtggtgtttacttccggttgaggcggctgttgaccgttcacgctctgacaacgcaatcgatcatactttttttcggctttcaacaagtctgccaacgtcttctcttggtactctttcgccaggtcgagctgagactgcaggagcttgatagaggaccgaagtgtcgcgctctgataaacaagcagaaagatacaggaagaaaaaaagcacattgtaaggatattgagacaaaacaggagacctttcgagagaataaaaatggcgagtttagtaatcggaaacaaagcaaactcacgttcttctcatctgctttggaacgttgtcgtatctcgtcgctactcgctcgcgcacctcgctcggccagttccacgaacttgatgagcaaatctttcgtactctgtgagcgcttgtcgaccgcggccgaaagctcgggtagatcggactcgtctctcggatagtctgttgccagaaatatgtgtcaagccgagaactggtcagggcttacgccaacagaaacccctgagatggatgggcgacggataagataagctcacgcgaagatgtgatcggtgggacatcaggaagatctttggatcctattaatcctctgattgactctagcagctagagaaggtgatagttcgaccgatagagaaacaaggaaagggtcactatggaaggaggggaaatagagtgcacaaatcaggatttgagacaaaccacgctccagcaaacctcgacgccttcgagcccggcctccaacgcatgctttctcttctcgagctctccaactctagcaagggatctgttgtgagcccgtttatactcgagcatttgtcgatatatggcttcttttcgaaacgtcttttaggaaaagaaaacaaaaaaaacaaaaaatataatgttcgcgtgtcaaaatcggaatgactatcatccgtggtgatcctcgagcacgataaacaatcaccgcaagacgaatggaagaaacaaaatattctgaagagcagcaggatttgtgtgaagtaaaagggttcaaagaaagtgaagccagctcgttgagggagtcgttcaaatgaagattcgaaagctgttgtgaggcagccacgagccgtgtctcgagagtcgagtcggataagaccaaaactgactctgcaagcaactcggagagctttctggatcgagaagtttcaattcttcctcatctgaatcctcaatgtgagctaaacaaccaacgagcttgaagccagaaaagataaaggaaggaaggaaggaaaagaaagcatagaagaggaaagagaaaaaaggacgatagaatctcagacatcagccacttgaagggacatacctcaatgataggtgtcaatgagtcagcatcctcgtcttcttcatcttctacactcggtcttgcattcttcatccgactggctttgatatctggccctccaggggccgtcctctttttacgatcctcgcttgacgtgccagaattgacttcagaataggatcttttacgatccatagtgcaattgattctgggaccttttggattagacaaagaaaacaagcagaccgttcagatagaaggagagaggatcgaacaagaagcaagagaaagaggaagaggaaggatatgcgagtgaacgtgagggttttgatgtgagaaggagaaagcaaaggtggaaagcgtacggaaactgggcagaccaggaagaaaaacaatacaaatttatgaacattttgtggtcttttcgtaatacttttcacagtctgtttcctagtcgtcaccttcatctgaaccatcacctctttctgcacacttcacatccttttcttcctctttcgcagatagatacttgattcctcagcacatcgaactcgatagcgttcatttcataacaggacaggagctcagttagccatggtcattgttttatataaccgaattcccaaggagtatatagaggagaacaattcctatagccgacttgtaatgacccgtcgagcctagaactggaaccacaaagaagaatatgccgaggtctctgtagagcttttctatagccataaacgaggcatgataaccagttcagctttttagtactacaatacaacgacaaagtctgaagattagggaagaaatcgtctagtagactccaacctacccagcttcattctcaatcctataaaggtgatcgttatatcggctgaatcaggtctccctctgaccatcacgtcgtcccagctagaatccgaaactatagcccactgatcattgatcttgactttaaagttgacccgatccacagacacttcgccaaacgcttcaaggaaaatatggcgcaactgattgactgtctcctgttaattgcgtacgcaaagaacacacagattgagatcagatacacaggagcctccttgtcaaatagttgcaatgggccatacagatggccacagggagggaaaatcagagtgaaaacaaacctctttgctcatccctcgagtgagtatcaccatagatggtttgggatgcacacctggaggccaaaaagtgcaagtaaagaggttctccttcgcctcttcggacatgatggtggcagtagagaggaggtacaggatcgtgaagcaggagagttcttaaaggaggatttatatcgtgttgctaacatacctgagtgaatcttataacgtcttgctggcaaatttcagtaaaccttatgtctggatacgtcaccatgtgctgtcaacgttctctaacgttgggccgaatgtcgcgctggcattgcatgcagtgctggcaatatgtctggagtatgaagttgatggcgacggaagtcgctttgaccgagcagtcgaaatggacaggcctgtgaggttgcgcacagaggttcaatatgaagacggggttgaactgacgagagagagcaattcatggttcttgccagcatatataaaaacgggttgttcacacccgaaaggaaaagaaggtggaatgaacagagaggcacagagagtgggtctatcaagaagaaccttataacggcatgcttcttgacaacgaagacgcagaagagatgcaaatgaagcgttcataacatccgtacctcaaaacatgtgtcttatcatcaaataaatgaacaagacgatgatctgaagagtaacaatcccatgccccatgacgagaagcctaagcgccaggaagggaagtccgatgaggacaatccacttggcttggtctagaaagcctcgaagaaaagcgacagatggctcagtttgaagggacttgatgctaggattaagtcatgaagtttaaaagatcacattcactcacacagcaatgccgtcagcccgtccattttgatttttaccaaaactgcatgctgctgtcttttgaccatcacgtcgtcccaactagaatctgagactaaaaaccagtcaagcccgactagaatgtggaaggtcactttgttcgaagacactcggtcgaatatttcaggatggataaaacgcaattgttttatataatccttaagagatgtaaacatgggatcgagattgataaactgactggcttttggtaaagcggttgtctggagagtaagatgtggacacaggacgaacttctctgctcaaccctccagagaataaaaccctcaaagaacgagagggaacactcccagtgttaattttgaaggctacaatattcctcgccgaagcttccttgattgttgttgctgtctgagaggaaggactgggtgatccgtcttggacggacgcattctgaggacctttgaacctgacaagagaccatcgggacgatgttctgtggcttgattagaagaggacggttgggcctcctcagattccttggtcgacgatggtatccggctgtaagcgttgtcagacatgacttgttggttgccaaatagacactgatagatgtatacgagctcaagattgtaggattcaaagctggtattgccaaaagtccttcgatgaatgaaccttgaattgatcatcctgatttgccgatatccatgtggctatccagacacggtatggacacactcgagcctggcatcattatcagcgcgcgcgcctgtactacaactctgactgatcagatcagcagtagagtcatgcgattgaattggcagtgaagggcgaagttgtgacgaaagaaggagactggaagttttgaccggctcaggggaaacggtgtgtcccacaaagctgctgacgtctgccatgcacaccaccgttagggtttccagaacctagacaacaagccagagacatagcgcgaatacagacactgtagtcaatttgggccctcaatggcatatgaggagacaaaggcggacgagtgatcgtaagatgtttcgagacgtcttttgaatgtgtttgaagcttagttggccggctgaagctggatgacgtttgtgtatcatgttcgagaagttttctgtagtcttttggataaaaatctctaatgctctttccgttttccgtatccggttttctcattacaaactttgtagtctcgcctcaccggtttcctaattaaatcattcagatttccacagtatcttctttctcaccagcctcttacgttcttctcttgctccttctcttcttttcctctttgcttctctctcactctctccttgcaactgtagttcggacaagattggccttgcaatccggttgaccactgactcttcctatcttgtattgtcttgtctccttccgttgttggcatgcaaaaaagagtacagaaataatagatgtatccatatccataccaaccctcaggattacctccaacgatgcccgactttcctccaactctacccgtgctgaactcgacatctcgaccagaatcgcctatgggctttgtaaacggctctcatactcatcagcctactagtcttcaatatactgctccgactcagacctctcctcgtgatcattcttcttcttctctcgttgaatccgacatgttgacggtgaaaacccctgcaaatactgcctcgggcaagccctcgtctgagattcgaccaagctccgtgtatcctcctgaagtcagatcggtagttaaacactcctctgtcaactttgtcgatcacccagtcaggcccactccctcgcctgggattcagtcagccaggattgactctaagcagcgatatgaatcagatcttcaaattcttagaaggatcaaactcgatatatcctctggtcatcatacgtcctatagcgcgatcatcaaacctctggcactcaaatcggtctcagtgactgctgaagaggcagagagtcaacattccgctgctacagggctccctccagcttcttccatccatgctctgccttcgacccatcgtccgaaagattctagcctttctacaacgactgagacggcggtagagaccgttcttcttccagatactgacgagcctattgaaatcttgacagactcttctacttcctctacacctgcttctataccttcaatcacagctcctcgctctgttctagcatccagaataatagggaatgggcctcctgtgccaacaggaccctcagctttgaaggatcggttgttaagtgcaaaccatgaaaacgcttcccgggggccaagtacaaacatagccaagtttgatccatcagttttgcctcctacgcaacctcgggctcacgcagagggggccgcaggtaggagacaaaaaagaccaaaagtggatctggatagttcaagagatgggccaaacgcgatgatgcttgactattcaggcatgtacgatgaagttcctgctgctcccgctaccgctggtactgtcgacgtttccaaagtagctgttccagatactacttccgaagtgatgataaagtcgtccaagaaagtagcgcctgctgctcatcaaacc

SEQ ID NO: 2459 - DNA, 5077 bp, Xanthophyllomyces dendrorhous
gctcataccaaaccacacgaactccgttcaaatatctcaccagctcaacctatcatatcggactcgcctacgggaggattgccacacggaggcgcggatgaagagcagggtgatcagatggacgaagaggaggcagagatcgagacgtttttgacgagttgcatcgaggattcctcagccactgttgattccggcaagtcttcattctttgtgtttcagctattcatctgtaggaaactgatagtgcgatttgattctttggcctatatagataccgagagagttgaccttagtaaatctaccccaatcaacaccacgtcacgctctgcctcgtcttcctcaacctcatcctccacttcttcaatcaacaaatctaacagtccaagcatcaatcccactgaaattgagaaagatggaagaatccaaatgtcaatcttcgaacctcgaaaactggtttcctcaattgtgcaactctccactaattctgtcccaacacccattcccgttgtatcttccgcaatatcgtcttggtggaactggcgcgttccattgatgagatctagagctcaagaacctaaaactgactcggaatcagttgtttctccaattataaccgaggttcctccagcatcatcatcatcatcatcatcgtcgcttcattcagttactggcgagaaggacgctttgaaaaaggtcacgaaggaagcaagtagagagcaggaggagaaagaagaaagagaacggttggcgttgaggaccaagaggaagaaacgagagcttgaacagcagcagtacgagagagtgccggacagaccgggtcttactaacagaagaggacctaagcaggctctgaaggaaaaggaacggagggatcgagagagagaggcaaaagactacaaagaggctaggctcaatccgatggacaaggggaaggagaggagcttaggaaaaggcggtgaccggtatgtcttcttgtgttttcaccatacctgtatctctgactaaatcgaactttgttcttggtcctttgtattgccctagataccatccttatgaaaggtcgaccaacggactcacatctcctaacaagtcaaccagcctacactcgcgtcttgccagcagaggaagcgagcttcccgcccgatctttcgatctttcttctgatagacgaccggaggataaattcccgtatcggtacgacgcctccgacgtcaatgccgacatcatctcggctaaaccgaatgtacatggcgcgaagacaaacgcccgatctgtgtcacttggtttgaacgacaactaccgaccaggaaaagcacagggaatagaaatcatcagggacgatttgtcaatacgtcaatatcccaaaccattcagtccttcgcccgttcatgcccacgcgcatgtacctccgccagcctaccaatccggacctgtgcaaagctcagcctatccgtttagatatcagcctcccggtccccatcttcctcctctacctccacctccaatcatggatcctccatccacaggatatactaggaacaaaatgtcgaacggacacaatgaatcgtctgattggtcgaacacggtccgacatgctcctgccgggtacagggatccttttcctcatcgtcaacaactgttacctcaacagcagcagcagcatcctccaccaccggcgcatccaatatacccacatgcagatccatcgactctgagccgtcacccatcaagctcctttgaacctctgccgaacggaaacagaacaatcaacaacacatcagcttcaagaccagggccaaacgactcgaacctggaaatcttgagagagatgcaggctttgaaagagaagctggctatgttggaacaacaggcttccggtagcggtggtagaggaggcgatgcaagctctgcgccattgcatacacttcctatcccacctcctcatccccaaccttgtccatacgttcatcacgaacaacagcatcaacatatacagcaagaacaacatcgatatcagcagggctaccctccgtatggagctcctcctttcgcgccctctcaatcatccagagtcagaaaccttcctccaagaacgtttgaaggaggacaagagaaagggtggaccgcaaccaggttagaaggaggcttaggaggtagattctcagaccagtcagttccgccagcatatcaactccagcagccgccgccgccgccaccaccacaacaacgggatcagacatgggcaagagaggatgaagagtccaggagaagagggtggagatgatgatcgtctttccttatctctttgtcagagaagtcttcggggttaatatatatgacgatactcgaatttttggccagtgtttatgattattattggtgttcaaaggtgctccttttagtgaacatctattgtctgtagagtttcaatcatcgatcacgagtgtacgagcagcgtagggacttctttttcatgggcatgcagagatcaaaagaaagacagatcgggattcgatgtcatcggcgctcatcctcggctaatagactttttcctcgatggtctttacagaagaagttgagaaagaagagagtgcatctgagaaatagcttatcgtcttaaaaactaccgacccagtgttgctgagaatacaaatatctggtcagccgaatgtatagatttcttgagctgatacgtcatcctgtgctcactccctaacgtaaactatagtcaaggctgatgatggttcaggtcttctatcttatgctttggtctcattccactttgctttggtcttcttcaacaactttgtgttctcttttctttctttttgatttcatgtgtttgcttatttgtttgaattgataaatactatcagtttcctgaaatgtgctctctatcagtccatatagatcttgagtggattaaaaagtatgcaaccgcaagatggacacatgtgctcaccctctctccctacttttctatatacgggttttccaatccttcttccaatcactcatccgtcaggagatcgaaagaaatggagaagaaaagaaacgaaagaaggaaaacacaaaaaaaaggatcatcggcatgttaaatgttcggcatggcaaactccgatggagataagagaactcaatggctagttccaattgtcttctcggctgcgggttggtgttagccgatccttcttgtttaccacactcatactccttctttctatacaccaggccaggtttaatccccgttaggcaagattccggctaatcgtcgttcaggcatgtttctattctttctattgaccatcggagccaaaaactcgccgcttacccaccctaatatcttcactaacgtttgagctgacaatcttgtaaaggttgcacatggtacctaatgccaaaaagactgatgctgagccacctcttgaaacgttaatcccttccactgttctgattttatctcttcgtttcctcctcgtggacgatttactattaataccactgatacagtgggtcgttcggtgcttaccgtatcgaagctgttcctttaggcaaacatcgtgagaacttgaatgcatatcgagcggatcgaggaaatgagaagaaacacgatagactataaatgagacgagatggccatactgtctgttcccttttcttctttttttttcgttaacacgaatccgtcgttgtaacggattttttcaagccaaaaagatgaaagcatcatcattcctaccaaaatacaatgaccccattgccgatgggacggggcatgagtcacccctccaagaggtccatgactctgaattcaaagatgatcctaatcttgaaaaggccgatgagaaaggtgtctttgtggtagactctgttgttgaagcgacaacgacggaggacgtcgaagaggcaagtcctatcaggaactttcttaggtctcaatctctttcctcaagacgatcacgctgacgatgaacatcttgcgctttcccccatcaagttggagcgccgattggaaaacagtcaagctctggatgaagaatacgccgtccatgattcccgagatggttggtcatgatccgtcaagatacttatcatatctagtccgaataactaatcaaccactatcataacagtcgccgtcaaggttctttcgacgtttgacgacccgactttgccggttctcacattccgaacgatattcctcggtttaggattttctgcttttggatccgtccttgctcagatctattacttcaagcctcagaccttgagtgtctccacaagtttcttgttgatcttgacttatttctttggtgaggtcacaaatgaggattcagctcagatgcagacggtgttcgattctgattctggtttacctttttatctaaatctcaggtcacgctatggctactatcctaccttctcgaggtatcttcagattcctcaaccctgggcctttcaacattaaggagcatgccgccatcatcagtacgtgggagttctaccagtatgagattatcatcgaaccgctctgatcacaaacaccttcccttgaatctgacagttatgtgctcgaccgctgcgggtagtgccaccggtatccaggtcatttctgttcaggacttgtaagtcatcgaatttatttccagctaatgacagttatactgacctctgtatgaacatgcatcaggtactacaacaacaaaatgaacccaggagtcgcaatttgttagtctttggcaactctttctctttttcacgaaagtaagactgacccggtctcttcgcgcgtctgctttcattaaacaaagtcactctccttgggtcgcagcttcttggattcggatacgccggacttcttcaagaagccttggtgtaccctaccatttgcctatggcctcagtgtatcacctcggtagccatgttccaggcccttcacttcgacggtggattgagcaaacagcgaaagaaggttttctggatcatcttcgccgccatctttgtctgggagatcttcccccagtggatcttcccttggttgacgggaatcagtgtgatctgtctctttagtcacaac

SEQ ID NO: 2460 - DNA, 1855 bp, Xanthophyllomyces dendrorhous
agtcacaacaatcctactacccgaaatatcttcggtggatctaacaacaatgaaggcttgggactgttttcaatttggtaagtcacagacactttgcttttcaacgatttttcgacctgaaacaatataacacaagcaatctgattctcatggctttgtacactttcgtatattttacgcctggcgttgcagcactgattggttgctcatcggttcctcgtgcttgtatactcccctgtggacccaactgaaccagaagttcgtctctttcttctactttggacgcttgatccattggcatggtctagaggactgacctacctcggtggttgttcgacagtattgggattgtgtttacatacatcctcatgtgttccgtttactacggcaacatatggtaagtcttcctcgttttgtaatccttgtgcgataccgtcagatcttatagttcatgtcatctcgttaacaaaacaggcacggaaagagcttcccgttcatgagtcaatcgatcttcaccgcgaacgggaccgtttatcctcaaagtgacatcctgacggacaatgtgttcgatgagtctaaatacgtgggtcttgcttagaatgtgtttacgcttgtgtcaaagtttctttatcattctacaatcgctgaattcttggtatttgtaggctgccgtcggtccagcgtacttctctgctaccaatgctttgtatcttcttgtcgaaaacttgaggtttgtgagaatcgatccatgtccagctcggtctcatactcaccgtttttcttttcatccctcgtttcttcctcaaaaacgtcttagtttgtcgtcgaccatagtccacacctttttgttctgtaagtcctcgcctgacggccacacagtctatctgtctagcaacgcccgctaatattgcggtcttcggtacgttcatgaaaacagattggccagagattaaggttcgaccgagctttgtcatatttgctctaatgctctaccaaccaagctgacaatgaaataatccacctattttcgcagccattcttcgtcggaatgaatccttggaataagacgaggtttgagatcaacgatccgcatttcgcaaagatgcaggtataccccaagattcctcggtggtggttccttctaatccttcttggaggtgagctctctcaagagtcttgatcatgaacaagtctttatgcatcatctcgctaactcttgatattcgccgtgcctcttccaaatgtaacagctttcgccatcgctcaggcgacggactacacaggaaatagtggttttccatggtgggccttgcttgtcactattatcatctcattcttcttggcgtgcatgtactcgacgttggcaggtgagtactcattctctatcctttaaaactcaggcgcagtcatattcaagtgagttaacgtaaaacttgatctctatcaggtatcctcggtttctaccaattctccagcggaggaaccgggttcttccagatgctctgtgcattcttcctccccggtcgacctgttgccaacatgtaagtttccttacgttcaattttgatcaaaccaaaggatgtttagcgcactgctcaagtctgccttttattcatcctgctctccgtttacgatgcaataggtacgctgcgctgtacggagctacgtcgatgagtcaagccattctcatgcttcaggacctcaagctaggccaatacgtcaagcttcctcctagagtcacgttcctcatgcagatgcttggaaccatcgtcggagccatccttaactacgttatgatgctttctatcatatccgctcaacgggacgcgttgttgtctgtttccggtactcgtct

SEQ ID NO: 2461 - DNA, 18277 bp, Xanthophyllomyces dendrorhous
ttcgtataagaattttaattgaaatcaaaatgaattgacatacatctccatcaggattcgttcggggagacgttccagttttggctgcttcctctgcgaacatcttccatgttgggttgagctgtatgcacatgcatagaacacccgcgcataccagtcaaaatgaaaacataattgacaccaacagttatacgaatcattcactaaccctctctagggttgcttgaaaatcttctctagacactgtgtgcttttgtttacaatggacgagctaagatcccaagaaacacccacatcagacatacagtttgtgagataaaaatgatggaaaattggagtgacaaacatgaagcgtgccgtgaagtgctaatattctttgatcggtctcttgtttggaatacggtgaggccttgttatgaaggccgtcgacctgataatttacaatgaccgcgatgcgcgaagcgatcatgagtctgctcttatcatgcatttgaaccagatcgaccctcttgactcacgttctgtgtaatcagttgacgagaaagtcccatccacatcatggctgctattccataatgtattgggtttggctgagaatcacggactgaacaattcatcgtccgagtcagttggatgtgatacttgtgcggacaaccttggagaagcactcacctggcggccatcccaagaaacctagtagagttggaaccgagtgacaaacgttaggggttatgttcgatcaagatgctgatgtctatcgatcgatttatcagtcttacctctggaccaatatcgctttctaaagctttcaccaaccggcgatggatcaactaattctccatagtagaccgggcggactgaaaccaattgacaaggttatgtaaggtagagagatcagcaaagatcgtgtgatcaaggcagtgagtttggttttatgactgccttcgtacaattagggtttgttgtataatgcctgatcaaaggagcggtgaaccacagagtagtttgacaattagaatactttcagcccatgacacgctactgatatcaaaaggcaaggcgttcgaggtgatcatacgcacccttctttccctctataagctctaataccactatctacactaacacctgctccggttatgaccaaagttctacccttgccttttgccaaaaacgaagacaacctagaagccgcttgaggaagcgtgatatcggccaaaggattaaagatcggagttgcccgcggaggtaacgtggggattgatatgcggaccatcggtaggattcaagacgaaaaagattcgaccagggtctcctctctgagatcaatacagtatatctcgagagcctatgctttaaaaacctcttcaagcgtgtctgtgttcaaacaaagatagaggtatagagtttatgtgtacagggatgaagaaagtcaagcgttgagttcgatattacagactgatcgatgggctatatgaattattcaattaattacgtcatcagccttaaggcaatttacctaagtcctcgcgctacttctcgaacgcacgcacgtttattgttcccgtttggtagacttgcctacaactttctttgaatcttcaactttttcattctcttttcctcttctactcatcatccatcgttcatcgtttcagttgccatcgtcagaaggcttcgtactgttagagaagctagcagaaccattcgaactcctaggagctccaaatcatccgtatatctcaacaactaccccgtcatgtcctcgtcttccgatacagggtccaacaacatctggtcaaactttttctcggaacccttctctgaccgagtcctttcattgcttcctgggaagagccacaaggacatcagagccaggaggcagcgtggtgtccgatcggataatatccccgaaaccaagttcgttcaacttttagactatggtcgcttctggtcgggttttgtaggtttcgaagcttatatactgtaattcacagtgttggacccggagaagagcagcctctcttgtccgactttcatcaactcggcggaggagtctcttacggaacgtctggggagaacgatgaagcacccgtcaacctggtcagagttcccaaaaaggtggtctctgtgatcaatgtggagcccaaagtttggtttgcaaatgagcgaagtacgcatctatttctacccttcggcgttcgaagtttggctttcgcacagagaaccacctcttcgacccagtcaaatatgatactgactttttttggacgaccttatcgtgactgatctagcgtggttggcttacttatcaatctcaatcttgcttggtactttggctggaacccttttggccgctaccaaccacggaatgaatgcgcatcgggcacatatcactaagatatttgctggagtctatgcagtgatgtacgcccccgttgtctggcttccattgatcgtactgctctgtttatttctttactaaccactgcttcattgcgtattctccacagcgcgcttgtggttcttctttacgggtatgctatcttccaaaagagagttacgttgatcaaaaagcgaagtggaaagcactttggtacgttccttatctactctatcacaagactggatgagccagtttctgcaaagctggtttttcatccgtctgtgcgtgctttcatgggcttacattcatcaatttatagatgaggtcgtttttccgcttcttatctcgatcgctatctttatcgctatccttgccaacttcatcattcgaggtaagtcttacatatttcttgtcttgaaagatggcagataagcaaactaacaggactgctgtcttgatatctcataatcagtgcaagaattgtcagtagcgttcctagttctgatattctgaccgttctgaaagactaaccttgtcccgttttcttctggtgtgcacgtgtggtagccgagagaggaagccgcatactcagcccatttaaagacttttaattctttgtttatacttaatgttttattggatatgcataatctgcaatatagactgtcattttttttaaaacttacatgcgtcaattgttgaaaagggtttttttcttcttcaaattataaccgcatctacctccgacaaactaaccagacagacacttgccatgcgttctcgtaccctcacccttagtgaatcaaaccctaaaaagcggtttcgactgtccaccgcaactgacagccactcatacattgacgagccttcgacgtcaacaacaaacctcaacgcgaggtacgatcgattgagtcgggaggttggtgtcaagaaatctggcaagagatttaagcacaaacgagaggttgaccgcaaactgtcaagagtcaatgagcaaaagttggttccagatatagattcttctgaagagaaattaccagggctgctcgtgagtgcaacagacctgactatatcctctcgtttgagacgcatatacccgtcttgttccaccagttatcaaggaagataataaacaatttgtatgtgctgcttcatcatcctgaaatttttccgaaggttgatacacctttcaggtcgttggcaactccgacctggtttaaaccatccccgatttctggatctggggtctctagtgatggatgtgagtcggcctggtatcatggacccagaaggagatgttgttcatccgattttggatcgttcactcaacgtttcttagcgcatgtagtccactttagctcgggtaactaatcaggatttaccacgtctcttccaaaacgtctgtagatccagtgtcgaccccgttgacgtctcctcattcaatcataccattttctgaacctcacctcgctgaaccattttcctctgtcgcacgcaataatttacctcctccactccgtctatcaacttcaccgcatcaagatttgcagctctcttatcttcgcaaattctcgcactcttctcatgatccaaatgcgtcaagtgacttgtcatggagtaattggacatcttctccgttgacagccgagcgatatcttactgaccgtccgttgcatagttacccatcacatttggtcaattccgatcgatgttcaacggctgtaccatttgaagcgcgctttggtccatcagatgcgaggtctgacccttcagtattcgatgaagatttgttcttacaaccgggtggaggtcaagatatctaccaacaaagtccaatcgagaccgaactagatggaaacgctcaagatcgacttgcgccatggcagagtcaaatgaacaatgatatcttgttttatcaaaagcaagatagatacttcccatgcactccttatgtaagttagtcaaagtcagtgtctggccaatatcgacccgactcatgccttcttctacgtcgtgcctctatatagtcaacttctgagaatatcccattctccaaaccgcataatatggccgatcaccattggatttcaactggttctccacttcttcaccgttcgattcttcctaccgtatatcaacccatcataaattctccgcttgctcatcatcagcaagttttatcaaggaaccggttggcggaagactttattgaggttacatcaccctttgaacctactgtatctacagagcttgataccgtgagtaggctatcgtttgcgatatataacctttttcttgtgcaataatgcatacgtcacaaaccatgagcttaaactggactattttgtcaactatgttcatctagtatcctgagcatcctttgacaccggtaatttaggaatccgttgaatattgcgctatatcttgcagccttttaggctgaatccttcattggagggcttgatattgtcttgacaggaactcattcgacatctacagcgcttgagctcagaagaagctcggcccgccatatcagtcggaagtaagatctttctcttgaatgtggttgttgctttggagagtatactgatatgatacaactttttgtaagacctgagggaaacaccttccatatctgtcggatcaatcagagcgagtccgtcggtctctgagcttggaccagactctcacgcaaatctgttcctgaacaggcatattctaccaggagaaccgactctcaacccgttctacgatgatacctcaacagacttgtgcgctgttattaaaggttatccgcgttctctgtccgttacagataacgatgttttcgaagatggaagacaaaggagatcgcactcagttctgtcgcttagacacgaatgttgatcccctatgtatcattatctatgtacttcttcttatatgccgaatgacaaaaagtttgaaaaaagcagatcaaaaggataccatgcagaacggtgagatccatagtgtgtttctgttgcggataaccggcgcgctatcttttacaaaagcggagatggccgtcataagatgtcgcccgcctgaactactccgaattcgtcttgaaatcgccatcaaccatccatcttctcaccttgaatcatctccgtatccgatcatgggtgtatatactccattacaagaccggcctcagtcgtctgttagaagatctcctcttctcttacttctcttcatccctctcctaggagtcatccatcttgtctccggtccacttagcgagtcggctcactctgggcttgccaatctctcgcgacatcactcgaacccagccgatcggtggtccgagtacaaatcattgaaatgtcccgttcaggtcaagaccatcttgcctgcaaagactcttgttctcccaagtggatacagagcacaaagtgcaaagaggttgtcggatgctgtcgtaagtatataccgcgatgattggttatctttttttctcctacctcaaacgctgatcggtcatatccgatggttatggggttttttttacgatggttaatgaagaaacaagcaactatttcatacgatgacaatggtctacctaccgaagacaagcgatggctccctttctttggctttcaaacgtggttgcaggatacttttccagcggtgtttgaacatcctgcggtcacttacgaagcggtcaatacattgggtatcttgaccaccgtcaaaggaagcgatccgtcgttgaaaccactcctcttgctggtaagtttgataacttattgcttctaatttttcgattgcctcactagaaacgaacgactaaatgttttggtcatctgaatcgtccgaaacatcagtcacattacgatgtcacgcctgcaccgctcgaaacatacggcagatggactgtatgtagaagtttctttctcgatgcgcacacggacatcatctagctcacacttggactacatttaccaatagcacgcccctttttccggattcattgatgatgaatatgtctggggtcgaggcgcgagtgacgacaaaactcttcttgtgggttcttggcatctcaatcagccatcctacgagcttttaccgattcgcttgaccgtttacattaatttttgcagattggccaatatgaggcactttctctgctcttgtctgatccagattgggtaccccggcgaacagtcatcctctctcatggattcgacgaggaagaagtgttccaaagacaaggagccggcgaactagccaaattcctcgagaaccggtacgggaaagatagtatgctcttggtcattgacgaaggaaacagtttcgccgatgcttggggagacgaatttgcggttcctgcttctagcgagaaaggatatctggacgtcaaatttacagtcgggtacgtcagtttcccaactttttccttgatcgaaacatagatctgaccacaaattcgatattatgtcatattcactcttcagaacaaccggtggtgtacgtgttttgttcttccttgcagaaatactccttcgtgatactgactcatccattcttcggatatcattgatcctaccagcactcatccattcctccctctcacagtggaatcggtatcatggcagacatcatccatgcgctcgaagataacccttactctccttccgtacgtcacacagcatcgaattgatatatcttgacacttgtcattcaggacaggcctgacatgtcagtcacgtctctataattctcaagtttggtccggatgatccgacattggcattcttgacctgcgctgcggagtttgctcccaagtttcccaggaaatggtcaaaattgatcaaggatgggtccaggaaatcattgactcatttggcaaatgagttcggaaaaactagtcctttcaaccatggtagctatttgtttctttgcttactcatatgttgtcggcgtgcgcgcttcatcgggatgaccaagtatctggcaagtgacgattcgtttcgtctgttctgtataaagctttggtcacgactactcaagcgattgatgtcattcatggtggatccaaaggtatgggtatcataattaccttcactcttagaacagaagaattgatcctgatatggtttcttgaaactccctctctctactttcagtcaattcgcttcctgaggaagtgacgcttctgatgaatcaccgagtctcattcgattcaaatctgacctcggtgcagaaatcgattgcctcccttattaaacccattgcctctcactatggacttgccttctcggcttttgccgaggacatcaccaaatcgatcggaagtgatgtgcaatctgtgctggggagtaagtatatcaaggtggagactctaggcgttccgttagagccagcgccgaggagcgtggtagatggtgaagtctgggggttgttggctggaagcatcaaagcagcctttccaaagaaagacggcggggagcgcatcgtctcgccttcgtgagtatatgcctggtctcggcaggtgtctttcactgcgttccgtttgtgttagtctgctttctgatcaaggccctcaatgttctgtagtaccatgaccggaaataccgatacaaaggttttttgaacccatactatctttccatgtaaccgcagccatgttgacgtcgtctatccttgacctcctttttgttctaatctttataggtataccactcgttatccaatgcgatctacaggtttaaaggcgtacgtttacttcaatcgtcgtgtgatattggtgaagaataacgactgacatcattgttgtttctctcaactcctcaggacggacctggcggaggcaatgcagtatgtgttcaatcctgatacaaccttcctgctttctgtacgattgtctcaaagaaacctttgcctaaacaatcgttctgctccgctttctttcgttcttcgctgttatagcacactgttgatgagaaagcacctatcgaaggccacttgggaatcattcgatggatccacactatgtgcgctcttgaaccaacttcttgtctactacccttagatagattgacaaattgactgacaaactacccggtgatacctttttatacgtccacagcatacaaaatgctgtaagtctatttctcctattccaacgtagaatctgttccgtacccttagatctgacgaacggttgtgaatgttggcatgggtaacacttttaaaacatcaaggatgcttacaacggacctcagtaaagcactcagctgtacgactttcaacattttccttttcttctcgttttcttttctgtcgttgtatgattttgttgtcctctttcactcttgtactgagagttgtgtgtggatatcgttatatagatacatgtatgagactttgggtaaatgaataacggtgattgagaacatgaatgtgtaagcacacgagacagaggtcggtacatcgagaatggacaacagcgcatgctgaaagtaacaaggagaattgttcacgatgaatccatctcaacatcctcttcgtcactctcgctctcgccgaccctgttctgactccctgcaccaatcacactgtcatctccactctcgctatcactcaagctagaatctcggtcgggggggtactccttaaatgcataacctccctttccgatctcttctatcagcttatacaaatcagtatagagttctcggagtacagaaggcgccgtttgtggaatcaagccgatcgctttgtcgagataggtgagagcagttcggtggtcgcttgttgccggtggggctaatggttttgataccaagaatcgattcgttagtacaagattgagactagttttgcgaacgatgtttatatcatgtgagtctggtaaaagacttgcctcctggagaactatgttcaaaggcgattcccaaagcgcataacgcggctagaaggtgaagctccggactaactgcgtatggtaagccgggaaggaacaggtcgagcctttcgagtgcacgctcaaattgaggaggtgaacggatgagaaggtgttgagtgtatgtgtttagcaatgggacggactgtgattgaaataaaaacgtgatgacaagctggatattcagtcttaaagtccttgagatgaaggaactagaaggacaaaccattgttcctccgcctctcattagaccctccagccaatcttctcgtctaccctccaatctatccaattcttccggttcattgtcctctggaaaatctctcaacaaagcgcttccgagaacccaccagtcttcccaaacggtctctcggagtccaactagaattccccaagcgcgtctagcccggtcagaatcatttctgaggagcgataggtgaaacaccgccgtcagatgggcgatgtgttgggctctatgggttttcggttgactctgtcgcggcctggatgatggcctggaagtaaaggcagaagggccggatgggaaacccatctcatgcttgcctatttcttgtgagagttgagacacgttaggtcaaaaatcgaccaggaacgagagcgaggaacaggtgtcgtaagaagttgcgtgaccttcaaaaagctgtgcttctcacggcttatgtaatggaaaaggccccgctaaaatcgagacgaccctgttcctagcgtaatcttcccagtccgctaataacacataccgtcctctcgctctcatactctccgtaccaactcatcttcaagtacgggttcatctctgtcgttgtctttcttctctaacatacaaaccgatacttacttgatttctgtttaaaggagctcttcgatgcctaccggttcgtttctctgtccttccagcttagttcaagaaatagtggcatcttgcttgacgcgatgaaccaaccagctgacttcgaattcttccactcaatctgatctcgtcttactctacctgcttttattgaatcacaatcagcttctcacccatactttcccacgcctgctaggggactgactttgttcgctcgaggagtgagtcaaaagattcactatcaagttgcatctcattattcaccttgggcccactcgttcgccagaattggacgagtgttccgccattcttcttcattaactgacattctagaatgcatcctcctcttcttcttcttcttcttcttcttcttctcctctcacctgattaaaaaaacctgttctcatcacagattgaaggtggtcagtcaaggtctagtttataaaaagaaggattatgttccagacatgcttgctaatagtcatctccgggggtttcgatctgcgatatattcgggccatctagccttctggttctggatgttctatcacagtacgtgatccattctttcttccttatccaacagactcaaagaactctctcaagaagtcgaggccactcagcatgagataagatattccagcgactaaaacatatgatctcttgtctctttatagttcgagagagtttcgctgtcaaacttgtttgtcctcatctcttttcatctaagcagagtcttcatagctgcttcagctagccgggccatctcaaagatctgctgatggctaataattccgttccgacactgtacataccatagcgatggagatacccgttccagaagattggctacctctatgaaggagaaggctggaccggtggaaaattcggatcctggccttccaagcgtggatgggtcaagaatgccggaggggatgtgtactagaacaagagagcttgtattcaccagactgttgtatttccgagaagggcggacgatggaatgtccctttgtatgctcctttgacacacgcacatggaggtgctgcaaacttaagctaagacgaaatcgaacttcgtcccatcacgcgcctgtatcaatttctttcatttggaccatgttactatactggtggagaacggaaagacagaagatgacgatctgaatggaaaaggatcaagatcaggattaaggtgtgggaatgaacctagttgactgaacgctatgttagggttatcaccacagataagattaattctcgccatcgtctattctttcattcatttcgacatcctcagacgttcaaggtcttgaacagtcacctaatcgcccgtcatgtcctacaagaggggaatctccccatcatccgttaacggttctcagtccaaacgctctcgcctgacgtcttcatcatctcagccgatcgctccttctacacctgtatctacttccaccacatcaacatctaccggctcgatctctaccgaacgagctttgactctagacgcctcgaccctttctgatgagcttttccttgaggtgttctcctatttaagcccatgggacctttcgatgatcgaaagggttgatcggcatttttcaagactggcaaacgattcattggtttgttctgctccttgtccttgtctcaaagtttcccccactaaaaggactcttgcgcgtataaatgtttacctctccattcacttgcgggacactactttaaatcctcttgtacataactgaatctggaaccggtccatcagctatggaaaaggctttatatgagtgagccttcgttcattttacatcaatgaacgattcgccttctagttcctgttcgagttgagactgacctggacgcctgtacccttgatttgacacaactttcgtaagccgccaatccgtacgcgcctagtcttcgaggatcacgatcatcaactccatccagacgttcatcacttgttggtaactattttaactctacatctacaggagcgactacagtcgatgtgtcggcatccgactccttgtcatcacccttgaaggctaaaatgtcgtccgactgcgaggatgagcagagcgacgtcttatctttaccattgagacggagaaagaatagggatagagaaaaaagcaatataaactggaaggagatgttcagggttcgttatcagctttgtttcttcttgtgtgagtacgtggcacagctgatgaacacctctcacgatcactcagatatcaaccaattggtcctctgggaggtcgactttgacaccgctatcgacacctaagcgtcttgtatctagccctcagcctgccttgcatgcctctgcttcaatctcttctgcctctaaacatatagactctcactcaattccctcgctcgaaccaaagtctatccagacacgcacaatccttgcgctcctacatcccgtcattttatacgcaactcaatcacccacttcattgagcccccctgaaattcaaatctttctcgcctctcgccggtcggacccttcggattcagctggtcaaaagactgaacaccaagctcaagtcggagagctggtgacctcgtttgtttccccagggttacgaaaggaaaaaaagacagggtggctgagaggtgaagtctgggtgacggatttgtctgtcgataaacaagatgaatcgtctagggtttatgtaggttactcgtccggggcgatgtcgatcttgacgatcgatctgccagaaattgtcctttccaatacatccaggtcttcgtcgtcctcatcatctttgagaaatatctctcacggagatattatcgttcatgaaacatactttcagccgtctcccaccgtccctccactctcagtacccatcatatcagcattatatggttcgcttctcgtgacttgtacggatgagttcagtctctccttctacactatccccgatgaagtacacgacgggaaaaaccatccccgatctcaagctcagggaataaagcctttcaaagtagtcagatcgcatacatcttggtttcctgcttctatctccattaatccactcccgctatctcgacctatctctattacatcctcttcgctctcagagagcgaagaagaagtaggaacgaacaccaaagacgaccaccgagtcgtagtatctatcggtttcactatccctgtttatccagaccaatggaccgtgtccattcagcagttccaattgcgtgctcctgcagctcgactaccgttacatgcaggcatcaactggacatggatagacgatcgaatattgagcgcattgatgccttctgttccctttacctatccatttgagtccttatctggagcagggacgcgcacacgaggagcgaacgaaataggctccgttggaaaagtttcaagcttggcaatggatggtcggtggatctgtttggctggagaagataatagagtccagatatttgaggtacctgttggaacttggactggagcttccaagagaagtgatggtgttagaaccaaagagaagatgggcaaagagaagataggaaggaaggatgggttagtgtggaggcatacgttatgggatcatcatgctgctgttacatctgtatcctgtttagacggtatgtccctcttcttcttcgaagtattttcacttgatatcttcctcttggaaaataagtcaagttactgatatcgttcgttgtaaaggtcgatgcataacagcagattcaacaggaagactcctcatttggtccttggatcaacctttcgacccagaggggctttctcctctccctcttccacttcgttccattcttcttccttccgcgtccttttcacaacctcatacacctcccctatcgtcctcatcttcaaccttcttgaagaccggtttggagccagaaacgagcgcaagtttaggaacagatgatacagaagtcaaggacgacgcgaaatttgttgaagtcctcaaacctcggttcaaaccttttgaagatccatcctcttctgtctcccaacagatcgatacgagaaaggtcggtcatggtgaacatgatggtgattattcgaccgcagagcgcaacagaaagaaactcgatggtgaaggaaacgaagtcagaggcaaggagtgcatcaaatgggtaggtcaggatgccatgacggttgttaccgttagtacagctcggatgggagaaggacatggagatgagcgtgtcgcaaatgaagagaggatcaaagtttgggggtttgatggatgattttccagtgctttgagcaccacttcttgctgttcaaattcaattgatgtttccaaacacaaccatgaatcaagaaaggtaaagaaagagaagtcgagagattaggaaactagaaacacaaagtatacaaattcctcgacgatggaaaagagaacaagaccgggagaagaagagatcgttgtgaaaatatgggataggatcaatcgatctattgactcgaagagatgagagacatatactgcatatcgacaacagagacaataagagaaagtctcagattgttggtttatatacagtagatacagcgggtgagacatcaagcgcaaaatccagaggagaggaagcaagacgaagagaagaacaggacgagcctggaaggaggtcaggactataccgttttcagcctttgaccgatcctccttttcctctccctaccttcttttgtttctcttccccgtcagttaccaaagatgggaacagcccaattcctgatcctgtatctccacatccggatgtcgttctcgatcgtccttggttgaacgcgcgaggtgatttggtaagtgaaggaggagggctggatatttcagatgaaggtgaaatcaaagccggtggagcttcaaggattttccagatgcaaagcgaacagagaattgtagattttacctctgaaatctagagaagaagaaaagagttggtggtggactgacaatgggttgactgccaaccatcatcactcattccaaaccctgccgaagaagaagacgacgtcgatgacgctcttctggcacgtctcaccttgcctattccaatatttcccatgacaggagaacttaaacctaaatcctcttctccaaaagaccactctggtagccctctactcgcctcttcccattcgttcctccacaacaacgccaaactcaaaaactcaacgtctccttgaggtatcgtgtaggagggcgagaagatagatgaagacgaaggagcggcagaggaggtgcttgctcgacgatgtttggttccattgggtataatacctcctgaacatccgtgtgggtttgtcgatcctgtcgatcgggtccccctattcaaatcttgcccagactcgaacgggtgcagatcgcctgtcccagcgatccagaaaccaactccacttcttcccacccagccgagctcgataagtttcggtacgcgcctcatgaattttttgacatctttcagaagagggatggtaggctcaatactcttttgccataagagcgggttgagagattttggcaagtcaagatgatcatcttcctcagccgatgataaagaagacgtggaggatgatccgtagtgagacaagaagagatcaggctcttgtgaagaagccatgattggttgatccagaggtgtcccatctgagagtagatgaggaagcgttgcttttggaagcaagggcgaggtcgacagaggcggggtggttggtggaagtgttatcgcctgaggtaagggtagatgggaaggcgggatggaaacgtgcaggacctgcaactgaggaagatgggagaatgctgttgtcatagccaacagctttccaaaaggcgcatcaaacgttactctcagtttctcaagacctctccgtttcttggtaattttctccaacgcgtccttcccaatggtccaccagtcaagctctaagaccttgagtcgagtacccttatcgcaaatcttgcaaagtaactcgtccggcaaaggtccgtagatacatgcttcatccactctaggcgggggatgaccttgagggggaacgggaaacaaacagactggaggaatcgaccgcacgacagagaatgtttcaagattgttgaccgttatatcagagatagaaagaagatggtctgttgtccagctatggtgggggccaacatcagagatctcgatgcggagatgacgtagtgtctctgggaaaacttcgaccttcgaccatagcgttttagataatcggccttggaggatcaagagacaatgtttaactctgctcgagactgattagcgagttgtaaaaaagaactgagagagcgcaccctgaacctccgataggcagaagctttctaagctcggacaatcctccaaaattgccagtcttgattgaaggggtcagtgatcgactgcgttaatatcaacaagatacttcagtttgaaagaagtacgttcttgcaaacgtacattcctttatctgttaactttgtgcccgacgtcctaagccaaacgtttttaacgcctcgtcctgcttttgtgatcaactcgcacagctgatcgtccattaacgccgattcgatcgagatcttctctaaagatgcatctctaggtagtgtcgtgaggtgtaatgatagattctttgtcttaatttgatcagatatcagagagggggtttcctctcctctcattagctggatgtcaagttccgagaggagataacccagagagaagtaaccaaactcactccgacaacacttagtcgagagagttcgagtgtctcgagttgagaaggtataggatgaggcaggttgaatctagggatagaattaggctggtgttgggtaagtgttgaggctggcgagagaggcgaagccacgagtgagagatgcttcaatttaggaaggtttaagagttgcttcacacgacgaatgttttttgatcttgttagttggagcccgtaaatatcattttttgcggtagctcgcatgtagagaagaagaagacaaacctctcctacttgatctccccaaacacctatacctctccacaagatcctatctagattctctttacaagccaacacaagcggaagaaagatctccagttctccctgatcgatcgaggtgaatatggatggactacccgtcaactgggggtagagaggtggatgaacagtgatcattcgcacggatgatgcgtatcttgctgggttcctgataaaaaaaattccaatcgcacaagaatcagcctaaagcgtactttcgcttcctttcttcctttcggacacatgcacaagcccatcaatgtagtctggttatccacacgttcacgaagagtgaaaaagaacaaaccctagaacagctttccatttgcctctttcccttatctcgccaatggaattgttcctcgaatcattgtcctccttgcaagcaggtaattctacatcaatcctctcgaatacgacagactttgttgcttcatgcaccttttttcctagactagcaagcaatataggaatcagtcgggctgagcttgtgagtatgaagaagatgatctcttgaggaagttagattgaagaagaatcgtagaaaaaggaggagtcaattagtgagtatttccccaaacaggaaaggcggaggtagttgatcctgttctggcactggaagattgcgaggcagatccgtgaagtaagagagcgtactcttcagaattaatggtggaagagactccatcgtgaggaggagtatttcgatgaggtcgttagctgagttctaaacaaagaagcacacacaaggaaagagaaggccagaggataggaaggtagagaaggtgaaaagatgatcgacttggcgcatgtagaggatgtaagcagctgatctcgcttgattagataagccggctcggcgtctgttgatgagcgtcatcgatttcggcctagttaactcggctcagatttcgtctcactctctatttgtattcgaacaaaatacagccagaacaggatgtcgagcacattgaaaagaagcaaccgagagagatacaagagcatgcgaggaatgaaacccattgatattgaggaggattcaaaa

SEQ ID NO: 2462 - DNA, 13451 bp, Xanthophyllomyces dendrorhous
ggggagacgttgtcgctgcggtggacaacgacgacgttccagatggagctgtagcgatatcggtagagtcggaggtagaggaacgagagggatggacgccttgtagacgaagccgaaggtcagatgtaaaggcagggttgaacacgatcctgttgacataatttgaaatcgtatcgcgtcagaactctgtatcttcaatcagattaacgagaggagagcgtaaacgcaccagatctccagtacatctaccactttatcaatctgtcctttgaaagtctcagctgataaccttccagcctgctctttgaatcctctgtggagctctccaaagtgatcgaacaccctttcaagccttgtctcgaacgcatttcgatatttccactgttgtttccggtcatatgaacaaacaaaaacaattttagtcattcaaatttcgtggccagacttgaccatgaaaccgaccagaaccaactcacagcattagggacaggagaagcagaattggagagaatgtcagaaatcagatgtaatcgagcgacctttctaggaatcggtgtttcgaagatcactagagattggcagatgatctcggccaccttataaggtcagaagactgcacgtcagccaagatcgttatggggcgagtacagaaacacaaaagacagatgttttcacctcctcagcagcatccgcatgacctaatgcgaaccccatacatcttgccacaccccctctttcgcccctcagccctctgagacaactggtaaagcgtcttctcgccaactttgccagtttgcctttcccgactctctcattctcgctctcctcgctctcctcggtggagtatactgaatcatagccttcctcctcaaacggtttgggcggcgggctgggtgcccgatatcgagggtctagacaggtccggtagaaatggtactcgttggaatgttcattgcgaaggaaatcgaaacgagggttgaccgcttctttcgaacgaagcatatcctcgaacgctttaccaacagacaagactttgtcagcgacggtacggatgaagtgttctttgtctgggtcgagtgcaaacgaggcagccgatgaaggattaaggcggacaggtcgtttcgctactggtgaacgagacggagatcgggagtaagatggagaacgcgatcgacgtcgttttgaagatggatgatgtgaagtggaaggacttggtgatctcgaacgggagggcgaccgtgagtgtcttcgggaatgagaagtgatatctgtgtatgcgtcaaaacacgtcaacacagggtaagctgtgaaattctcaaaagaattaagcagatttgattcggaaaacaagacaaaccatagatcgctcttgcaggcaaaggcatcgctttactccacccaaccctcaagacgctacctccccaatcaagcccatcaagctccttgactgccttctcggcgtcctgcctcttcatataagccacgaaccctgtcaaaccagccttgcttcccacccgacgaccctgcaaagtcgaagcgtccacaccgggaggaggctcgtcgtatcttggccacataatttttacctgatggtatcgagagatatagcgaacgcggcgtcagctaagcgaacaggaagaagcaggataaagagatgaattagaggacgaacagagccgacgggtccgattttggcaaaaagaagccccaaaggttgctcagatacaccatctggaagatttccgacatacagatttgttgtctgcaagaagacaacatgtcacgtaagtaagcaattcaagataggcaaaccgaggcccacatcggaagagaaagaaaacagatactgatggacttaccatagaatctccaatatcatgagagcctcgttctgtctcccaagcttttttaaaaatatgtcaggtcaattcaacagctatagacagatatgttcgacatgtaaaagagcgaagaaaggctcaccagcatgcacagctgcagaggttccactgagcccgctcttcttgaatcgttcttcccgagcggcctggtctctaagtgccaccgatcaagccaaagattcagatttagttgaacgaactataagttaagcaactcaagatggatgatcgactgaccttttgagatcttccaagaaagtattgatcacccgtttgcccttccctttgagggcagccggcttaggtggcgagggtgcactatcaaagattcctgctttcttcacaggaaactggcttttgttcggaggctcgtatgccagcgatcccgaggctgagcctgcatcgggacaagaaccatatcagttgagggtttccaaattgaggtggtgatgatgagtagaaacttgggaaaaagaaggcgagagaagaacaaaccagaagcgcgaacaaaacctcctttaggttggatggtgttggagtttgagctaccttcgaattcagcagagaattcagcaaacacccgagcggcctctcttaaggaaggtatgagaaaaagatagggctgtcagtacaggcaacgaggaaacaatgatcgacataaactcaccgctcttcttcgtcttttttcctcttctcttcttcccggtctctatctcttttcgacttccgttggattccataatgatatgtctgctgcttctctgcgcccaaaactggttgcctctgttgtatgggttatgaaggatgggaagagtggttgaggagattcgaatgacgggcagagaacgaaacatcaagagtgcgagaggtttgattgtaagctcagtgaagagtcgaaagacacagacaagattgatgagagcgatagaatcaaaagagaggatagggagagggatgatcagaaaaaaaggaaaaagatgcggacggaaggaggtgcggttggatcaaattcatccgagtcttgatccgagtcttgtccacccccgaatttggaaagatccagtttcctagcgtagtttggcatgtctaccttcctgtttctctggagtccaggtagctaaaaacgaagtagatgagaggtagaagggtgagagtcgacgagtatgtatgatcttgagtattgcatatgttggagagagagaggaggcgaaggagatggttacggcaaggctgtgcatattacataagcctcccatcgccacacgttcctgaaccacaggaattcacgtgtttgccccatggctgtgtcaatcttcgcctccactaaccctccactcccactcctacttctcctcttgcttgctactcatcgtccatcgttgttgttcttttttttttcacttctcaacgtatatcgtcctttttattactccctccctttttctcttgtcctcactcagtctctccttctttgcctcctgcttttagttcgctcctgtggtcttgttttctctacctcttcgtctctgcttctttatatctccttctctccgtcattccctgatcatgtccttcacactggtgtcttcgatctctcctcaatatcatccatcgacttccacctacagtagccaaagtccgatgaatccgaagatgatccaagcggtcgatcaattacaccaaaaccagtatctccatccagacgaagaagcgcatcgaaggagagcggtcgaggcagttgagggcttgagctgtttggcttcccagcatcaccggagcgagtacaatcggatgaagtggggagaatcaggtttgttcagtacttcatcttttcgtctgtcttcactttttggactgtggacacatcccctcctggtgatgttggcagggatggtcggtgaaatgcaagcattctaatcagcatcacctttggctgcacgtgcatatcctgtttcatttgtttttatgctcaatctgctctctacctaattccaatcgaaccaggtgctcccctatactacgtcccgctgtccatacagctcccggcacatgtgtccgagatcatgcaacgacaagcggcgtttgaagctcattgttcgaaatcgtctcaagcacgacacgctcgacagctcgctcaagattcggcaaataattcagacataggccttctaatgcgaggaccgaacggagttgataggccgctggaagaggaggagggcctggagggcgtccttgttgatgatgggctgactcaagacgaaaaagataatggaacaacagcagccctggttggcaatgacatcctaaatcaagccgctcatccgacctcggaggcggcgagcatctcaacagccgaagtagggaaatcgaccacgcctgtagaggagcaaatctcgcaagccatgcaggactcacttttgcctgcccaccgagccaaccccaccagcgaccacaccaaggaagtcagagcgcaggctgcgcctctagctagtggccatgtgtttacttcaatcgagattggcagacaagagtatatgagaaaggcaacaatcgaaggcggggagtttgggcctgcttcgatgggtacacagggacagggacaaggacagctcgcaggtcagagtgtcaagacgagtaacactcaccccatcaagtcagttatatacccttcccaagaggagctgtatgtttccttccttttgatgttgatcttaaccgcttcttgtcgggatatacgtacccagtatatcgatcgttgttcctcctgactacattcactatctcgagcctctacttcacctcgtcgaccctccttcgataaatcctcccttcccatcctctgcatctcaccaaacgttccttctccctcctctcctagatcttcactacctctcgcagacgaatcctgccattgattctgccccaccaattcttctctcctccgttcctccagaacactgtatccccaattctcccgcgtctttaagcacccaccctgatgttcagtctcaaaaggaagccaaaccggatcacgtaggaaactttctactgagctcatgcccagggaaaaaggttagactacaaggcccagtcaaaggaagaggagcaatttgccgggatctcagggttgacttggagagaattaaggggttaggagtgggctgtatcatctggttcgtacctgttttgacatgcaagctacattcgatcttacaacttttttcgtcttgattcaatccttagttgtctagatgatgatgaactcggatatttgggggcaccgatacatgaatatgagaatactgcacgcgctatcgggctcgaagtcatgcggttcgcttagcctctctatcttgttcactcttccctcatggtcttttgctaacgtgtcttatttggtttccttgctccagaatccctatgccagaaggattgaccccgacttccctttctcaatttgacgcccaaatttcttccatagttacgagatatacgcttcgaggaatcaatgtccttgcgcattgtcgaggaggtgtcggccgagcgggcctagtcgcgtcttcttgggctatcaagatgggacttgtctcgtcttcctgtcacttggtgtcttcctctccgaactctagatattcgtcaaaacgatcattcggaccaggaggcggggagtacacatcggctgacctagagatcacggagaaagtcatctccctggtcagaaggaggagaagcgtcaaagcaatagagacgtatgaacaggtcagatggcttgttgattacgtgagatggctaagaattgagggggcagtatgcaaggtcgctagagtttggagagattgagtgtcttggttccttcttcacttctgtttccttttccgtgttcctttcttctttttccttcgggtaaaaaacaaaagagtctacttgagccttactttttcaattcctcttgctctggtaacttttgcttcattttctttgctctcctcacatctttctttaaactctttcataactttcacctgttcctccttttttgtgttcctcccttctttgaattgtaagacttccgagatctatcggtgtgctctaaatttcctctggccttccttgcaatgtctgtttcctcttcttccaaatatggtcccttcccaaagttcgccctttcatctcatgtatctcaaacaaatggcaataatgctttgatcatctctgtcccttctttctcttgtcatccaccaccttgtctatctcgtttctcttcatatcgtcttccatccatattttgaccaagtctcttgtggcaaaaagttagatattcttttgtgaacatttttttagctgacgacaaaaaactttctctccaacctgacgatcggcatgtgaatacaaaaaggaaaagataacaagatcatgaacgaagaaaaaaagactcaaacagcaagggaaacagagatatggaccggacagaactataggggaaggagttcgtcccctttgagttgagccatagggtcgtctgcgtcgtgcgatcgagaaagtcggtaggcctctgtttggttattttgaaagaggaaagaagaaaaaaaaagcggttgaggagtcaggacaatgaccaaaacaacggttctttcagaagcgtatgaaagagggcacgcaccaagttgttcctctgtgacttcatcaccattcgtgtttccactagcattgttgtatttgacttttttcctgccagccatcgagaacccaccgccactctgttcttcctccgcctcttgtttcctcttcctttcctcttccaatgctctttccagtttctccttgtccagcttgacttcgccctcaccgactctaacttttgaaaactgaggcacagcagaatctttgcctgttgaagcgccgttcgacgtcgtcgaatccgaggccttgccttttccttttggatctgagttgagcgagggcgatccaactgtgctctcaatcgaggcggctacaggaggaggcgcactaaaagcggcggctttagctagtagggatttgacgtttgattcctcagccgaagcagcaagaccggtggcgcctgtgcaataagctccatgaagagtagcatggcagcaggcgtatccccattgacctgatttgagattgtaccacgacccccagatggtagtgtgatttccagtgataactacgttgcggtaaacaattccaaaaggattcaaacatttgttcaaaactactctttctggagtataattcttctccaacttcacatactgagaaggaaatacgtaccatcttcctcgtattttgatttcggcttggctctttctcttcctttgatgacttgaccggttcttgagtactcgacatctgttattgattgcgcatttgaaagttttagcgacgttctcggacgtaatcctgtccttcaagacctaaggagggaaagagacactcacagtcctccgtttgaccagtcaagagctcccttggcaaggtcttgagatgttcttctccaccatacttctccagaatactgaccttcgtggtgtctttcagatcagccttcttctctaggaactgcttgtgaaggatagatccttgggtagggtttgcattcagatggacgtcgtttcctctggcagcagagttccaggcaaagagttgcagtttttgaatattggtcgcgtctccagagtatcgcaggaagttatctccagcgaattgcatctgaaatgaggccgatgatacgcaagatgtcaggaccggaacaaacagagaaggaagacggaagaaaaggacagaagataagaaaagaaagaacatgctactcacatcctcaggacgaccaccaacgacaggagcctctcgcatcgatcgcgtcttgggatcataatgagccgattctgcatccaagttcatcagatacttcgccgtatcttctctgatcctcaaatttcgaactgtgattctggacttggtgtcaaccttctgaccagccgcatcggctgcgtcggcatacttgtcttcatcctcatcctcgtcttctgagcttccgaaatcatcgtcggccttaactttcgttttaccagctttggcgacctttttaacggcagcgagatcggtggtcgtctggttatcgatctcttcctccctgattctctttctagcttcctctagcgcatcccattcctcatgaaccttctgatactctgaaggatcatacccgttccacctatcccgctttgtcacccaatcgccaccgacattctggatgacttcgtccggtacgatgtctttgttcgtgaactttgcgcccttcttcctcggtctctccacacaatccttcgtcttatgcgtcattgcaccacaattctcacacgcgcctttccgatacttcgtggccgccggaccggccgtttgacctcggtcgtaccacgaatcaagtttcgaggaggatgaatcatattcgggtcgacgttgatggttcaaagacggccgaccggtatcaagataccaaggtgcctttgtgatgtattctagtttataaaatggtgagatacaggatgagatacgacaagaaaagcagagagagaagagaagaaaagaagaggaacaagagcaaagactgaccaggaatatgcggattgatggctcgaccttcctcatcgacttctgcagggacagttccagcctttcgtgccgcctctaaatccttctgtcgtctccattcctcacgactgagttttccggctggatgccgacaaagagtacagaagtgaggtcgggcgtagtagggtgtgagtaagttagaggtggaatgtacaaagtcgtcagttcgtgatcatctagatgtttctttcaaacgcgtgctaaaacgcctcaagtctgagagaagacaaaacttacctgcagacattgtactctttagaatgacttatctgaccctgataggcaaagaaggagcagagggttgtgggatggtcgtttggttggtcgttcgaagtgtatttgtgctcaagagagctatgtgagagatgttcatcgagaccaattacttacgccggttacgaccgtgtgtaaccttttagattgtgattaagctgaaactcaagctagaagagagaagtgcatgagatcattcggtctcgtctcagtgattaggtagagaccgaggcggaggggtgtagcataagagttacagaaaaagagaatgaatcgaggaggaaggcccaatgagatatagatgaggtagatggaagtggcatacttggagtgaaaagtggggggactgcacaggtggatgagaactattcaaatgaaagggaatatatagaataaggggacagatagattgagaagcagcgatataggcaggatgaaaactgatacctgtggaaagttacatgaccagacccaaaacaaaacgagaagaaaaaccaagaacgtcccaaaaaaagaaggaaaacagaatcataaaagaaaaaaaagtccaactcaacccagcatctcaacgtccatatcctccacaagggtctcacacggccctccgatcgtctctgaactaccagtcaagaccatattgatgaatgtctccggttcgggtacgagtgcctcttttcctgatctggctcgagcaaccatagggtgaccgacaagatctgcgatcccgggtctttccccagggtttgcgcgcatgcacaacgtgattacatccactagcgcaggcgacagaggtgttagatcaacatcagaaaagtcgtccgatcgaagagcatgccagggttcgtcgttagcaggaacaatgatgtttgttgcaatttcaaggagcatgagtccaaaacttgattgaaagaacaagagtcatgttagaaaagccggattcggacaaacggggaatggaattatgatatgaattctcacctgaatatgtccgctggtttgccaaactctccgttcattgtttccagcgccatgtaatcccgatcgccttctctctcccaacccttctcaaccgtacccgagggaacttccccaccaagacctgctcccctaagaatcgcagctggatcagctcgaggcgaccgagtcgacaatccgaagtcaccaattttgagcgcgccgagagtggtgataagaatgttggctggtttgaggtcaaggtgaaggatttgctgagaatgaatatggttcaagccctactcgtgttacaatatgatcaaaaacagattgagcaactgtcagtaaagaaaaggagaaacaaacacattttcctgacgctctgaagacgatcttgacgaaaacttacgtcactcaattctctgacgattttccaaacccgaccctcatcaagtctctcaacaacccggccgtactcctccaggaaaaatgctaggtttccgagctcacatagctcagtttggatgaacagctgtctgttttgttcccaggcatcgataaactcgatgacatgtggattcgttgggttagataaagttctcaggatatcaacctcttctaaatggcgaagtctgaacaagggagaaagtaggagggggaagaattcagattacgaatctttatcgatcaagaacaaggataacgaaatgattcatgaacgaaccggtctttgacgccttcgaacacccctttcgttcgtttcacagcccaaactgatttaccctttcgatcctgaaccttccatacctggctgaatgctccttgtccaaggggctcgagaaccttgaatctgatctcaaatacatcctcatcttcctgatgtcgcatattgattggatgggacgatcgatggtgaagtgttcgtttcccatgtgcaggtgagggagcaaacgaggggagtgagagtcgaggatggaaagaaccattcgagtgaacggcagagccaggatgggcagatgtgacggtggacgcgagagaaggggagtgggcagcgtagagttgagacgcagagccagcggtggtcagtgaagagatggtttttcgtcgcaactgaggaatctttgttggcgatccttgtgatttagaacccaacagcgggcgggctgatcatgataaagacaagaatagttagcctatcatcaggtcgaactggaacggtgaaaatatactgacctcgagcacccaaccctttcgtaggtgtcatctcgactccacttccactttcgctctcacttccactcatcactccgctactcgtcctcttcaacattgtcctcgtcggcaagcctgaaggcgctagactgggcgaaccaaagcttgaagggcggacagaaggactagagacgggttgaatgagcatgagattacttcttctcaaaaatgtcggtgagtctccggctctaagcggagatgaagacgtcgagccgagcgtagccttcgtcgtttgctttgagccagacacgataggagatatgactgaggacgacgatgacgaagatgacgatggaacctcagagacactaaggttgaacgaagaaggtttgaatgtttgggatcgtctgggaaccaaagatctgatcggttttgaacacgattgaggggcgtggccgagtaaatgcggtggctgaccctgagatggtctatgcgattgagcgagaacgttgctcgaatgatgatcgtcctcgtgtgaaagattttgatgctggtgttgaagctgtgcgctgggcgactcggcagatggtgaacttgggatggcgtccacactatcggcaatcgacaacggatgaggtttcatcccgccgccggatgccttgaccccaccattacccccaccatgactaccaccaagggcaaaggaggaagtcgatcgtttgacgggtgtgtctggcatgattttcattcctccggatccatgttgggcggcgacagcagtggcgagaacttccgctgcttctgcacctaagaaatcgaatgaagcagacgaagccggtccaccggctatactggttcgttcagaacttgtgctcaagctgttgtttataccagagttggatcggaggatagacggccaaccgtttgatgaaatctcacacgacggggttactaattcttccagactcatctctccatcaaatcgattctggaccgcaccgaaattagcgtcatcatcgtcagcggaacccccccaggcatcgtcttgtgagaaggacggcacggtcgaagtctgcagcctgctgagcgtgccacccgaggttcgacggggcaaaggcggaggcatcatggtaccactcgttcgaagaaagctttgtccacctggggaatcggtaaaggaggtttcgctcagcgccacaccagaatctctgggtttgaacttcttgctgagggatgatttcgcctggaaagcggccagcaacggttttgcgtcgtcgaatggttggctgtccgattctcgaagagaggccggtgcggaccggttgagtacagattcagatctggtggcatggtgggtggtgggaatagcggtggcagcagacgaagtggaggacagatgagacgcagagtttgagcttggcaagtggaacaaagaggtcgattgggagattccagtcgaaccgaccgaggccgtattcgagttgtgcacagctcggtgcgagaatgacgatggcagcggtttaaccgaacccgagggcagcatcctcgaaacgtgctgggctgggcccgcctgattgtagtcgtttgaatttgttcgcttgtggaacgccttctgggcagacggagcgtgtttccctgggcgagctcgactcagcgtcttgctagaagccgagccgacaaaaggagatgccggaggaacgatgacggtggtttggccggtcagtccattctccaacaagctcaaatcgtctaggcttaccgccttcttggacacagtaactcctagactagtctgtccgccagtcaccgctgaagcggatgacgcagaagaagtgaggtatctagcatgaggagcaaacaaatttccgtgggatgccatccggctggccgatcgggattgtgtgggcgagggcggagggatggtgaaagcggtatgggtggatgatctaggtcttcgttcagtgcttacggataagaatgggtcctcggcgatcaaattcttggatggcccttgatacgacgtagattttgggagatgaatgtttagctcatgctcggtgagtgcccggtgatggtgatagttctcggacggtgaccgagaggaagacgataaactgtgttctagtttgcttgcagttgatgatgactgggaggaagatgttgacgatgcgagaagggatgtggtgagaaaaggagaaggcgaaggcaggaacgacaggggctgaagtttgctgggaggagaaaacccctcgtcgtcctcgtcactgtcatccaggtgatattcctcgacaacgtccttcggattgcccattccaagcttcaacgcgctaagctctgatagcccttcgctggatccgttagaaaagatggcatcgtcatcatcatcatcatcttcgtcatcgaaaacattggtttctctagattgggtcgtagaat

SEQ ID NO: 2463 - DNA, 82265 bp, Xanthophyllomyces dendrorhous
ccaagaggtctcgatcgtaccggacctcgttttgatctggcgagggagtttggaacgcctggagcacggccgagtgacttggacgacgaaaagttaggccgttttatcggcgaaatatcagactcattgggagccgacattgagactgtgaacggatgatccgaaacgtttcgacggcggctcttttggaagcagacataacagttgtgcagtcggattgagtgcagccaaggatgaaaaagagtgaggacgaggacacagatgacgagggaaaaagaagataaagaagaggagggaagagaagatagaacaaagaaatgaagaaaaaaatcacggcactcacctcggaaggacgactaacaggaagaggatcgtcgatagaaagctgcctagagtgattgcctcggtaggaaccataatggggaagaaatcttatgggactagagtctgccatggcaaagtcttcgtcatccgggatggcaaacaccgatttaggttcctctcttggtatggtggactgattacttgaatgtgaatgattagatgctgcaaggatcgagccattcgatttgcgattatggctttctactgcagatgcgagagtaagtggacgtgatctacgagaagctgaagaagcggcaaattgcgggaatggctgatggatcggagagtggaacgaggattcatactgagaaacgggtagatgagactttgtcggtgttgtgacatgaacggtgctcatgatgggcgtagtcaagttggatgtatgcgtctgtttatggcagatgtgtgtgcgtggatgagaagggaaaaggggatgtaagggaacgagatagaaagaaggcaggggattgacaggactcgagattgtccgttaggcggcgggtcaaccaaggtttggaggtgtaggaacgaaacgcgtgtccagcgagaaagcaaaacaacacggcaccgaccggtctcacgagaaggaaggacagaaaaagccagacgggaggataaattggagtgaaagagtgaaagataagaagggacaagaaaagaaagacgaatgataaagacaacagatggggttgggaggttatgtgtgttgataaatggaatggaatcggtcaggttctctggtgagaacaaatcttgagcgggtggagaaagaggcgagacacacacgcggcggagagttcggactgtggatactgtggctctggagcacggacgcgtttgacgcgtgtgacgcgattgagggtgagacggcgcgtcggtcgtgatggtgttgtttgtgaatccacgtgttttaaggctttacagccacaattgtaaccattcagtcacataaaccccgctttatgcgatcagaaatcagccgagggggatcgatttcagccggccaaagtaaccattagaggcagcaacagcagcgttcggtttcatcctacacaacaccctcaaaacccatctctgtccttctctcgctctttcggtttccctcgatagggaacaacagtcaagcaggttcttgaggatttctttttcttttctttgccttcttcatttcttcttcttccattcgtctcgttgcattcttggcaaaacacaacagcacaaaaaacacagcgctcgccattgacgtcttgcttgccattctttcggtttgtcgtttctgtcttgattttcttctcatggctttccatgagactctctgattctgatagctgatttgaccgtcattctcagaccgtttcctgtttttcttgacattctctttgtttcattgcacaaccattcatctcgttatcacctcttcagatggacgacccgaattatccctccgatgtcgtcctgccgaccgacatttcagctactgttcattctaccccatcaacggcctctgtctcgaatgaattgcgaccactccttgttccttctcatcttgcatcactagcatcaccagcatcaccagcatcttcatctttagctacatcatcagcggcaatatctccctctcatcctcctccctcggccctccctcagccctctcccttatcggcctattcaacattacaaccacagaccgagaaagtcgaacaagaagcctttatagagggcggcaactgtggtggctgcaagcggttcgttggtccccaggaggtcgctccaggaacactcatcacctttgggtcagtgccaaggccttttgctctcggctccaatacttctctctgcctttggccttcttatggtcttcttctcttcttcttttttttttttctttctttctttcttcttttacttttcctccttcctcggcttcgctgactttgcctctttctttgcccactgctcaactctatgcgaaacggctgatatttattctcaattttaccatgtactctccatgctttcttccaaaacagtgactcgctctttcatctggattgttttcgttgtgtcaaggtaagatagataagccttgctcatcgacacatcccagccagatcacaggctaaccgttatgaacgaattgaacggcatcatagtgtcagaaccgagtgacagaggacacaaatctattgttgctggccgatggctctccggtctgtaccaactgcaggtacgctcagttttgtacctgactatgttcctgacgtacgacacataactcagtctaactccttcgaaccgcgtcttcttgtctagctaccaatgttacgtctgcaaactactcatcatggatgaggccatcatgacaggttcgtctctgcttcacatgaatttctggccgtcatcgctctttactgactgtagaggacatcaattctatctacaaacgcgcacgaacgacaacaggagatgaagcctaccacgccgcatgctttacttgtaaacactgcaagtgtacgattgaagagcttgtttttgcaaaaaccagccaaggcatctactgtatggttcgtggttgttcatatttcccaccatctatatctcgtttcccaaagccttctcgtctggttctgcgcgctgaccaggttctttcctcttgtcaaactccagtcgtgtcacaacaaacgggtggcgaaaagcaggaaacatgccgaggcaaaacggaaacgggatcggaaggagcgtgaaaaggagcgactgcaagaggttcgttcataacatgctgatatgctgtttgatcggctcttgaaagcaaatcgctcacttttgtttaatgccttacacgcgcgcatacacacgtgcagaaacaagttcagcaggaccttcagaacgaccttgatggatcgcgcgctcagccggaaatatcttttcatgagagtgagaccctgtcccctcatccgacttcactatccgctcgttcccctacagcggcagaagacacacattcgcctgtccctcgcttgattcctcgttcgccctccctatcaccatcaccaagtatgtcatcgagcttggcagcctcgggaaaatacagagagcttgatgactcaacccaacctcagtcgctaccaatcaaccctcactctgagatgagttcgactttaggaacccctgtccagaagttcaactcgcccggtttgctctccctcgacggcccggagcactcctcggccagatatctatccactcggcgagggtcagaggactccaggttagagcctctttccagagacggcgccgcgtttggtttagggttaggcgtcggaccggttgcaggttcaacctcccgatcagagaagagaaggagcatcaatccggcaactttctcggccgaagcggctgctaacatcaacccttcaatgttctctcaaataacgcaaccacctgctccatcggcttctgctcctctgaatctcacgtcatcgacttccgttcaaggttcgcctagcttgggaccgaatagtaacatcacctcagacggtaggctagccggtctccctccgtcgcctctccgttcttcatatatggatggatcgttgcctgaccaccggccgagctcgcctgtctcacccaatggccggacaccttccagaccactcagaccgctcactccggatcgtgttcagccaacgacctcgacagctccgagtccctactcgatcgctccgcttgctatctctgttagacgatcccgatcgagggaaggcccaaacctttcttccgtctccagttctacactatctcagaccccaccaaggaaatcgtcgttgggtgatcatcggacgagaccaatcgaggatcgcccaggtcgacgaggaaactcatcgtcggtgcccaggtcgccaagcggcagatctctttctcctagctcagctgcaggcgagaagatcaagagccgatcaggctctttgacattccccttggttggagaagacgatgaacttagccagccgtccggtcagtttgtgcaacccatcggtttgcctcggactcggtcaccattgaatcaatcgacggcccctccacatgtcgtcgttgtcgacaacgatgacgacaacttcaaggagactagccaggtgaagcgtcaggcccacattcaacaggatgttgttctcccaccttctttaggtgttgacagtcttcctgaacgaagaagctctgtatctcaagatcccccgaaattggagtcgccgagaccggtctcgtttcttctctcgaacgatccagaatttgcgatgttattcaagaccgtcgaggacactggcgggggagacggaccaatggatacttcgttgtcgatgaaccatgatggaataacctccacgttgtcgaacggtattccgatcgaattccgcccgtccgaggagttccgaagcgatgatgaggacgaagacgatgaggcggacgaggatgacgacgaggatgaggacgaggtggatgtggatatgtatgtgaatgtcgaagatgaagagaaggaacgggacgatgttgcttctgagctgccttctcgactgtcggctgaatcgatatacgattccaaacccgcccctgcgattttttcttctccctcttcttccgtaccgacctctggctcaacggcatttttcaggcacggcaggcgggacagaaatcttgcgagcttgattcaacaggacgatggtgagccggcagccgtgttgaggagtttgttggttgaggcaaagaatgccgggaagagtacggtcgagattgggctcggacagttagagggtgtgttggaagagctgagattgagtacagagagatttgcagtgttgaagaacagttacgatggtgtcaaagtgcgtacaactctcttcttcttcttttttagtagccaagattaaccgatatttgcctgatttggggtaatacagagagcgagcgctcaatatatccatggacttaccgtccaatccgaagatttcgaaaaagaagtccaaactcgacgggaagtcgaggctgagatcaagcgtcttcgggcccaaatgcatggccagactgccaggctttctctgcttgatgccgatcaaaaacgtcaagattcaatcgccagacgatcgagagagttgactgagaatatggtcgggctcgagaaggatatttccaaattgagagccgagagagatttagcattggcggaagtagaagaactttcgacaagctccaagtgcgtttttcctcaaaagcagttttttttctctttctttctagtctgatcaactcaatttcactcattgattgttcttcaatcaaacaactaggacgaatctcttgctcgaagctagttcggctagcgctggtccgtcagcatcgttatcgagatcgctaagtgtccgattggacagcgtcaaggagaactatcgaaaggaactcgaacccctcaacgtggagcgagagaaactctcgagagagattaccgagcttaaagagtccagagaattctatctatcagaatcaacgacgttgcatgcccgaaacgaagagctctcagacttacacgccaccctcgtcaggcagatcgagcaggcccaggaaacgttaaatcagccagtagttccgccaccgccatcgccggctccccaacaacagtcgcagccgctaacgccaacgagtgagcaggccggatatttctccgctagtggcaccccgaagggcactaaagcgggaattcatcttcctagattcaataatcatcatcgcgatcatcaacaacacgtcagcggatcaccctccgtttcgtcacttcccggttttacctcgatcgatggtcaagaagagattgcgaaatatgtaaaagttgtcaaaccagaggtcgcgatggatcctgtgccggttgcagctgtagcggcgagttcgaaaaagttcaagtggtacaagtcgtcttcgtcctcatcgtcttcgtcctcgaaaggaccggaagcggttaactcagcccatgcgtcgtcgacgagtatttcttcggcaaggattatcagcctgccgacagcgccggtggtgactggccggacgggggctcctcagctaaagactcgaccgtcttatgaaggaaagtcgacaaaagatcataacttacagccacacagtataccaactctaagattcactaggtgtgatcattgtggtgacaagatgtggggaccaatcactgagcttcgatgtaactgttagtggcgtttctttttccttcattcatctgaccctgccatatgtagagcaagttcttagcacttactctgtttcctgcaactttgcggtcaaatggagcagtgtgcgggttcaattgtcattcgaaatgtgtacctcatttggtggcgagttgtccgagctcatcgacgctcccctccctggatgaggcggtccccgggcttccaacagctccttcacgtatgtcttcccgactgtccttctcctttgtctggcctcccttgggctaactcgacttctctcccgcttgggcttgggcctttcctagaaccgtcaatgtttggcagaagtttgcaagaacagatccaagcagatggagttgtggtgccatgtatcgtttccaaatgcattgccgctgtggaagataacgggatggaatatgaaggtgagtccttttatacctgtttcttgttagctcgtgctggcgaagagaaaactgattaagacgaaatttggttctcttgaaaggcatctatcggaaaaccggcggatcatctcaatcaaagcatatcacccagctgttcgaacgtggagattatgattcgtttgacttgaatgatcaagacaagttagtaaccatttctcctctttatgatatcctttcctgaagatggtctcaagtgaatgaacgcatttgctgtgtgcttgttcggttgattttcattgttcatagattcaatgatatcagcagcatcacctctgtcctgaaaaattacttccggggactcccagatccattgttgacgttcgagcttcatgagaaatttgtttctgcagccagtgggtctcgttcaatttttctttgctctgatagatgtgagctgtggctgacttttagatgttcaacgaaatatgtagtgattcgcgatccggaagtcaagaaggaacaactttcggcgttgattcaccaattacctaaacctcatttcgagacattgaaatttctgatgcttcatctcaaccggtaaatattcccttgtctcccattacataggttgatccgaaccttatggctgatatcgaatttcctgtgcctttttcttccttttggatggatgcgtgcgcagagtgatggctcttcagtcgattaatttgatgtctgcaaagaatcttggtgttgtctttggtcgtcagtcgtttcctccattttgtcttgttgtttcccactctgaaactgagtattggctttctatcctgactacttttttttcgacctgatttgcggatgaacagcaacgttgatgcgctcggccgacagatcgagagagtttggtgatatggcagggaaggcgttgacgattgattggctggttgaaaatgcttcctccgcttttgcaccacctctggaaacgtgatctttccggggttatacctcttggtttcccgttttgtccaaatttctttcttttcttctttcttttgatgaatctacactcttctggtccattcttttctggaatttttttcttctttacatcgagatatccatctttgtgtcttcatcgtaactgcctttcgtctcatatgcaatccatctatctctagaccgagatcggtcgtccttgtccgcgcacaaacgtctgttccgcgtcgtttatcttccaatcttctcttacctaggataaggccaagattgaacgcttgccttgcttcttcctcctcgcctattgttctgccttctttgtctttctccttgcgttcgaatgctcttcgaccagtccttcgttgtttgcttctttcaataccccctttcctttggcttgtacgaacaatgatttatttattttatttggcaaataaaataaaaatccgtgtggttcaatgtctaacaggatatgaatgacgaacatggaacattcacacctgcatttgtgtctatgcatttattaacatcaaaaacatagatctacgaggcaaaagaaaaaacgaaaaaaacaagagagaggtaagatggaagataactgtttaaacaatgacgagattgatgcccccaacatggacactcgcaaatactgaaccgtatccgtttccgtctttttccttctcgccctcgcgtttctcatcccgttgtccttttccaatccaaccccaggtcctccttccggtccaagtcttttccgttctatcctccttcaccctgcctgcctgcttctcatcgaccacctcgacagaacccatggtcgacccagcatcgaaaggccctttgaacgaatacggcaaacggagattgacatggcctgcgttggcggtcaagttgatgtgagggttaaattgataagggatagaggtatactctagttcgatcgaacctgtgttggtgtgaatctcatgaattggcaatttaagcggttggaccgcagaggaagaagatggggcagacggggatccgaatgaggatgagggcgggtgaggaaccaagagggaggcgtggacggagccagagttgatgttaacgatgaaatcggacgacggtcgatactttccgtagatcgagccggtgttgatagtaaagttcgtcagctttgaggctattccctatgatttcaagaaaacaaatgacaaggtcagttgaaatgagatttcatgacgttcaaggtggctggaaataaaattatggcatcacatacgtcggcagtgatgcttccggtattgatctttacggagagacctcccacctggatggactttaaagagtcatataccgtcgagaagacgctcccttcaaaagcaaacaaagtcgagttcaactggaggtgaattgggatgatgacatttatgtggaattgaagttgaccagagggtgagcttgagtgctttgacgtcgaatgaggttcttttgtctaaattatgtagtacagtcagaggagatacaagttcagctcggcctagaggacgatctcttacagatcaaatttactaaccaagagtgagaactcggtgattttcgatttttcctcggatagaaacattccaccatcgactctgcttaactcttcgacaccccagtcgggccctaagtactcctcccacctggcctctacatgaacagttgcgtagttggctgtagatttaactccccagtaaacgattgatccggctgactgtgggccgagaacacgaatcaactgaagatccgctgggtcgagattgaagcccgcactattggaggcgtagtattggttgctctggttgggctcatgacggaggacgggatgggtccaagataatatgccatgaggttgagtgggttcttccgagtgaggaagacttgggtcctacgtacatccatcggttgaagtatacacacatgtctcagtttcggatcaacagatctagaaagccattcgggaaggttgatcttacatagggaggagcaggaacatctcgaaccggcggataatcatcatgattgggtttgttcaccttgaacaacgcatgaaacgttgcccaaacggcgagccagatgacaaacgataagacaagtgctttgatgaaacggcctgtcgcttggctcttgggacgttccgggagaggagagtattgggatgtttgctggcgctcgacatcttggctggcgacatatgcaggaggtgcagtagaggaggaagagccggtgggagcgctatcagctgtgccggtggcaggaagaagcttggccttctcggccgggttcatgatctcaatcatgacggtaacggtggtggtggtggtagtggtggtgatgagaaactaacgggactgactggacggtgtgctcttatgtcgtgttcccttcagcccaacaagctgatcctaagctgcggcgagaacttctatcgtagagtgtgtgtgtgagtgagtgtgtccagccgggaaagtgccaagttctgttgtcggtcgtcagcatgttcttctcttgcttaatgttctcggagaggagcatgtgtatccgtcggcgatgtccgagctgtggttacagtgattacatagcattttggaaacacgtgatctgtctggttacaaacacgatcacaccctaagccctcttcccaattgtcctcaccttcttgcttgagcagcttcgccgcttgcttgctcactcatctgtctctcccggaactcgacagcacgttctagatgatgctacctcagtccacactctgtctggcagcagtctctcttgcagttggccagctagtcagggcgcttccctcgtttgtcgcttcctcgggcgaccatcaaaatcggcaggatgatcagtccgtattgagtgcatccgcgcccgaactaggcttcgaaggttatcaggtctggaggatgcctatcaataggaaggacgttgagaatgttggaaaggtcggtatcaagtgatccttacttgtttctcggcatcttttcttcacttgttggcgtgctcggttgttcactttcacattcttaatctttctctcttgtccggtttctatctttccttactctcttcatgccatcagcttctcaatctggatatctgggcacaccacccatcgagcgttgacgtgctcgttcctcctcacctgatgtctcacccgctacttgcatcttatattccaaactcttctcatccagctttcattcccgacgtccagaaactcatcgctggttcttcctcttctgccttctcctcttcttcattcaaaccatatcctcggccatcgaacggttccatccctatcacacatcctttccatgaccgatttcacacctatgacgagattcactccttcttgctcgacctgcaaaccgcctggccagaatgggtcgatgtattctccatcggacaatcagccgaaggaagggatatctacgcagccaaaattagcccccgtgttgtcgcgacgcattcgacgaccgacaaggatggcagcgacgatgaggaagaaagcttgaaaaagaacagacacaagcacaaacatggccacaagaaagagaggtcgaaaaaagagatgattctcatgggaggttcgcatggtagagagtggatcgcgccggccagcatgctgtatttcgcccaccatctgttactcaactctcatgccccgggagtgaaaccgctgttaaagacattgagcttcacgatcgtacccgttttgaatgtggtgagtgtccggatcagttaggctatcgtacttgcaaagacaaacgagaattaaccatcggagtttgcaaacaacctcctcctcgcgtatatcaggacggatatgaatttgtacgtagatagtttttggaaaggaaaagttatctttgcttggagtgaacttctttttgagcgccttttattttcaattcattctagactcatacaaactcccggctctggcgcaagacaagacaggtcgtcgatgaggaatctggttgctttggaatagatctcaaccgaaactgggtaagattcccctgctttcttttttcgccttctttgagactctgtgcctctagatatctgcatatcactgatgaacggtgaccatccttggaacagggttaccactggagcagtgaagacgatcagtatccttgttcagatgacttccctgggaaagtaagctctcaatctcttatctctgaaatatcaagtctcttaagttcaacgcctctattatgtacttgtagcacgccttccaggccccagaaaccaaagcgatgtcggattacgtcgcctcaaaggatgtcattagctttgtagaccttcactcttatggtcaactctgtctgtcaccctttctattcatttcgtgatcatccagtgttagatctcggacctcatcttctttctcttcctcatctcaacacagtgatgtacccgtttagctactcatgtgatgatttcccgccggacgcagaagacttgatggaagctcttttgggagccgccaaggcgttaagatctgtacaaggtacagcctacaagaccggacaagtctgcgagttggtctataggtcagttctgcagtctcttttcctctcttattactcatcgctgatcttttgttcaaaacgggacaaaacttatcagagcggcgggtgactcagtggattggacgtacggaaaccaggagatcaagtggagtgcttctatggaactgttcgtctttcttccttgtgtttcttctttttctcttcccttctctttctctcctctgttctgcaccccatcggatatggctttgcaatttttctctttcttcgtcttcctacttttgttaaattttctttttgtcttacttcttgattcgtatcaacagaccagatacaggaacctatggcttcctactcccacctcgagagatccgaccagtggctgaagagacagtggccgctttggtctatctggctcatttcgttgttcaagttcgtctctttctctttttttttcttccttcttctttcttcttactcttttcataggatgaaattctgaccttgagttactattgaacatgttaaaaacagaaagaaggaaaactgaaagatatttaggaaattgcgatgcgccttttgctcccatttttcaagctgctaaacatctccttcacatactttcttaatcacatatcttaatccttttctattgttttctatcttcacccgttatgctcgacccttctttccttaacatttataggaccgccttgtgtccaacttgcgatcgggctaccgatcttttttgcaacatttgtagtacatattatggaagacaatgtccagaacatgtcctttcttgcgcacccttttctgggtattcaagtcgaccaacttactaagaatacactctccggggaaagaagaaagaaaaaaaaggagtataaatcatcatcttcctccttttcatataatgctcctttaaccaatgctagtctcggccgaaggagcgcaagtctgatggaaaactccaccagacttgagcaccacaatcttctctcttggcctgtcctcttccttcccctttccctcttcctccggtgtgagaatcgacgaaggtctgagtcgttgcccacatccgtggcacccgccactactcccttcgatcgctctccatcctctctgtcggcatctccctagatcttctacagcttccaacaagtccctacttagtatccggttggtcacagtcaacagatctccttcggcctggtatctgtccaacatcccagtcaagatcgatctgtattcgctatacactcttctagatctgggagttgaagatgatgacgaagacgaaggttcagaggaagtcgacgggggagaagaggaatcgactagacgtttaaatagccgaggaaaggatacgttggagtgagtagcagtcgaaaccagagaagctagactttcttgcattaaaccccgaagagaatccaacacgatggtctccatccctgttgtatcgtctttcggacattggtttgattttccattggtagagactgtggaagatggaaaaggagaagaagggacctcatggttgggtgctatagcggagattgaatggacaagctctaaaagctcatgtaaaagaccaaaccaaagatcttcaggtggaacggatcgatctgtagatcgactttccgaatggaacgagcagagctgagctcctattgtcgtcaccgatttcaaatcctgcaaatcctggtgaacggaacccacgttcccgtcctggaaggaaaggaaggatgctccgatccgagaccctcgggatctgataatttcttcgactttgtcaaacgcaggtctgacttgaccggacttgtccagtgcccagatcacagcttcgtgaatctcataccgttcgcagatctccacaatcgactccaacggatagaattctttaggcgcggattctaatacagagaatactctgaccgagtcgaaccgacataagagggagatgtagagctgacgggaatgttggttcacacgcggacacggctcgagaccgatgaccgagcggctatcttcttcctcatcaaaagatgccggttcgagaagacaacgaaggtaccctaactgtttacggggagacgaagatatagcatctagcgcgtcttgatggctattcgggagatactcatccaccaaccaagcggtctctctaaccccgagatcacacaattgaggaattgcctgtacgatggtcttatcgagatcttgcgggagacgaccgtcgcctaaagtggctatctcaatgatgttctctagcgcaggaaacacatcgaacgtcgtatccggatcatccaaatacgacaacaccaagtttgtccatttctgctcagatctatagattgatcccaagatccggtagaacccagattgttgaaagagagacatcatttgatccgtgtcatgtggtgtgtaagccgatagcaagaactcgactgctaactgccgatcttctcttgagctttgatctgggtcagatgacagagcaatcaatatacgatgtgacgttgaaggcggtaatatgatgaattgtggatatttggggagatttctcgaaataaatatgtgaaggagcgtcaggtcaattgaggaaaattcttctgagttcatcacttcgagcatgacgttgatgatgagttgtcgactaacaactccgttggagtcgtggtcgtcatttagatatgaatcttcgaaggcgatgtccatagtgtgaaggaatgcctcggcatcgaaccggagaagaaggcgaaggtaggggtaagcagactcgggcgcgccttcttcctccgtggtgaggacaagttctccgtctgtcggagacggaattgatcctccactgaacagaaacgagtagacggatgacatggccgcccctgcctcagcttccggaattgggtcactacttggataggtcaatccagacagcacatgagatagataggtgtaaagcttgtaggcgtctggaacaagcgcttcaatttcgtcgttcggaatatcttctgtcgacctgacgtcgcctactctagaaggacgatgagacctatgttgttgaatcctgcggaccaaacccagaagctcgattgcaggcgaaacatagtctagtaacgatctggtataggcgtagatcagcgcatcccatagtcgatgcttctgacataagtgaatggtctggttgatatctaaacaccttggatcgacatgccagatagcgttctctagctgatctagctctcctctctcgtcatgaactcgaaggagatgctggacgaccgcagtaggaagtgttctgatctggccgtcaatgatgaacggctcgagttgtttgaagaagatcccatcaatccaagcttcttgataggcttctagaacgtcctcaaagaagaaatcaaggtcaccaagcgcgagacatgcgttggcaatctcgaccactaaaccttcgaacaaagatgttcggtcaacaccccgtccatccatactgacatgggtatcatctaccattcggtcttcggagaaagtgtattgcaacgctgcgcgcatcaactcttttagtcgagagcctacaagactctcacgttcaatggaggtagctggaagggataaaagtgtgctggtttgttgtcctttataaaagcatgtggccagtcgcaaggctgcaaggagatcaccttcttccattagatgaagaatctgatccgtccaggattggattgtccccaattttaaatccgctttagtctgaatgagaacgacggtaaccaaattaaatattcagcccattcagcttgtgtgctattttgatggggcttcgatgacatataatctttagatggacttacgaggaagaacagtctacctttgtatgcgcttagacttccagagaaattgacaacccctgacccagaggtggtgggtccagggacaagtattctacaatcaagattcgaacgttcaatgtgggtgcttgaccgaagatcgatgatagcgatattgcgcggagttaaaacagccacatgctatgacggaagacaaaaccatggtgaatctagaccatcagaacatggtcttcctgtttccttacttcattgaaacctaagtggagcaaaagagatgatatatcagacaaacttacatgatcgtcaacccactccatgcctaaactacctccgttcaaagtccacttccctctctcttcgaacacgattctcttctcaaacccgcttcttctttcttttttaattccagcgttcacttcaccattctttccttcttccggcacgactctcacaaccaacgttctcaccacatccccccatgaaaatattaacaatggatccctcggttcctcgtcatcaattttggtaatcatcgtcccatttagactcgcgccattcgatctgctcaaaggcagaggcgaaacgcctgttccagctctccacaataagtgcccgatcttcgagccaaagtctcctccctcacctgaccttaatcggcggaaccatgtccttgggcttggcttcaacccaatgattaccagtttcgaaggtgtaagcaacgccgaaagttggaacgcgtcaaccgagtgtgctggtctatcagggtttcctaatgggaggggctttgccccgtgcaaaattgatgctgacgacttctttctcgggtttagcccatctgggtagcttcctagaatacggaggacgtctactgaatcgactcccagaactcttccgagtgagtgatagaatgctagccccttttcgtctccactgatgatggctgtctgtctttttcctacaaaccctacatgaagaatcttggtacctattagatgaccttctttctgaccggataacgcagaagaaatcgttattggagtcactgttctagtaggaatgtgcggagtcgtagaggagagtgtataaatatagatatggccttgggcatgaccgacaactatatgcgtatggtctggagacaaagtgagtgctgtgacaggtcctgcctcgtttgctagacagcacgaaacgaaactagattagcaaacagaacacagaaagagagctttcaaggaatctttcaagggggtatcccgacctacatatagtctcgtttccaaaccatcctcttagatctcctctaaaatcccatgcgccgacccacccttttgttgtccctacgcaaatccaacccccggcaaccatcatcgttgggtctcccatgtctggtctatttctgttgtctccagataggtttgccatcttggaggttggtcggcctcttggatagagcgcgtgcgagatacgtttgagagtcgtgtatctcataggatcatctaatgataattctggcggagacggcggcgatattgatgtagatggcaacggaactgataatgaagatgaagcgcgcattgattgaggatccacgagagaatgtatggtagacgacgaatttgatctagatagttgggagaaatgcgaggaggagattgatcggtcgaaagcaggaagttgagaggacgcggtgctgtttatacttgaggtagatggatgtcggacatgagatctcaagcgagataccgtaggatctacataatgttgacagcagggtaagattcaagagttcaagtagcgaaaagatcagaaaatgcgttgcttacgaagaaaggctggccggcgtggctgagcagagtttacagagctggtaggtgaggtcattcttattggaggcgtcgaggcgaaagcaagaggttcattcgatcgggttgaaggagttttgtccgagaaggcgtcttccatctgttgacaaataacgaatcagataacttagtcagctggtggatggacggaagaatggacggtcattgaaagtcgtaagaaaagcaaacgaacttgagaaggatcttctattggcactggtttgagttgatccaattcgtcgttgaatcgtccatattcttcgagctcatcctctccgttgtatctgtcttgactcatgacctccgttagtctggtcctatatgcttccgttcttccctcctccgtcgatcccggtgcgtctgaatcccatccagctctgcgagcagccagtagattcgcgtattctgcgtcttgatctacaaagcgaaaatccccctcaactgggtcatcggcaccgtccttacttctgttctccatctctaattgagatccatcacactcagccgggttattattaaggagttcggctagtttttttgattgcagccttcccagttcatcttcatcggacttgtatgtgaaagacgaaggtgatgatgtttgagtgagatctctgtcaggggaggtatcagacggagtgggagacgaggagtcgagtcgagtgattgtgttctctgatgaatgagagtatgatctggagggcatgagggaagaatcgagttgcccaaggatccactcgaatcaagataggagatgagggagggagggagtgaaaggtagactgatattgaggtatgagagacgaggtctagcacgagatggaggtgaccgcggcctcatcactcgaaatgtaccatgcatgcttcagggcaaatatggggttcgacatgggcaactatggcggttaattccgaacatgaaataaaccatttaatatcttgataaaatcaaaagagacaagacaactttggaatccgttgtaaagaatacatattaaaagaagaagaaaacatacaacgaaagaacgtaacgacagaaaagtaagagtttgaaagaataacaccactcagaatcgagcgcagaaacgaaactactctgctacctcttgcactttctggcttgcctctgtcttgacatctggtttttcatccgttcttgcttcagaatcaagcgtgtatgaaggaatgataccttcctgaatcagctcattcaacggtcctttgaaattagatttggcgaatgagaaccaagaggacagtgcgccgacgaagataattcccactgccactggagtatagttcaaagtttggctgtcgacggggttgagagcggctgaagtggtttgagaattgagaggaaagacacgaaagccttagtaatacttagtttcaagctgaacttatgggaaaagaaaatacacccacgaagacagaagacaatagtgataaacatcacccaaccagcggctatcactccgttgattctgatgtggtacagggaaattcatacgtcagagaagagaggcgatatacacaaacgaacagatggcatggactcaccgagagaatctacccaggttgaaaggtcctcggattgacaagaagcgatcgtgatagataaccatcaataaaatcgggagaccataggacatgtctgatgatagacatcataagaaaagaagttttagcgaaccttctcaaagaagaccgaaaaacagataagagctggcttacaaagtccaatagtagcgatcgacgtagctgctgagtacgcaaccgaacttcccaaacttggaagagcgaggagaaaagacaggaataccgcgagccagactgcatataacaataatgtgtgagctgaacatacaaaaatagctattttcattcaaagtagtcgatatactcggtatggacttaccagttcgtacgggagcagagaatcttggctcaatcttgtcgaagaaccgagggattccaccatctctgtttatttggtggaacattaatcaaagtttcctgacatgacggtattcgcttttaggtagtccttgccgaatgaaaaaagaaggcccaccgagcaaaggcatagtacattcgactgttggatgtaaccgagaacaaaccgcagtgccatacacagagcatgacaagagccacttatgaacccaaagaagaaactgttgttgagcccaaaaagatatcgacgagaacgagaggatggaaagaaatcttactcagtactttggctccagccgtaccgaacacgtcaacgaagatctggaacacaggctgtccgataggagatgcgacagtgttgtcgaagtcttggattgagaaaagcattgagacaatgaagaagaatccaaagatagcggagattccgacgctcactaagacgtatcagcggaaagatgtgtcagctagatattcttcagttggcccgatagcgcaggaatgggagacatactgataacacctaaaggtgcatttcgagcagagttcaaggtttcctccgacatgtgagcactcgcctattgatcgcagagaatttcaaataaatcatagattagtatagatgtacagaaccaaggcctgaggtattaatatacttaggattcaaacatacatcgaaaccggtgatagtgaactgagcttgcagaattccaataacagcaacgtatgcaggacttgcgcgttgggaccacccaaccccgtccactcctgtgccatcataaaactttccaaagacaaaggagcctgattgatgggttggagctttggctaaagtggccacacatagggaaaagataccgagtgaatgcaaggtgacggaaagcgtgttgaagtattttaggaatttgactctgttgggaaccgaatattcaatttcagaacagaaatatgaggagttgaggtatttgcaaagactaacccaaacgtgttcacaactccatgagagatcaacaatgcaatataaatggcgatcgtcttgccgggagtcgccacgtagccgtcaagggaggcagctgtcgagatgagctgagcgagaccgaacgtgatacccgttgttctgtggaagagagtttaaaattgaggatacagttccgtgtgtatggtacaaatcaataactcacacagctacttgtcctagaaagttgaaccatccaaccatccaagccttataacaaattttgtcagtttattgagttgcctagtaaaagcctattttgaacctacccaaaaggccgaatctagttagagaagcattcaacgaaactgatcagttgaactcatttgaaacaaatcgtgatatcacagagagacaaagggtaaaacgaacattttggaggagccaatagcgccgcccaatgactttagaccgaaaaaaaaacagttatgtcgagagatgagcatgagaaatcattagcagacaacattgatcattcacttactaagggcctcccgaagcaggaacagcagagacaatctcggccattcctaaagcgaccgttccagctacgcaggacgaaagataagaagaagcgcatcaagacctgtaaagtagacatcagccagcattatcgagggccaaggaatgacgtactgaaagcggaaactatgatccaccctatagtcatcaccgctggacctccggttgtcaacccatactcgaaaagagttgttccacctggacaacatataaagaacacatggtttggatgtcagggatgtcagtgatctgaattctcaacatttagactatcggacgacagacctgtgataacactgtatgagaaaaagtccatcatttacaatcagctacaaagctatcggtctgccagaataatcacgatagacaacgaacctgatgatggaaaatgagacaccgaagttgtgctaaacgagccacagagccacttaccgtaagttcactcccgtcttgatacgaaaattaagatcgttgatggacacgactcacaatgagacccattcctctagatagctcctccttatatcccaactctcgaagtcgagcttcgtctgctgtcggttcatggctggtgattgtcgtcttgttttccgttgacatgatgacaagatggtctttcccttctcaatgtgtgtgtgtgtgtgtgtgctcagtaaagaaaggaaagaagagattcaagaaggtcattgggtttgttaaacagttttctctgccgggtgcgatgcgcgtagacccaaaccgagataaggagataaaaattagccgatcaattgagaacaaaatagccgcaatacttcggctactcgatgacgaaactccagatggcagcgatagttactatcatagatagacaagcgacacaatcaaagcattagaccccatgcacgagatctcactttgctcgctgtcttcctccggtgacctctaagttccaatatgttatacactttgacgccaaaatatcaatatgatatacagaggtgttcagatgaattttgtgaggacaagaagcgagaactgagaagaggtccgcgcctacctgactgtccatccaacgtttcaatacaatttcccatcctttcatccgagcaccatgcttgtacgccaaatgagccatttcttcaaacccgacaggctgtagcaacaagaagaaaggaatcgtttttgattaattaataaaaggcgtctactttcagaaatgatagcagtcatcagagaaaatgctcaacctcatatctcagtagtcgaagccaaagttcttcgtcttgtaaaaccatctgatgaaagatctcaaatagatcctcatccttctgttcgggctcattatctagatccgaatcaacgttctcggtgtctgctggccaagcacagactgatgacccttgttctaattccggctctacggcctcctctgacccatctagcaaagcggtaattctcttcatcttctttcttttagccgaattcgatacaaccaactctttattctcgctcgagagcctcttcttgtggactttctgcttcgatgctcgaccagccgaagtggacatggatggagacggaccgggagtctctggatctggaggtaattcggggtgtagggtcttccagacatcgacgaggaggctgataagctgagccttggaagacgactggcgaagtccataggatttgaccaggttctatgaaaggttgtttgaagcatacaatacagactgagcagtcagatacgtaagcgagaaagattggaagagactatcattacctgcagttttttacattcccagctctcgtagtctggcataacaggagccttcgatttgcccttcccgttggtaattttgattgaagaatgacgagaaaatacatcaggagaagatagagatcggtttttattgaggtcgatctggtcttcctcagttaaactgattggactcccaggcaaaacatgcctatccatccgcaatactccctcgtcttcgtctaggagaaagtcttcgtacacgtccaagtcgctgaattgctttgaactcgaaggtttcggtgtctcattcaccgggtttatgagaaggattccatcatcatccgattcgtcatccgagatggatataaaagcgggtttggatttagatcctccggaggttcgattgggtgttgaagtccaaggtgaggatgttgcgggttggacaggttttaaagcagagacaatctgaagaggagacgaagaagacaggatttcttccacagaatcaatcagatcgacgatctccggagacgagccaagctcaaccaacccgtcttcttgaacctcgtcttccactacgatcaggcccgcttctccatgataattgttctgcccttcttcctctcctcctcctcccctcagacgaagagtgctatttaagccagtatgtgtccaattgacaacatcagtcttccttggtgaggtcaatacattcgcccccgcaacgtgcgatgtcaagaatgagttctgtgtcggatgagatgataccaacggtgcgaggagattcggtagacaagcgtggactggtgaaaggagatttacgtttgagcttgaggataaatgagcaggggagaactaaaagttagtcaagttggtatcatgaattgaggatcggatcagttaaaatgcaggaagtcggcttatacgaaagataacgcacagatgatctttccgttgggcttgtctctcctctggcagttacttctccacgactatctttttgttcatcatcactcgggtcaatgaactcgtccttatcggatgaccggctatgatcttgtaagaaatcccctcggttggctgcatcgaaccaacctcgtccctctccgctggacagacctgatctcgacgcgcccgacacaccatatttgtgaaatcttgaaccgagattggacgtggtaaatacctgcgttggcgcaagaacttttcctatctcatcgtcctcgccaaaagcttccgtctcactctcccgtttctcactttgggcttcgagtggtattggagttcggctatcagcaacgtgttcttctctctccatctcatcatccgaactggcgagtaccttctcgattcgcattttcatcctctctctcccttcctcggtcgctactgaaacgactgtcgtttctttgatggcctttctgcctccagaccgttgcttggtcgtcagagattgaaggagcgactttggctcagaagccgtcgctttctggatatgcgcgataatcatatctttcagagactcgacagtggtatcatgtgaaaggcgtgtggaacaagcatagatgtgtttctatggatcatatgaccccaggagcatctacgatcaggcgatgtatgcgaggaagagtgtgagaacagacgcattcacatacccatttcgtcttccatacttttctatccttcgaccagtcttcagaacaaaccaagcacttcacaagtttcttcatctcgcttccttcgatcggacaatccgggacgaccatgaatggcttcgacgacgtccgtttagagatcagggctgcctttttcttttgatggagcgcgtccgtggatggaacaacagcctcaggtccactcgttgagcaaccatatgcaaacttggcgaatgcggacggcttttcggcatgtttttcatcgacagacagcttattgtcttcggaaggcgtccgacaaggtgaaaacagagaatgtggctgatctttgaggatgataggagatcgtggtcgaggcgtggtgatgatgttggttcgagaggaattagatcctattgatgataatctttgatcctggttcgctataggcggacttttcttgttgatcgcgttggcgttgtcctttgtctgaaagtagtgggagtcgatcgtccctgtgaggtcgatagttgctgttgaccctgaggtgggaaagccgatgtcattggcttgggtagggagtgaccgacgttttctagctactgtattggcctttctcaacgacttgatcgagtcaagttgagccctaaccatgtcgataagcagaggatgaggaatcgagggatcacacctcaagaggtgtgtcttgcggaagggaagagcggtttgcggtcaggtctatatacatcaatcgacacaggtctttgcttgggaaagaggcctgtcaagagatcaactcacccatttagttttgattttctttccaggctctgaccagtcctccgcgcagatcacgcactctttcagctttctcatttccattttgaaagggcattcaggtgaaagagaatcttgaagagagggatccaccttggtgggtgacgggatcgattgaagacgcgagctaggttgtgcggaaggaggcgtgggcgtaggtgacccgtggggttccggtaggataggtatgtctgttgttgaactggatacggttgcagggagtgggatctctggaagcaatacaattgggatcaagtcatggccctcctcttcactttcgtctcgatcgtcgtcatcgcccgtgacgacatacggactagaaccggacctgtcgtaaaaatcgctcgctttccgagtccgctccctttcaggttcagagtcttccactatatcatctgaagagagacctgggttcataagatctggcttgaacgacagcacggtaagcttgtaagggagcaggttgaaggaatggatagacaaagcaattgtctttatgtgagaggtgatcgaatgtgtggagagaatcgtaaccctaacagaagtcgcgcgacaactgtggagaatcctatactcaagctttgacgaggaattttgctttaaatcgtcatattctgttttgacttgcaagagtgtgcttagtttgtgcaagagtcatggcgtacaacagaaagggaacaacaatacatattctattggatgcaatggtagtgagatagcgatgtatagaaatctccgacgagagtgagaagagtggaacgaagaagcctcaagccgatttcgaacgttctttggcagtcttgttggctgaatctattcggtcaagccatccctagagtacggagagtagaatgtagcagatgaatgaacaaagttaacgtggtatccgaagcgtattgaaaatcgaacagagatgaacagatggtagtctccctgctggttgaaagagaaagaagagcacgaacctgaacactcttgacgccttcttttcgttcttttcttgcctcttcataagacgaaggacaatcgattccatctctggggaggcggaatttaacatgaagacaaggattggttaacgttaaagatggtaagcgtctgcctccgacataaggcgagagtttacatacagccacaggagggtttgaagaagcatttcactcaaaactgtgaactctttgctgtactgggcgtgttctggagattcgggaatgaggacgggaccctcgatagactagaagacaacggatggaagagtgagaatcgatgtatttgacatgctgcctgttgatccttcacgatctgaccggtactcgacacacgcaagagcagaaagggaaagaaatgaaaggaaaaaaaagccaagactcacggccttctcaaaatcgatgactcggtttccgagcgtgtctctggtatctccaaccttcatcttgatcctcctgaccaggtcactttcactctcttccccgccctttttactctttcctgcgcttcgccccttctccttctgaaccttgccgacctcactctctgcgttctttccattaccaacgatggccagaacagagccatgctttataccgtacgtggagagtgagagagcgtcctcggacatgatcccgcctgcaaagatgattttgaacgatttgggaggcaaatgggtctgatgggccaggtgtgctcgaagggttgacaacgttgttttcgaaggaggggttggaagggtgatctgaagtctagttcgagatcgtcgtcaaacaaaccaggttggcttcacttgatgagtcgaggtgtgggacacaacagatcacctaaggcttgaaagcggaaagtaaaaaaaaaatatatatagtaaggacgaacttttctcttccccatttgaccactacgaaagtggtagattcttcagagcgagaaggatgatgcgacctaaaagctcgctgcatggtatcgaggaaggacatggttgaccggtgggttgtaaagctgagatactaatgatctgatggctgatattcggttaaacgacaatccgaaagtcgtcggctggaacagtcagggcgttgtgtcgtgtagccatgacgaagctctcaaagtggttacacaccagtgtcacagcgcatggttacacataactctcgagcgagcgtcctttactcaatgttgccgctggatgtgcaagctacacgcccacatgcatacagctagttcgataaggttgttcaaaacaggcatgctagtttgagtcctctcttggttgactgacgacactacttgtaacaaacaaagagaaagacgaagacctatacaaagaaagatgaagttgtaaagatatctcggcttcacgaaagaaagggccgagtcaacaagacaagagacaaggccagcgagaagaatcacacccttcggttccgatgcgtgcgttcgttaaggagagccttctggatagagcaaaccgacgcacgcgctggaggaaaccatatgtttacaggcgtatgtatgctgtctcctctcgatacaaacacgtacgacagacggatggcaaacactgactctgataatcatcccaacctggctaggactaatagcaaaaagtgagacaaacccatggcggcatagaggatgaagcttagagcgtggggaagatgcgcagtaagcacgactcgtagtgagtgttccagtcgttccgataccaacaaggaaatcttgtactgctaactcgtgtgagaaacattcccttcttgatcttctctcgcctgtctcgctttaatcttttatctctgttctcattcatcgtcatcgtctccttcttcttcttcttcttcttgcaagctcaatcctagggtcccttctactcttccgtgctctcctaatctcggtcaatttacaatcttagcgactgtcccaataggatcgacagtatttagttggaaattccagactgcctttcgacctttcaacatcctgtgacatcctaacggacaccgcccccttcatctattttcttcaacctctttgtgtgtcactcaagtcctttcgtcgcatccccttctctctctctctttctctttcttttctcaagatggatgcattcaatgacgatgacgcagagttgaattccttcttgaggacactctcacccgtccatattcaacaatctacaacatcaccttccctcgatcaaaggtccccatccttaggtgtttcaacctcaaccttccagccaaatcaacagcactctcagtctcagtctcaacagtcagcttcaccctttgggttcttggatccagacagctaccaacttgcacaaggtcagctgcaaaaccaggattggtgggcttcctcgtctgcaatgggatcagcggatcgtccggtagtcggcagggatggaggagctggagaagcaggaggagcaagatctgttcccagacctggatacaccatggaggaatacgcaagcttgatcgcagaacggatacagaatatctctcaaaatagtaatagcaacgacagccacaatcacacattcagatcaagtctttctgcttcgggagactaccgagaagctggatcgggatacgcaacaccatcctacgcgtccagctacggtagctatcaggacgatctcggcgcgtttgatggcgcgagctcaaacggagaccttacagccgacagtggatacaacttgttcgtttctctttctgctcttttgtctcaagagccgtgataagcgactcttcgaaacttatccttcctacattcaaccttcgttccggttactggatatacacaggaacggagacgatcacgactctaaaggggatgtcgccaatgcagactttttttcctcctttgataacttcaactgccaatctcttgcgcaagatcctgccgaattagacgttcctctaccatctgattccgatagccatcaaccaggatggcccttcaatcggtcgctcaccgggcagtccagtgcgagccacctggccgtcaatcttcatctatcagcaccgaagaggacgtcaacgatggagaccgacgcgacgatttgtccagagccacctgctcctcggatccggatgccaccagcccatcaatcctcccttccatcctcccacctgtcctcgttcgactttgcttctgataccttgtctgctgcctcgcccgagaacttgtccgaggaacctgttgcttggccggaaagtccgaaggggatgagtgagaagagcttctttgagggggatatcttgtctgcccattcagggtccagttatgatcaaccaataccttctcctcgtcttgtctctagtaaagtttcttctaccgctgctcctcttcaatcccagagtcacacttccgattctaaggcttcgcctcagaactctgccaactacgattcccaacctaaaccctccgtcccatgtgcatccgggtcgtcctcgtcctcgccgtcccggttcaacatccagcaattatctctatcgaactctgccccccccccgatatccatcacgccatcccaatcaccctcgtcgacatcatctccgtcgaactccaatcagtggtcctccccaatccttcaaaactcgtctggaaacttaaacctttcgcctactgagccggatgagcaactctttcgcaacgcggggtcgcttccgcctaccaatccgaggctcatcagtctcggtcagatgccgcaagcgggtgggtcacaagggctgagcgaccaactgcaaatcaacatcgttcctagtacgcccacgatggggcttgctggaacaaaaacgcagtcctcaaacgagtttgcatatgctatctcaagagcagtaaggagccctgttcatggaagtagctcaacgggctcgtctcctagagccagatcgtctccgaccacacagaacgtaccctcgcagtctcgacttgtgtcatcgagtccagtccagcagcctcaaactttcggctcatttaacggtcacccttcaacgtctccaacgagccccgcgccagagaccccttcgttcttccctcagactgttaccttggcgtccaacggatcagaagagatgagctggttgtcgagcttggggaatgcagcgactgaaccgaacattcaaagtcaaataactgtctctcctcctcaagctggtccgtcatctcttgaattttcaccgggtaaccctcggccaacatcaatcccgtatacgttcttctcttttaattcatcgttcccacaaagacaagaccttgctacccaacctgatcgaaccggatcgaatctacctgtaacaaatcaagtctctcctttcctcaaggcgccacctcaacgtcagcggtctagatcggaagcatcgcttgttccttacgatttcggcccagttccggtcccacccacaatgaacccaaatcatttggccaagcctggaagcaatcaaccttctctgaatttatcggcatcactgatgcagcaacagcaacgacaccggatctcatcccagcaacaacagcaagaacatcagctcttgctattgcagcaacagatacaacatcaactccagcaacagcgacaactccagcaacagcaacagcaacaacaacaacagcaacaacagcagcagcagcagcagttctcacagcagttccagtttcaaatccagccccctcaatctgacgcccaaaacgcgagcactttttcaacgtcctttgccgggaacccgtttctccctctgaacgcgcttcaaaaacttcagatgcaacaacagatgcaacaacagatgcaaccagttgatttctatcagtcccagtctcaactatccacattgtctccgtctttgaatccttcgagttcagttcatcaccaatctcttgacgggaaaccaagaagaacgagttttggaggaggaacattcggagccggaactccaaattacgggcaaggcctattgaatccttgggccgggatgtctggattaccggctggcgaacacgtggcgctcggtatgcctgggccaggagtacagcgaagcttgagtgatgctggttcgaacagaataagtcatcgaaaggtcagttccggtggttccgtacattctttctctccccccaaaaaaaatatttcaagctgatgcctatccctatgtccattctcaggtgaagtcggtagatctgagttcctcgccatattgtcagtatcattctcacgctatatagtgttagctatatgcgcacgtatcttcgttctctgtccccttggctaatcaatagttcactgatcactttttcctttaccttcaattcattgaaatagtgggcgttccgaacaacccttctcgatcaccccgtcatcgatcgccatcccgtcctacctcaaccgcctcgtcttcatccacggtacccgtctctaattctagttcggatgtaaagtccctgcctatgtcttcctatgccggcttaaattcgcattccggcttgtcgcccactcaggacctggtccaaatggacatgaacatgtttgactctgacgaaaatgatggagatactgatcctgatgggccgtcgatcatgttgaccccactttcagaggtttcagcatccggtgggactggagggtcggaggaattgaatgtgagaaagcagagcgtgacgacgaacaagacggcgaacgcaagcaagagtagaagaaaggtcgtcgcacatttcatctgtccgatcccggggtgtggaactacgttcactaggtgagttatcgcgcatgagccaggggaatcttctttctcttcttccgcaaactgcacttacgctgacatcatattaaatgtccaaaggtcattcaacttgaaagggcatctaaggtctcataccgacgaaaggtttgcattatgcttcttcatagttttgtggtcaatcatttcctgatctcaacacttatatttttacataaacacagaccattcaaatgcgagacttgcggcaaagggtttgcccgtcaacacgattgcaaacgagtgagttatcccgtgctcgctacaagatacgatcacctttgtcgtctacgtttcttactcgctttgctatatctcttgttcaaaaaagcacatggctcttcatgttggttaccgtccacattcttgtgtgggttgcaaaaagaagtttgcccgtttagatgcactcagtcgacatcgtacgtttttttctgcatcctaaatgtgtttatcgcccgaaagtgacaagtatggtccttcctattcctaacctcttctttgcgtctggccctatccagtcaaatccgacgccggtcaagaatgcctacgagtagccgagacatcagctctggcaagtgacaccgatcctgaggcggatattgaagagacattggagaaggctgattcgttaggcggcagtgaaagtagtagtcctcctgctgaaagagatcgtcgaatgccaactcgagggatgagtggggtgcttctctgaactgatcttccggatgatggctgaatgcaaagtcctgacgcgtcgggaaattgtccgacatttcttttgatatctgaatgataccgatcagtgtccttctttctgtcaaaatagtggattaggaaactatattataatttcatccatacgacgtatagattttgttttatatatgtacaataagcttttttctcttttcctctttaacgatgtttgaacgactgccatgtaggcgtgtgcacggtgatacctaaccaggtatgatactgtcgtatgtcatttacgaaacaaggatagatagatttgagaggaaatttgagctaacacgatgtttcgatctagcataccgcatccagcgtacgtctgcgggagatacgccagaaatgcggttttgagtgcgatttacttggggactgacgtcattgtgatctcatcgtgtgtgttcccgtcgttttttttacctttccttccagctcatcgataccgaactctataaagctaccgaactctgttctccattcaaaacactactacaaccaacatgtctgctccctccgctatcgccgtcaccgacgctcctgctgcccacttgggccgacctttgacctctaggtaagcttcttcgcctttctccttctcgttcttccaccttttctccaagttcctccttaattctcctcattcttttccttgttgtctataatctaacctttcactttgttttaaatttacacagtgataccatctctgccggtattcctgattcaattgttacctctcagaccaccacaggacacgtccatgacgcgtgagttcacccgctatactaacttgctccagctcgatgtatgtgtttgcttacccttttaatcctcctctcaacctagtaccaacactgctactggtaacaacaccgggaaggcccccattggagacaaaatctctggtgaggttgacaaggtatgttctcagttgtcatactatcctttctatgtgattagtattggtacttatcttggctgcctcttactccacccggtattcccatcctagctcactggaaaggcccagaagaaccccgagctggttgctcagggtgtcgagaagaagggtcacgccgatgaggccgaggccgttcgagccactcagaacaccgacacgtctcgagccgccaaggagactggagctggcgactcaaccgacgttaagcacaccaatgtcatcagtcccacttccgccggtgcctcccactctgctgtcagctcggttgacccaacattgaacaatatcggcaaggcactcatcggacagaagatctctggtgaaatcaacagggtgagtcagcttaccaggttttttttagagatttaataccttgggttgtgtctgaccatctcgaatccttatgattatcagctcgtcggcaagttgaccggaaacgttgagaaagttgcccagggtaccgagcagaaggggtgagtcggaggctactttatcttggttacgtggaacaacagctgatgagcactcttcaaacacttccttcaatagacacgctgccaaagcccaggccgctcgggatttgaacacagtcgatgtctctaaggctgccaaggagactggcgcctcggattccaaggcttgagctaaatctgattctccttaatcatactgaaatatctatatccctaatactctactgtatcaatgatctacaaactacaactattccatacctatcaagagcagacataggcaaggatacaccaccctctaaacatcgtaaaaactgtcaactatttggacaagaaagagaaactagcatagactggacttagaacaccctgcttccaatctttgctctagggtccggtctgacaagcactgttcctccctcctcactcttaaccccgagggtgagacactcggaataaactctacccaatctaagtctctctacgttgatcacacaacatactttggtaccgatcaagccttcgatgtccgggttttgttcaacgatttgggtggatgagtttcgcactccaatttcggggccaaagtcaatagtgaggaaataagctgggcgaagagcctttggcgttggtttagcagcagtgatgatacccactctgattacggagaccaacaagaaataaaataaaaaggcgtaaaccaacggatcaaggaatggtgacggttgttcaagtcggagggaggaaagactcacctgatatcttggttgggtggcgcagtattgagaggaaggaaagcctccttgaggggatgaagctctttagccgggggaggaacgactgtcatgacctcaggctgaggatctgatgttgcagcggcagacattacgggctgactggatggtcggttgatactgttatagctctggagagttcgctgtagaagactaagtaaccgggggtcggatataaactcgacaaaagctgtactcaggtcacaaaccaagtgaccagaccacgtgagtagcgccacatatcacaaccgctcacaaaccacgaccaggttttccgttcctggttactgttcctggtatccatctgctcacctcgtttccttcacctttctccttccccataccgactcccactctttctgagcactcttgctagtgtcctttcggtcgaagatattgatacaggactggacacaactaccagttcgactttgttctgttctgtttgagaggtctcatgagttctccgacgccaccggtcgagaaggaccctggctcttcaccgttcccttcaacagaggattcggcctttcctgagtcttatactagccatacctacacctcgtcgccgaccgacctcaagcttgatcttggattcaatccgctttccaattttgaagagtttctggatacagattatcaacatagtctccagagtcggccgataagaccacttcccacatccgcacgaaagaccacgtcgactgtctcctcgggcgcccgagtaacatatgaccaactctcgacaggagatggatttatgagtgggaaaaagaggatgacactcgactcttcgccagaagttcctagcggtgctatttctgccaaatccgcatctgcttctatcaccgagctagatgaaaattcgtccttatttgaagcaggccagaccaaggcagaggggaatggacggcttttgtccatgtttgaagaagatgaagaggaaaagaaacgaggcggtccaagatttctagaaggcaccggtgctcagtgctacagctttcaggtcggaggaggttatgatgatcatgattgcgatgacaggttcgtacattgacccttaccaatcctccgtaaagaaatatcacttgttgtagtcaagttcctgacggatagcatggtttttgtcgacggctctagcttcaccatgccgacgagccttcccaaaaagtaagttctcatgattgcaaagactgctgttctgttactgttctgattttggttgccttcatctcatcagacggaagatccctgtcaactcggctatactagcatcagatcaaccccttcatgacaatcctcaaaaccgtacctctacatcaaccccgtccgacaccatctctccagaagatgatgtagagtcttaccttccatcaccatctactgctccaaacattcatggagcgtactactttgactttccttcgtttccttacctgcctcgaggttacactcgtcaaattccgcagcttccccccaagattcggacgaatcttcaaatcgtcagactaagtccggcttgtagggcgaacatgtgggccaagacggtctggagccaacgtagaaagatcctcgccttggctctaggtgtcgaagggattgatgccgatggtatgccaattccttccgaggagcctatgacattgacgaaggcagaagagagggcagttgagtactccggggtcgtttggggtaaagtttttgacgccccctcgctcgtcaaaggtgggaaggacggactgaagaagggcgaagacgggaagagaaagaagcaagaaaaattggaacaggcttcttcaggaatgaatggtatcaaggagatcttgaccaaggatgggctgagtatcacatcaatcgtgagagaggaggtcgtctggttgggcaagaaatcgaaaccaatcttggagcttgccaattcaaagttcacttaccagtgtgagagtgccggtaagtcctagtttcaggagaccaatcaactgctcatcatacttacatgttactaaatgtcttccttttatctctttttcgacagctacgaccttcttatacaacatcaatcaaaaccttgtctcccttcgcaaacggctcacaactctcattactcgatctaagttattcacttctaaaggcaaaaagggcagcagggtcaaccgatcaaccaaacgaccagggtcgactaccacctctcgatcgttgaagccagcgctttcgagtgcatccactttgtccaaagagcaaaagcttttgtctgcaaacgacccgaacttattagctgagttcaggatcaatgttgccacgcacacagtgaccgagacattcaattcaaatgacagatcagctctcgctcggaaaggagggccgactcgagccaatctgatgaacaagactatttcgggtgctcctacggcggttgtcaaggcaacttctccagaaatcctggcgagtaagtcgagagaggcattcactctgggcggaggattccaggcttcagacaactccccctcggcaattggagctgggtcacctcctgcttctacaaagaagaagcccggaaaaaagaagagaagtgcattagcaaatgcaggaaatccacatcacatgaagaattgttagttttcaatccattcgttttgttctcttcgacattccctttagacgcttacggtttcaacatctatctatacagacgtaccgactcgattggtatctgatcagactgtcaaccatgtttcgggcaatgcgcctttcatgtcaagtttgctgttccctacgtcttcaagatttttagctgccaaaccaaatagatatcgttcgtcagcttacatgacggacgaggcagcgtcagaggagtatatctgcatattctgtgattattcgctcttcgtacgtcttctttcttgcttctacaagccataatggccgtcattttctattgaaaacggactgctggtccgaaaattggatcactaacagtcatctatttgttcgataccatcacagtatggttcaacagaggccagcaaaaaagccgttgccaagaggaagaagacgcttgctcggcggaggcgcgcaaaagagcgagcgagtggtgtggctaacggactggcgaagaaaagtgtagaaagagtacatgatgatgacgaagatgattgggattgtgatgaagaattggtaggtcctagtgctctgccgtcttatttttgttgcatatcatgattcgattgatctcgagtccttcgttgttaatcgtttatttgattctcttgtatcgtcatcagcttcccaatggccaatgtcggttagtagctattcttgttaatgttttggcctttcgattagaatctcgactgatgtttgtctatgttgattatgtttccagacgatgtgctgagcgccgaacaagagagctacggatacagaatcgagcgaagaaaaagaaagacagagacagaccactaagggatttggatcggtaccaccatactcatcattcagcacattgcagtgctgatgacggttcctatgcttaatacactatcctttcctgtttctgtttcttcttttctttctcttttctttctcttttctttctcctccttcttctctttttttcttcttcttcctctttgcgattgttcgtgtcttgtgctatatctttctgtctttatgagttcttcgtcttttcctctttcctcgcattgttttcttttcctcctatttctatcctctggcatctcttcatcatcgtcgtttgtccaaacatctaaggaagcttccctcaatgttccttgtttcttgcatattcacttttccctttgcatatcgctgttcatcccatcttcaatctctcctcgtctttcttttccctcactgcctttcgactttctcttattcaacctttatctgtggtaaactttgcagaacaggtgtagatctccatactcatgactcacattgttataaccattcaagtccaattgtcttttaggacgtgtcacctcttatctactttgttcaaactacttgatcgtctcttgaagatcttagagtacacatcgatccatgatatatctactcttccaatcttggtcctaattcacccacggctgatgcacttttcaaacttgctctggctgctatctgacctgtctcaatcatgctttcccaccggacgtcatccattggctcccagatcggccgagtgataagctgagctacaagcgcgccgaccatagagtcacccgcaccagtcgtacttatcaccgaacccgcactaagtgattgcggtgcgtggtacatcagacggatcgttcgactacgttcattcgcttgatagacaagttggtgagggattgacgcgactgggttagagaagttgttagaaggatgaactctgcaggagagaacgccgagggggccaagtttaagtatttgattagggaagaagggagacgtatcgacgagtaggccgataactttgggaatgaatgaagaaatacaaaatctcattgaatgtttacaagtgctgtaccgaagaagaaaaagaggatggccgatctgaaaggtgataatgcactcactttctttggctttctgcgcccagtcaatcttcaacccaacaagccaagcgtccacggccgatgtccactcttttccaatttgatattcacttgaacgtcttgaccaaaactccccatgaatcaaacgccttttggtcgcctcagcatgccatttctccagttcaagcaagtttggggagaagaacgagacctcgacctcggatccgatcgaccgggctcgctcgaacgtatcgagcactcggagggattttgcactcgatgtaggctcgaagaatgttctgatagatcgctcgaaacagtgatgcgctagactggcgatggcatcggaatggaggttgccgtcaaacgcaaccagactcggttggtgttcctcgactccacgaatgatctgatggcaagacaggccaatatgatggggagtcaggatccttgacctgatgtaattttagggggactgaattaaagatatatgatcaactcaacctgttcgccggtccaatgctccacaagcttcatatctgctactcccccttctaatcctccctctgaatccaacaataacccacaaaccggcgtaactcctactgtatcgtctttcaggctgatcaaaccttcctgtctcatccctagcacttcaagctcggctcgaagtacccgaccagctgcatcgctccctgtaggcgcgagaaggagaatatcctcagcacgaggactcaattttgaagcggctaatgcgatgttgagggcgacgcctcctggggagagtcgaatcgaaccgggaagggtcgtttgcgaatgaagatagtcgtgtggagattgaagggtgatgtctagcgcagcagaaccaatcaccagtgcttttgtcctgatgttctcattggctgatgtacattccacgtcggatttctgactggagataacgggtgggattgtgactgaagaatatgttttctgttcaagagcgcaaagaccaaaaccaggtggtcaaccttacgaatctgtatctttccgtcctgaattgaatcaggtagggaggagcaaaacatccattgcatataagagagaaaacaagttcatacggtcgttcctttagacattcgtttcaattgagcaagcttgactgcaatctccgctccctttcgagcattgttctcaatcaatgcgatgtctgtatcagagatgagttagatcagtcgatgcaaattctatcatccctgcttattgatctgaccaagacagaagattggaatcattgacttactactcttgacggcgctgccttgggtcagctgagagactcggctcagcagccaagggctacaggcgaggtaacaagatgagcagtttttcagtcaagaagacagacagatgcaaagtagctcaacgacactcacgtagcttcctttcctcgaacaccggattgggctagatcggctacagctgtttcaacggccttctgaattttttggcccgaggcttcccattcctggggaatcggcacagtgatcaaggttgccaaaggactgggaagggaaagaccagcatctacaagagcaacatcatgagaaacattgatgtcaaagattattggtggtgggtcttggatagatttatctcgaataaaagagcaaacgaacagatgatggatgctgcctcagacgcagtggtcactgaccaggggctctgtttagatacaagtcgagtagatggatgaaccgtcaaacaagatgacaaatggatcagaaagatggatttcgcaaataaaagatagcttcagaaaaggagcttaccttaaacccagagtctggtgtgtagaacgcagggaacgcattagtcggtcctaagtttgcaactgtaactccttgggtttcctatgagatattatacacgaaaaagacttagtcatatttcatagtcactctcgttagatgagtgcagagttcacgaacaagatattctatcgttcgtccgatgtctaggatagatttacaaccagcgcagacgactccaagaggggtcctaccgagctcggttaggtcggctgaaacatccatggtgtgctcgcctcctcggtgaacgccgcctgttgcgaagacgctttaagtgtcagtgtctgccggaaaatgcaaggttctcgagtaaaaccaagagagctaaccaatacccccggtgacactgatagatgaaccaatatgaagatttcagtgatatttctattcacgaaattgattgcaagtgactcttaaagagatggactacgaacaacatatcgatcccagcttgatgggccagccacatagtaccggctacagttgttcccccatctctgcgcagtgccatagtaggcgcgagatctcttctggagaccttgaccgctgaatttgctgggtctgcgagcctctcaagctgttccctggtgagtccaacggtggggactccatcaagcaaggcaatggtcgcagggacagcgccttggtctctgatgatcttggacaggccaagagtgacgtccaagttggtaggatagaccataccatgggtaactgatgaaattcggagaaagaagaacgtaaagtttaacgccaaaaaaagatagagtcgacaacggcccggtgagccggcttgggagattatgaagatagggtgagaagactcacctatggcagtctccagagcaacgatgggtttatgactttgaagagcctcctcaacctctggatggtacctaattttatcctgccaaggaagttgtagaagaaagaatatgccatcggaggagtcggacaatagagcaaaggagagaaggcatcaggctcgcccaacaatcaagaaagaagatggtccatatgagaaggcaacttacccatctattgagagtagagcaaacagagaacgctctagaagagggtaatctgatagaagatttcgataccagccgagggagcattctcaaaacgagatgtagatggctgatggctgaaggttgacggttgatggccggatgttgatggcaagagaaggtttaaatatgaaattccagtcttgggatttacacccacactaagattccccacgtggctcaaagcggataatcatcagcgtcgaccaccaccacaccatgttctctttatttggatcgaagacaactcctccgcctgtaccagacacaccagcagagcaggaacaggcccatgcagctccagtgacaccttcagagacgcctctgcctatagttgactctggagcaccaccgacaccgctcaaggagtcgccggaggaacgattgaagagaacgtacaaacaggaaatcgagcttcagaatgcactctacccaaagcctgaggatgtgccttcatgtatggatttgttgtacgtctttctcttcaggattatttccacagagatcaccatcgaagcaggtgctgacgttcaagattaaatagcgacgctcgtatgaaatgcatgatcggttcgttcactcttcatccctttccttcttcctcttcgttcatcaggcctatatacgtcttctctaatcaccctgtgcacgatcgttcctgaatcacaggcggtacaaaccaaggtcgacatatctatcagtatggcgctctcgacggttgtcgagatcaggaaaatgatttttggttctgctggagtaatctccgagcttcatctgatgcagagcaaaagcgagagctttgggttaaccggagagccgagtggtggacgagcagaaggctaggagcgagttccgaggatgtatgggatgctcgaccgtatgtcttttcttccgacttgcaatgtagtgttttgcctatgatgaaaaggaccgattctgacttgccgctggttgagttcaaaagagagcgattgacagactttcctccaatgctgaaagaaggtgacgaacaggtgatcgtagacatggctaacccgagtacagaatatagtacgtatctgctagtagcatacgttcattgactcaaacagttcctcggctgatggtttgtactctatctcgcggtcagattaatgcgagatatgatgtttccatttttaaaagcatagaagtttgagcacaacagaatatctatctctccgtgctttacatgaccatatgacacaacaaccgaccttaaccccccaaacggtcctcataccttcctacttgccaacgcattcaactgccttctctccaggctggatcgtacgctttgcggacaaactcatccagccccagcgtctcatcctgcaacggtaccggtatgattccggctgccctacccaggaagaccaaggttggctggaacagaactgatacattgttgacatcgggcgggacaagcagccgatgaactgcagtcgagccgctcagaacatcgtcgtatgctccggctcctctgagagttccggaagggccagcagaagtggacgcgttgacgttaacgacagcggaaggatcgtttaggtttacaagcccgggcacagaggattgcagggctcgttggagctcatcttcgtgaggctttagtagtcgtttggtcactttagaatccgaatcaataaaccggtacacagactgctccaatcataaagcaagagaatgaagtgtcgccgacgaacaagaagaacggttagaggaacaagaaaactaagatctaaaacacatacggatccaaaaactcaccttagacttattccgctgggtcttgcctccgccattgcgcagaacatcgttcaccgaagcgattgggtgcctgatagaagacgagccagcgcctttgtttgagagatactcgcggatcatgattttgatctacgtgacgtcaaaaaaaaacagcccatcagcaatttattaaatatacggaaacctattgccggcaaaagagatcacgcttgacttacctcggcctgtacaggcttccaaagttcaagaatatcgcctgccagagcaccttttggaagcgggccagcatcatccttgaaatctttccgctgatcggttttcaatattcacatagatatcgctattagaatcgcaaaattcctacaaagcacagatatgttcagagatagagagtagaaaagggaagattactcaccacttcgatggcggaggtgacctcccacacgactcgtaagccctggaggacggcgtcgaatttcgagaatactgaccaaaacagatctctcaacgtctctccattctcatccgtctctcgtttctttgccgcccctttcccttgtgcgccttcaccatcgatagctcctcttagtccgtctggatcggtaggatcgaccataagacttggctccgacgaaggcggtgggggaagcaacgagttcatcgggatcaaccctgtgagagtctgtctttttcgatcaagacttcgttcttcaacctcttgaatcgttccttctacgagtgcgaacaactcggaggcctctctctgagcaagcacatccatcgcccaccggagttttcccagagcggccaacgcttcgaggagatgttcgatatacatgaacgaatcgacctctgggttaaccatcttgtctgtcaggtttaaaccagccccgagtaagcccccgttgagaactgttgtgggtccaggcgatctcattagaggggtggcaagcatggtcgagagtgtttgagaggtgaaatcatcaggtaggttcagtgaagggtcatgcgcaagtctaaaaggtagatcttgaagaaaccgggttagatattttggagcagggttgtgagacgtaggtgatggcccggcaaatgttgaaggggacgggttgggtttcgagttggtggcaaagcgcgatggagaaggatcaaggatatccaagtcgggaactacaagaccagaagagaacatcaaacaacatgatcagtctatggtatgccttcggtgcgaacgagtctaagaaggaaatcaatggaacacgaacgctctgtttggcctttcgtatacgagctccatctggaatcgcaatagtaggacttcaaatacagatggttatgtagctcttcaaccaggatctcttgaagtgcctattggatcgagaagaaaggagaaaccttgagaaacacgatggtaacctttgtgacggcgtgaggaacggaaggaaacgaactgtctcttgagatacaagataacttctcaggtcggagagcgcaccaatctcaagcatctctggcttgttgatctgctttagggatcggactaaaacaagtgcagcaagaagcagccttttttcgatcaagagcgtctcaaactggtctggtattgatttgaggtgatctctgttgagagagacgtccagagaatgaacgggtctgtcagtctttcttcgtccagggcactctaagtttttgaaaggttcaggagagatgggaaaggaaaaggaaagagaggagtttataactcacatcacgtccagtaacgacaaggtgtctcggacgaccctacctctactccaaagcgcgccgatctctgcgttccgttcaccccgaagagactctttactctccagcaaactgttttttgcgtctctgacttccttttgggcttgtgtgagtttgtggagaaatgtgttgtgcgtggaaagtgcagaggcgaaggatgaagagtgggagtggacagtgctctggagggaatcaagaagcgcgtcggctagattttggaatgaaccaagtcgttcggatgaggtgtcggaaagtaagttgagtgagagtgggataggattgaactagagaacatggccttcaaggtcaatcaagagctcaaagagaacgagaatggatggctgtgagaacagcgatgcttacatctggttcggtcaccatggaccattcttgtttgatctctcttagaatttctgattgccatcgacaaagccatttgggatgcatcagatggctcggtttctcatcatacgatgaggtatactgaaagagagaagagaagaggaaacgcacggtcaattccggagaactctcctcctagatcttcttcggcatgagctacccttctctcttgtgtcctatcttcggttcgtagatccttcaaccgtctatcttttcccgagtttgcgaacgcctttccgatcaatgctgttttgaaatacgcctgatcgtgttcaatcgcgctacctgatacctgctgagctctcgcacgctctcgacgttcttcctcccaagtggaatgattcgagtcggccagagacgtgggaagaggaacagaatctcgagatgatgaggtcactggcagagagacctgtgaggattgttgggcaagtgatgaggagaaagaggaactagatgcggacgcagcaccagttgcagcagagacggtagatgtagaagtaaagatggatgaaggcggagggttcacaggtctcctagcggcagaccgtgtcggtcgctgaggagtagcagatccgttcggagctggaagaacaaaagacgtagatcccactgctgactgtggaatagtagaggatgaagacgttggataccgagattcgttcggttggttcaaaaagttggtcgttgacccggatgacatggccggcggctggacagtagatgaatttgtcggacgcagtcgatctcgagacatgatctagtgggccaggtctagttgtctgaccaaggtttgagaggatctattcagacttgaccggtttcctctagagagatcaaagagacgatcggcgggaagaggtgggggaaggtgaaggaaacggtataggatggttggatagaacgagatggtgatcgttcgttctgattgtcgatgttgtgatcgtctttgtgtacgaggactttctctattgtttcattctcgtctcgctttctgatctgtatgcccttcatgtaccggtctctaaactatcataacatgttgtgatgatgatgatgatgatgacgatgacgatgagaaagaaaacatgtgtctatttggatttagtcatttttattactgaacggaagattgtccgattttagaacttgtatggcttgtttccgacctcgaacccataccgtcctctctcaagctcaacctccctgatgtgcctcaacccacgacccttatcctgcgatcgagcggaacctcccaaaccatctcccaaaccaggcgcccgagcctgatgaagcaatgacggaaagattatgaaccacaaagaaaaaaacgaaagcgtcagctaccaggtccttttttcccgtatttggtgaatcactatgagaagaaaaacatcaaagaagaaacgcacccctccctgaagaagtaaagcagcggccttgatggtctgcatctgattcgtacttccgtagagcttagcggatacatctttgataccacaggcggtgaatatcctgtgcagcacgggggaacatcgaagtccaaagcctgatggaaagaaacggacgaaaagttggaggaagaatgacgatgagttattcaagctaagaaggacgatcttgatcggaaaagatgaggagagaggagagagagagaaaacgaaccaggcggacgagccctcatctggattctcacacctccgagcttgatggacatgtcctggccgtcaccccagacggtcctgttttggtatctgcatacagtgtccaagttttttaaagctggaaggtcgatcgaagaatgatggtcagtgaatacgagagacaagaacctttctccattttatccttcctttctatggctgcaagatgatgaacgagacataccggctgcataggactgttcaacggctttcgcactgatggggctctttccctgaccaactccaagaagaccggtatcagggcagccgacgacagtcatgacaaagtgcttggctactcgaccacctttggtcatgttgacgactcgcttctgggacattgtgaacctgcataggttatcgattcgcttgaaatccaatccgaccatcttggaaaggacttccttctggacgagcttgtcatcggctgccgagccctgtttggggaatcgttgagggatgatcggtgggtcgttggcgatgacctgaccttgttgaagggacggatcttgggctgtataaagatttggggaaaaaagacagcagaacgaagcaggttgagttgacatggcagagagaagagaggggagccagaactcgcacaacatcgttcgtgatcttcctaaagatctctatcaaggtgaacaaactcacggatatcaaggaagttgtcccacttcgccaacggatgcacgtagttcgaaggaaggtcggccgggtgctgatccgagagcggtctcagcggctcgtacggcagaacaggaaacggctgggctgatttggctcgaacagaatgctttatgatcgaactagccgaccgggacttgatagctgccgatctgagagcctggaaaggaagaaacgacgacggtcgcatggtctatgtcggtgagtgtgagtggtggatggaagggaaaagaaaaaagagtctatacggcgatcagcaaaaagactacaaacggtcactatgaaattgtccgaattctgtagtagctttcacaatcaacatcttatggcctcgcccacgaaagcgcatcgtccggatcgaatagatacacatcctcagtacacccaggtgaagccttcaaacaggcttcgtctcttggcatcctcgcttgttctctcgcctgaattaaggagcagaaatcaggcaaacaaagagggatagcgtgtgatcgaggatggctctgtatcaggatgtccggttttgtagtctttttggctcaaagtcctaatgcggatcgtaataccaaatcctagtgtttcctcgacgagcgttctaccttgcttcctccatccacatggaccatacacacatcatgagtgacgaccaggatctcatcaacacactcaatcagctgcttcctaatggcaagtccaggtctgcttctgatgtcttggtggactttgttccggtgtctgcttccttccgggtctctcctttatagtcaaaagctcggttcatcgttcagaaaagctaaccatctcgttcttttactttggtttcccgctcgatccgttcactcgtcttccttctctctctccctctctcttttgctggaggactctcttttgccttttgctgttgattcagaacaagcactccaaaaggctcacctcatccaagcttcactcagaacccagctccgacagaccagagatgagatcgctcatctgttgaccgagctcaaaaaggaccagagcaaggagcgcattcagatcgtccaatctctcatcgccgtgagcctcgttcttttccatctcttcttacagttcttctgtctcgatagaccaactcggttgtctaaacatgtatctcacgtttctgttctcatctttggcttctcttccgttcctctaccgcaggaactgttgcttcagacgagtcggatcaaagagaaggcgctcgagtcagagaccatcgttcgagatatcacacgcgacatccagagtctcgatcgtggcaagaagaacctcgtccagaccgtcaccgttctcaggcagctcggacatctcgtcaaagcgctcgaccggttggacgcgttgatcccgaccaaacgctacaaggacatcgccgacgcgctttctgttcgctcgctttcttatttctctcgtttctgcttccacttacgcacttccatgcttattgcttggcatatcttcatacacgcatacaaacgcacaatcctcttttcatcgcagacggtcaaagaatacgcaagctcgttcagaccatatgcgaccgttgatgaagtggctaaactccagaaggctgcagcagagaagcaggccatctgcagaacgatggtctctgaagagttcgagaacttgtaagtcacctcaccttttctctctctctctctctctctctctctctctctctctcttttttttcctctctctctttctccctctctgatgctcgacctgacctcctgatataatcttgcctccatcatgttccttccacagcttcgtaccacctccctcgtcaacaactgatcccagctcggtcccaccgagcgcaaccattgctgtagtcgcctcggcgtgccatgtggtggacgttctggggagtgatgtcagaagcatgctgctagacagatactgtactcttgagctaagagaatacagacgcatattcagatccaccgatgaggtctgtatatctctcttctttacaagtactgcacatcgtctgaccatcgaaaaacacggcaatcaacaaacaggcaggtcaactcgacaacatcaatcgccgatacgcctatctccggcgcattctcaaatctcacgaagaagaacgcgagcctgcgttccccaaagaatggaaagtcggagcttacttggtcgctcgatttgcagaagttaccaggtgactttctttttctcgtctcccacacatatcgtaccttgacaattcgaggcttccgatcacttcagctgatgtgtctatccgccacatcgttctccttccgaaaatcagccaggatctccgaaacgtactatccaaaaagacgcctggttctgtcacccttctcctcgaggcccttcagtttaccctagatttcgaggcacaaatgagttcgaaattcaacatgacagtaagcatattcggacttttactctccttggacacacaacctgtcttgctaaatatcaaaccatattcacccaacccttagtttcaacagattgtctcagacgtcctccccagctcaacataccaagtcacgagcgagccaatatccaaagttttcgatccatacctatcactcttcatcgaagcacaagacaagtaggtgttctgatcacctccattcatccatcctctaatccatcacacgcctctcatttttgtatttgatccttccgcgacccaaatagagctatttcagaccttcttcagccctctcgaggacctagatctcgagcttcccttgagctcgctaatccgagggcatcaacatcttccagagatggtcaaggtgataaagaagcagacgaagagcacaagcctaaagtgcttggatcatccaccgagctcttctacttttatggaaaaacactcgagcaatttgctcgtttcaggtatgttcctctaatctctctatgcttttcttcacttaaacacgtgtgcttgtctaaaatgtcgttggaatcgcttggggccatgatatctatagttgtggtgcacccatgagagatcttgtcaacgtcttcaagaaatatctcaaaatctacgctggttcgtatgttttctcatcactgcagagtacatgaattgtgacatactaacatggatatcaactttcgtttaccccaatcaatcagaggacgtccttcttgccagtttgaaaaggtatcttgtcccttcctctgattctcgatgaaaatgtgaagccttacgacacccccttttttttccctaaagagagcccatgtcacgtcgatcagctgatcgaaagtctatggaagggcgattcaatgcgtatgaattcaagaatatctgtcttgtactcaacactgcagaatactgccataccacagcggcgcaggtaatgttctttacttttcttttgctttttgcatacatcatcagtcggtatagaaaagtttaattcattccctttctttattcattcccccttttctgttattgggaattgcattagttggaagagatgagtcgagacaagatcgaggttggtcttagggatgaagtttcgtttcaagaagagaaagacctattcatctcgtgagtcatttttacattcagaactcaccttcaatctctgaccatcatcacccatccaccgtgtctgcgctatagagtgattaccacttctcttctctcactcttacgagaggtcgagaccacgatcgacccaatcacctctcagattgccaggctgccttcttggaacacaatggagaacgtttctggaccgtcaaattatgttcaggatctatgtaacgcagtggatgatgttggagacgtcgttagagaaggactcgagggaaagaaataccttcgaaacttttgcgataaggctgttgggtaagcgcttttcttttctttttctttaaaagcagggtatggatctacttgaacaacgtcattgggtgtcatcgaacagggtcgtcatgattcgattggtagctgctgttgtgagaagtcggccaattaaaaagatcggtgccgaacaagtaggtcatttgtcatctgaagatcatacttaagatcgtgtcttacgttgaggtcctttgccatgtctgtttcaagcttctactcgatttctcattgataaagaaaagtctgatggacctacccaaatttctacgcgatgatgctcgtagtatctcgtatgttccaccttgacccttttcttggctatgaatttaatcacgttgacaaagacatacctctcctctgttatattttcaaattttgtaggtcttaccaaagacatgttcagaatatcacaagcccttttgaaacgcttctcaaggtgatcttggcccctgaatcgccgccggaaggattcgttcaaaacttcctccttctggtcggcagctcatctttcaacgacttccaaaaggtaagcgatccctctttgttcgacttcaacatgtatgtcttatggaccataaccgggcgtgcctctcgatcacatatagattctggatctcaaagggacatctaggaaagatcagagccacttgctcgatatctttgtctcggtagtatcggtcaaagatgatcttcaggattcatcgttcttgacaacgatggacatggatatctcggcgcctgtaccttcgatactttccaatgcttctgctgccggttagtcttgcttacctttcttctttcttctctcccttttctgtttcgctatgtgcctattcaaataccctggttatcgcctgatcacgtcttctttcatttctggatggatgtacttagatcgcgctctgttgttcccgacaggaaattcctctgcctttggtgattctcgaggatcatcaaatgggaacgatggtgggccgggtacgggtgttggtggtcgatcatttgcattttttaggagtctgactgccagacgggataactagattgtccttcaagagacggcgatgtgattcgtcttggaggactgaccgtatctcgtgtgttgtatcatagtctgtgcatataccatcctacttgccgatctacgagatcgtttcataacatgagcctagcagacacataaaatatatatatatacgatatatacgatatatacgatatatacgacaagagagagaagagtggaaagacaggatgacgaatgaatagaagaataaagaatgaaaggaaacgctacaatagataaacacaaggattcagacgtatttaaaaggatagagatagcagaacgtcacggtctcgataactaactaactaactaattaggacgaagatacagaaagccgataggtagaaaaggcaataccagaaagaatgcgatcgtttaatcaagctacgctggcgctggcactgatgcgcgattgggcggcacgagaaacgttctggaacagcgcttccttcccttgtatcgagatgtcgccgtatggttcagattgactgagcttgactttatcctttgtgccaagtacgaggagctcaaagaagaacgcagaggcaactcggcgagatacctgttatgtccatccaattggaaaggatgatagccagggttgagacgcgccgtgtcagtttcaacctcatgatatggaatatgagaagtctatcagacagagaataaagatttacgaacccgttcatttgcagcttggaagctaacgaccttgttttcatccaaccgattgttatcatccgaaactttcagttgttgtaataacagctcgactgctcttcctttctccctctccctcgcgctcgtactctctccttcctccgtctccgggacacctagacttcgagtcagactgccacccctggagcttcgagctcttctcgcacccctggccaagtcggcctcatccacatcggagaacgcaacggaacgagctctcgaccctgctctcgatcgatcatttcttaaaacttcttcctcctcgaaatctcgtccgagagatgatcctcgaagaggggcgagatcatcgaactgatccaacgggatctcttcgtcgtccgcaaatggaggccttccgtcgtcctgctgaccacctccaaagtcctggaacatgaactcgtcaggagcaacgtagggagctcgctcgccagcagcaaatatgctgctcgctcgaccacctcgagagaccgaaggagctcgggatgaatcccttcttcgaccgagttcgacctcatcatcatcctcaccttcggtagttcgcgcccgtttggcgccttcgtctcttccttctactccagatccttctcgcctcctcgtcaagccgcccacagagaacatgaataaaccttcaagttgtccgccgaggcctttgggcccagcgtaaaagaatggctctccgccttggacttgtcgaacaggaaggaagtagccagccgggtcttttcgaatagattgtaatgcgagaacagcgctcgaagccgggatgaacttttggggtcggaggatggtggaaaggtctctgagggaagctcgagcagattgagaagcggtcgtctgtgaaccaattgggagactctctgattcgagctcggttgtggcatcgacgatgattcgaacagttttcctgcgccttacatcgtcggccgctgtgtcctgtctgttggcagcagcagcgatttgagcggctgttcgaggggtcaagttacctgctatcgatgaggtatgaagcgagctctcgagagtaggagtggacaagcgggaggctgtatcaagatgtagaacaaaatattgagcagttagaatgtctcctgcttcccgatttgatgtttaatgagcaggtaaggcaaaaacactcacaagctctgccctctcgtcccaaaccaagttcgttgagctcgtccagtcctaccccgagaccctctccataatcataatccaacccctcgcccatcagctgatcgtctccgccccgtccgagcccgaacggatcttccagctcttctctgggtgaaccaatatccaatccaaggtccatcggttctgcctcgaaatccaatgggtccaacccactaccaaacggatcacgaatgatatcgccctctccaccaaggatagaaatatctcctctttggccaccggtgactgaaccaccgaaccgtgatcccaatgactctcgagcagaacggagaggcgcggcgtctcggccgtattcaacggcagaaagcgtctcatcggcatcatcgccaacatccaactctaggtcgatatcgaaatcatgtgagttgaacccatcggagggtccgacatcgaatgagtagtgcgatcgacgcgggccggagaaggaggaaacggacaatgcgccgggttcagagaggttatttagaggcgcaaagaggtctgggaggggaacgttcctatcaggttacgttcgaggttcacagatcagacttgttgagatggatgagagagaaagcgggtagatttgagatgatggaagagacgtaccaatcaaggtcgaacccaaactctgctccgccatctaccgtgatgtcgatgttagaagctgcgagttggtcttctggcaagtccactaaggacggtcgaatttgctacacgacacgaaacttggcgttagtggttgtttctgcactggtctgagaacagaaaacgcgtccaaacaggaaggaggcgcgtaccattttcagggtgaccaaagcctcggtgcagtcatccaacagatacttggcttttcgagagtaaattctgcatactccgaggagtagctggccggacaatcgaagagccataggctccacctgatctcgaaggatatcgtctagaaagcatacatcacgaggcaagacgcgtagccaagaagcagaacggatagtaagtctcgttgagccatatcttgacgagattcttcatgttgtcccactcattcactcgtgcaccgtctccaaaccctggcaaagagcagacatgatgatatttagggaaatcaaataacatgcaggtacttactgacactctgctcaacatctacactcccgacttgcagcttcgttagcttggactccatatgggcggccagccaaaccttagccagggcccccttcttgttgaggatgaaatccgagtagatcatgttctctcggtcggctcgatacgttcacagagatttgttgtggtgtgatgtggtgtggtgtggtgtagtgtgtagagcgatagtgataagaatatgttctagctgataaaaagagacctctaagcaaagaaggcaagggaaggtcaagaatgagggaagggggaggaaaaagggctggactactaggaaggcgatcagtccgtcaaccaaatccggaacgcgacgcgtcgtgtctcttttctgttcgcgtgtcttgacgcgtcgcgtgtacgcgtccagagcctgtctcggatgacgcgtcatcggttggatacgttctcttataatttaaacaatgatcctcggactgggactcaacactgctttcacactcaacgcttctccatcttcgttcttttctgtacctacagatcttgggctggaagcctacggtatacatgagataatttggacatcttggggtgctaccgttggcttcggttcgcaagctttttatttcatcaaatcgtttcaggaatttttcgtactcactttggtttcctccatcacgacacagaccgatcgagtcaaacgtacaagatatggggctactctcctgttgtgcactaccatggtctcaccaaacctcagcggatcgttcttccttcgggcgttcatccaaagactttcataggaacagataatcttgagggcatcctgggcgaagacggttacatctacctgccattagaaaaagaggacaaagaaggatttctttggcaaaaacgaactcaagatagtggaggatggttggatattgggatgctaggtagtggtatattgatcggtcttcatagttagtgtcatcacgtcaaagatccgccgtgaggaggtgctccatacgatctgactcctggcccaacttcaggctatgatactagtacccctatatattcctcatctctgtcgaccctgtgtagctctgccccctcggcttcgacttcttgtcaacctgcccatgtcccaacgttcaaccacgtacacccctcgctatctcatgctctactgacgccttgtctgccgactatccatcctccctacgcccaaggttcgaacctatacgcccaactttctctatcggggttgacctattcgcatacacccgttcgacttgaacagttcgacggtctcggtctaatcaaactctcctcggcaggagtctactcgagtggactcacagaggccggatcgatctatgtctggggaggacgttacggctgtttagatgacgcacttgatgtcccgcttatccaaagtttgcttcatacccagcttgccgagtcgacatcgatagggaagtcaaatggggcctcaaagcaagaactaggtgcagcaacaccggcagaggaggaggaggaagagattgtagatcatctgataacaccgtttgggggagtccttcttgcactcagaaatgggttcgtcttgggatacaactttgacaaggcggacctcatgccagcctccggacaggaagtctttcgtgatacgagaggtgaatacggtcgatcggtttggagtatcgtttgggaccctaaggatggtctagaggtaaaaaatatccgagtcggcagtggtggaagtgctatcttctttgcaacgagatagctacgagatcttgttctacttcgtcacacaaattaattatcaattagatgtctgaacagagtcaactaagcatgatgaactatcatgaagaaaaagacgaagtgagcaaaagcattggaaattcaaacagtatcaagtcagagtcaaaaaggattaaagcggaagaagagaagaagacgtcaaaatgaacatgaaaccattgcagataagaaaagaaagaaagaaaaagggaaaataagaagaagtaggatgattataagcacaggggatgaggggtacacgataaatcgaaacgaataagatgagaaagatgaaagaagaaactctcggaaaagacggaaactgtagagggttttgtgttttcaattctggagaggagaagaggaacaggacgctctgcttccgatccgcacgttctgatgaatacaagatacagttctgtgacatttgttttgagcacaacaagacggtacaaaaagagaaggagtctttgcatcagcccaagcttgaagaaaggcggatgttactcgataacgtccatacgagcgaagaacgatgtacgcacctgaaacccaaacaggggctactcaagcggtaagcgccgaggatcctcttgtgctctgagagctcgtgagatattcttctggaactcgagggcaggaagccacttgtgaaattgtatgaaaagtcatcagagaaggcttgcccatgatcggcttgtacgccttctctgctcctgttggtgaccggttaagtactgttgtgtctgacgtggatgcattaatagctggagaaagggtagaagaagcggcggctggaggtgaggaagacggttggggcagcaacgaattggataaaggggatggaacccaagacttgaacttctctcggtgtttagcgatatgaggattgtttccgtttagtatcacaacatggggaggaccgggcaaagagccagtcgatgcatcggtgcttgtcgtcactgacggagcaccaggctcagtcgagaaggtggaagtagtggggggacacggcgcctgttgtgaatgatctaacggtgagctgtcgtttgagacagaaggagctatcggttcgatggaaggcgaaatcggccgaaaagtagcctgggaaaagccagcggtggacattgacttgcgcatctttttgttcgacgtggcaggagaaaacgtcggtgccaaacttgaaggtttgactatgggcaaggaagccgataccagcgctttggaaggtcgtggacggggctgagaagtggcaaataaagtttgatccgtactctttctgcgtcgcttccggtccactgttgatgaactagattcatcgacagtcaaggctaccgagttggatcgacttccgctagcagaagcccttcggaaaggtcctgctgtcggctgttccctctcgggagagaaagagcctgattttcgcttgtgcgccttggaccttcttgtctctcgagcggtattggagaaagctccgagcggtcctgagtgggaggtttcctttccgatgacgagctggacggcagggccggaggggaaaagctttggttgggggagaggtgcatagggtatataggaaggcggaatatgcctattgttctccaggtcggcttttgctgttttcaatagacattgggaaaggatgaggtgtaagtttgacgtgcctccgagagaggatggcggagtagaagaggctgaggatgaagctgaagatgaggatgagggtgttgtacgagcctgattggttgtgatgagaggggtcgggtgttgggcggacaatggtcgaacagggagggtgacagggatggcgtgggtcacacaggccggaatatcaagactgacatgactggcagggttgaaaaccgagggatcgaacggagaacctttgggtggaaggacaacaggaaacctgaatcgattgggcaccaaagtattcggcattgatgtatatatcgaagagaagccaaacgatatgggtgtgcaagtgggtatgtgttgtttgtaggttggcttttttttctttcacaaacgagttgctttgttctcgacaacacgatccagacagaaagcgaacggagcgggagaaaaaggaatagagagaacgacgaccgatgggcttcaacagaggaacgttcgaccgatgaggtgggagagagaagagcgagcaatgtaaaagaaacaaagtggaaagtgaaagaaagaaggaagaaggaggaaagaaagagaaaaaaagggcggtccgggcgtgaggtcaaagcgtgcggcccatgtttgtccggtgggtgcctggcggcgacagagaaacgggcggggcccaggcggttgcttcggcccgtgcgggtgcctgtgtctctatgacaacgcccgatccgaattcttatcaattggccttttgcttgtctgattaaactttcaatgctgtgctcaacgagcattgtgatcacgccacggctcagcccgtatctgacgccacatccacgccacacccacccacacaatacatcgcatacaatggaatcaagtgctacattcaatgtggagttgtacagtactctagagtcgatttggaactcagtttccgggaatagggttaaccttgacctcttggtcctcctctgtgatggttggatgcgttccgtgtcagcgatgattcttcatacatgcgcaacaagagtacatgtgtcttaccgatagattcaatcagatcgtggctcttcaagtcgctggcaagattctcgggaagagacgcagaggcatacttcagaatagctgttgtgtatagagagaatagaatgtaattgagtcacgtaatcggagcagatatcaccccttttcggttttacatgtagaacgaacaggagtcatgcttcttcttgtgaacagtcgaacctagggagcatgtcatccaggttagtccggaacaaagccaaataccgagatgtcaaactacagcaaaggaaaacttaccctggccctcaatgtccttgtaaaaagcctcgatatcctcggtcttggcggaatccttgaaggtaacgatgtagttctgggctgtatgcgtcaagtccaggacgaaacaaagagtaggacatgagatcccagttcgtccacaccatacggatctatctgtacgaaccaggcatggcagcaaacgattgaaataagaataagttgaagagaaggaagacggggaagagagatcttttgattgacagaatggcgggcaaagtagcgagatggacgggactgttgaggtggaagtttgggagaactgctttctcattcttatcgcacggcacatggcgagcaactcgaacgaagcggacgtcatatataatttaaccctaaccttcacttacgtaatgcttaaacttccccaccttcttattcatttcaccacacgatctactcagccactgctctactttctaaacctcagccagatggatgtatcatctccgatctacattctacgtatacctccagaggttagcacaacattcctcatcgaaatggtatttattctgtgctaagctcactccgtgttcaccgctcttgcgatcttcaattacagctatgggactatattctttctttcatccctgagcctcacctacaaaggaccgcactctccctactctccgtgtttccgaacgtctcaatctctgaccgacatctctggaaaaacctggtggttgccaggtcagaacaactaccagcgctctatctgattattagagaactcgataaacgtcggcagttcagacccggtctgatcgatgatgattctgaaacagaggatgaggacacgtggataaatttcggtcctgctttgtcgacaagtttcgagatgcgaagctggtgagccttctatcttccgtgcttctgacttctattcttctcctccttgccttaaacttctcgaggaactttttctctttggagtaaagttgttcaattggaagctcaacccttcttctgtcatgctgctttcggtatgatctataggaaaggcaacgccgacgcgctagtcaacattcttcatctgcttccaaacctggaggctatacgattgcgcataggaacgaactttaatccggaagtgagtgtctctgttccaggctcaatcataattcgttgaacagaagttcattctttcaactgcccaccatcctcaaatccgtcgtccggagcagcatcttgaagatatatttttgacccctcggccgaaactgcagtccatcaaccttcggttccgaccttatgtcaacacggtctcgtatcatcaatttctttctggcatctattacgatactttcatcgatcttctcgcctcttggactgtcacacctgcaaatcaacctcttcggtcgctcagccttgttcaggatgttccacctcgacatctagtcgatccaagagctccacgaccggcagaaaacaacgcttccaaggaggacgcaaaggaaaaggagagagtacaaggaaaaggaggctatactggccatggtccgttcaactatttgagtgaggctttgcaaagctttcaaccaaagatatttgcccaaccgtgagtagatatgatcatctcgggcgctcggcctctgggcatatgtatcgtacattcactcctacactgcccttcactgatcttaattttcattttattttatacatctcatcctccttctatagaatcgtttttttcaacacaatgtgtatcaccagactatccctttcacttctcactaaaatgactactcatttgcgacttcggattccccaaaaggatattatctcacccatcaccacctcggccttaagttttccatcgctacaatttcttgatgtgtccacctccaacatccggctgcataccaatatacccaccttacttaggacgtatccaaatcttcaacatctcatcatggatcatacaaatctgtttggttttttgggaaacgacaaggaaagaggaaaagaatgttgccatgagctcggcaggctgttggtgatgagcggaatgaaccgagggaaagaggtcgagcgttcgatcggaaactgggaaaaggaggaatcgtttagagcaactagaaggcgagaccaagatgtaactgaaacgtcaaacacaaacggcccacagaccacaccagaaagatctgtctccaatgatatcgatcgcatggccgatcgactagaagctctcaccactatggactacaatctcaacgcatcgtctcgggaacgaagacgaggggtccgaccgatgggaatctcttcattctctatccgttcatccaattcgagctcttcgacgaacaatcttgcccgaacggctctctcgaacgccacaacatcttctcatcacgacaattcgctttctactccaacttcgatcaactacgttcttccctcaatccctgtcctccggtcagtttctctcggaggcgaagccatactgacatcatctcagagaaaagaatggacaagcgagttcaagcgaggttggaaggaaggtctagaaaaaatcgtggagtgggctcttggcggagtaggtgagaggtacgaacgtagtcggaggaaagccgagaaggacagagtggaatgggagaagtggctgaccacccaggccaccggtgggaggcaaacagacagtccactagaagatcgttctacaggggctcctgtaacgaacgggaagggtaaagggaaagcgcacacaatatcttcatccaagatatctggttctgcagtaccaaagccgcctcctcaagtcaatctgtatcgattcccaacccctgccgaacgagcgtcccttcctccgttcgacccttcggccaatccgacatctcaactggttctcatatcgggtgattcaactgaagactggcgatccacctatgccgatcttctttcgagggatgtaagctgcgtattttgtacagtcccggaggatccgaccggtggtcctcttcgacgcggaggggagaatctcgtcaggctttctcatgggggcaccgagtctgctggtagtgggagcgtttcgggaagtactctacctagtggagtgggaacccccagaagttgggtaggaggatatcagttcgaagaagaagatcaagtggaagacaatgttgtagatagacatcctaacggctgtggccatgcgataggaaaagacgtctgggaagattggggcgactgagatgatctgttttcatttagcctcatctcacaagtacctatggttgagcgcgtgatgaccttattatacagtcatccatctataagattccggtggtcgacgatggaagatacgggcccaccatcctttttgtttttgctcatcaatgaatgaatcgctgtctgcacagcatgcgcgttaacgataaacagggtgaatagagaggcaagtcatgcatatatcaccaatggcgagagctggtatctgaacgacgaatttttctggctactgagagagaaagaagagaaaaaggaaggaggggagatatggcaactctgtagtcccactatgtctctggtttgcaaagaaacaagaaataagtaaagctggaaatggtatgaatcgagggaaagctgacgagcttatgtgtattgatgcgatacaatcgtccatttaaaaaagaggggaatggatgatcctgaagaagaagaaaactggagagaagagagagaagaagtgtccaacaggagatgctaaaattcaacttagagagcgacggcgccagcaccaaccacaacggctccgaggacaaggagaccagcttggaaggagaaggcagagccctgtcgaagagaagctcctgatacagcagaggagacagaggctgtggagacgattcgttgagagtgtgatacatcacatgtatttgtgagagactggcaatgtgaactaaaacgcagagaattacttacaagcagcagtagaggctttggtagaagcagaagctaccacggaaccagatgaggctcgggcagagctggcagcagatgatgcggaggcgacagccgatccagaggacgaggctaattggaagatagatgcaaaaaaagacgaacataattagtctcttatcaagtttagagaagcataatgtgatcgattttcttacccttagatgtagaagacgctgaagcggtggcggcagcgacaagaccggtaattccgttggaaatcgacgagacggttcggcagttagacaccgaaggggtggagtaggcggcagaaggggtttcggttctttagagacgtagatagataagcaagaagattccaccaaaatcagcaccgctctagggtttcgaaaaagtttctaaaagactcacactccgatagtgatgggcgttccagtcccggtgatggtgaactataaacatttgaatgatccatcagctgacgaagctacacctagaactgaacaagtctatgacttactcgctggtggaacgtggaagtggtggtggcaggcgatccgacagggtagacaccagggggctggggtacatcagagtcacactcggtaaaggtcccattgatggtcccgtaatcggcgggctgagaaagttgtgaatgttcggacattgattatttatagtctttgcgtataactagtcgcgattcaacataccatgatccagtagcatcccatcaagtcaagttcgtgctggcacatgatagcagcagagatggtgtcattctgtccaatacactctcggatgcagaactgatcgaaactcatgaaagccatccactcctcgtaattgacgtcttgtccggtaacgttgctagtgaggttaccacccacagggtttcctgaatgcaagaacacgatattcagtcatcaacagaatagcctctgcaaaacaaggttccggacaatcaacctaccttctccggtggcaccgtggggatcaagctctcctccagcgtctccatccctaatgatcaataagaagcgatgatcaaaaactgactgaaaaggtaaagtttctgaatgggctctcacatgatattgatcttcgttccgtcgaggaaaccgacgacctggacatagaagtcgttcttggtgaattgagctccgtagatggtaccctgtgacgatattaaggatcgaggtcggtagcagaaaccatgtcagattgagaagaacatcaaacttgacgaaagatcgtgtcgatcaacacgaaacgtacgtcagggataactcgagcgttgtttcgaggctctggaaggacatgaaacggggcgagtcatcagacgataaacatagagagaagcacgagatgttgtgatctttcttactggtacacctgttatgaaagtattcaagggggaagaatcattagacaaggccttgtttttgagaggaacacggtgtgaattcaagttactgaccaagctacgacctcggcctcctggtcgccgatggttcctccaggtctgtatcacgagcaaagaagtctttgttagaaaatatcaacaaggggcaaaggcatacaaaaagacacactcactcggcaggcgcaaagagacagaaatcatcaaccgagttgatagaagccaatcgggacacagaggtctggttgacagcggtacccaaagtaggagtagcagctgaaagaaaacggcgaacagagatggatgacggttagtcacctcgagaagagtgatcgacgggctcagattcaagggcgcgcccgtttcttcttctcgggaacaggagattctggactcacggttggtaactcccatggttcctgagacgcgtggaaaatcaacaaagtatcatcacaattatgtgcgcgtgcatcgcatacacatgttacgagtttgagagacacagacagcagaaaacgacatcggtttttctagttagcaaaaagctatcaccaagacgagaatgaaaaagagagaggaacagcgacaagaaatcaaagaaaaaagaaaaagaaaaagaaaaagaaaagagagtggaggaaaacaagagaatgtgaagagaaggtgaagagaaacgatgaaagtaagagaaatgatgggaaagaaatcagggcgaaccggtagcggtaacctgagcagagaccatcttggcggcgatagctccagagagcacgagggaggacgcgatggagagcatgactgagagaaacgagagttgaggagagacgagtgtggatagagccaagagagtggagaggaagaggagaaagtcgatggggaagaaaaacaaggagaggagagaaaggatgaacgcaaaagaaagaggaaagagtgattagtttgaaaaaggccaaggtgacatatttatttaaaaatagaacaagtcttggcgaggacttgtttcgatccttgaatcacgatcgtgatagtgtgttacaaagtgggtgactggtacagagttgagcgcaaaaatggatgtttaggcttctatccggtttactgaagacaaggagaacgaggtgaacggacgacaggatacaagaaacaaaaccgatagaacgtaaacgactagaacgcatttctctaaaggagtatacaaggagagaattaacaaagcctcagcctcaagtttctatgctagattggatgaggaagcgtcccttcacatactatcctaaagcttcgacagcgatatatgaaaatccgatagcgaggcatatggtcctcccgcaaaagactgtgtctacgaaaaacatagccacataaaagggtcgagttccgcaacccgatgtgccacacacagtaaacacgccaagttcagtttgcaccattgatgaaactcttgttgattagtcagctatggcacgttcctatgtgtgtttctcaattacgatataacatgattatagagttgtaaagctatcaaacacaattaaaaaatcccttcagctcgctcgggccaaagcaccggttccgttatggaaaatatcctgggtccccagaagaaatcatgaacacaagagagagcgaatcgattcaacccgccattctctagtcaacaaataaacgaaagtgaaagctcaccttgtaaattcctctgaagatccttgccagttcttgcctgctttcgtagaggggataaagaaccacgatgaaagccgcgacctgaagtggagggcactcgtatcagcttacgagacaccaaacgaaagacgtggacacttatcagaataagttacttacgaacgaccaggtcacactaacggcaacccaagcggtgaaacctttaacaggatatacgtatccacttgcaaaaagcgggatcgggacgagctaaatttcgacgtgcgacacaaagtgataagatataagtgcatgattgggtcacacacttgaactggaagtaatacactagatacttacaataatgaagaccaagaacaaagtgaccgatgcgtagacagcaaacttaaaggctttgttcagtccatggaagtcaatctctggtagttcaaccctcaaatccttcgcattcttcaccgtcgatatactctctaccactttttcatcgttctctccaaaagactctttctcggcattttcctcaaccaacggttcagaaacaatctcctcgttcttcgaatccatcgctgccacggtggagtgaagaacgatgtcatagttcagcgccctggtgatgtcaaagtcgaagtcctccgggtccacgagggaccagaccagactgacgaccgccccaactccaagagccacgcagtttcctgccaacatcgggtaatcttgaccagtcgtgtcaatcgtgactacacctccattcagcttcgcagcggtcacgagccaggcaacgagaccaagagcgagacccgcaatcgatccgaccgtgcaacccgttcggttagccttcttccaactcgtggctaaggcgactggaacgacagaagatccaatgatcgttcccatcacttttgaaaacgagcgtagacacaacatggcaaacgataagaacacgatgatcttgctatgttaagacttccgcggatagtcaagcaaattcacactcacattcgtacaagtagcctgtgtagcgattttgttgaaatattagcaactattttttctcctcaagcaaacatcaaaaacgaagagaacaagactactcacccatagaaataccaatgtagtaaaaagcgacaccaagtacacccatcatgatagccgcaaatgcgaccatcgcctgtgagaacctaaggatctgcgcctcattggcattcttgttaatgtgacgtttataaatgtcgtatgtcaggacagaagaaacagcaaccaattctccagcagtagcggatgtgacggcaagctgaaaggatataggcacaagatgtatgagatcagtactgttccagaagagcccaacaggaaagcaactactaaacataaaagaaagaggttcatgacatacgaaaagaaggatcaacattgctaccgcacctccttttccaagtagcgcagcagcggcagtgggagcaggaagtccagcagagacctgggcggcggtaagaggaacttcaagcgcgaccgcagccaatccgagagttgtcgacagagtaaacggaatggcaaaccaggcaagaccacccaatagatacgccttcacagcggtctgtggggtactggcgatggctcgttgccaatatgcttgatcattaaagacagtaccaaagtttccgacaatgttgagaacgccgaagatgataccgcccgtactcctcatagtcacgtacgagccgccggcgtttcgagctaccggagttttggcggaaacgttcgccagcatctcgtacatcttggcgggcgaacctagatcgatcgtacgtaaatggatgggtatacatcaggcctcgcctttgatttcttgatgtcgatcaagagagcgatatctcaccaatcttatcagatgttccataggtcacgaagacaaagagcaaaagaatgatatagaggatggcagtgtgggtgtagtccgcgatcaacgtagctttgggttgaattatgacgcgtacgcagaaagggtcgttagaatatgatgtctcaacattgatgaaaatgagaaaaagagagtgtgggcaatacatacatctcatgcctccaatccagacataaagagcaacacccaaggggatcaagaagcaagcggcctgggtcgacattccagtcaaatcgcttacggttgcgcttcctcccaaaacaagcatggtcctgagagagcgagaaaacgtaacaacttaagaactgtaagtgacgaggaggaaatatttagagcaaagaatctactcacgagacgatgatgttacaagcgagagcaaaaaataagaagatagagtggacgaaggaccccttccatcgacaaccaataatctataagaaaaagagaatatttgttttcagcacttagtcctctattgagatagtcggttgatcatctcagtaagagataccaacctcaaggaaggtgtgggcgtagggcgcgttgagcttaagcttagcagctagctgagcaaacagcaaaacttgcacagtggctccagaagcgtaccagtatgtgccggagataccaaacttgtaagcgacagcactgctctgaagcagagtggcagcccactatgtgcgacattccaagacaagatattcatatcagcgcgagcaaaatagaaagaaggacaagaaaagttgagtgtttttaaaacacgtcatgactcacagtccaggcggagacgataccctgcgcatagatcaatgagtcgatcgtgtaaaatcagtgacgcccgaaagctagacgaagagaacagtgagatgtacggaccgtagcaatcagtcccggctttacggatctagaagcagatgagaattcttcggcactttcagaggctgtagacgtgtatcgccgttgctgtaggatataaaggatgcatgagtacaatgaagagcgttccgcaaagatacactctgagttgtccgcttaccatgaaagtgatgcccatctaagagttgaaacatccagagatcagtatagttaccctgactggcgattatgatgtgcataatataacattgaaactatagctactcgatacttaccatgcaagctgagaagaagagacccatgccacaaacgatcccatagcccactccttgggagagaacaggcgtgtcagacattcaaagaactgatgaaaggagaagaaggtaagaatagaaggagagacaagatctagttcggaaagtaaagagaaaagctatccagatgtaaagctgaccgaagcaacccttcttgtaagaaatcagcccattgaatggataagactgagcttcctccaaatatcgaaaaagcatgaagaaaagaagtgaccacattgatacaatgctaaaaagtggtagagataagaattgataagggaagcttcgactgcgcgatagttaaaatcaaatcaatccaaagcaacgcctgcttaaaccgaggatttcctaacgtaagcaaagtggcttatggtctcgtgagcatatgcgatagacacggactactgagataggccaaccgtttgagcatgaaagatacagatgataaaaacaggatgataacaacaggatagaaggtagaggaagatcaagacctgcaaggcagaataagacttttttttcattgatttaaaaatcagagcgaaccttcagtttgagccacatcgaacgccccgaggtggatcgttcggatcgatggtctcgacaatagttcatgagcatctctcgctcaaaaatcctttgaagaatgggcctattaactgaacatagcatgtaatgaatgggtcgatggatcgatgtctggggcaatggacaacggactgatagaacacgaagacagtgatgcgtcgtgagatgaactgcacgttcttgttttttgagctgtaaattcgtgtttcttccttcagatcctttctcattcagatctgccagtctcgacggtcttcacgctgctctcacctcgcattctcgggggttctcttggcttctcccgttctttaccgtccgacgcagaaacgtctccactggggtgcgcacatcagccaaaagcaagtgtaccacaagctggcacttcgtttatcacaacgacgtccacgtatttttctggccttcggggacggcgtattcccatcgtcttctcgtgggaatgatcctggcccggtaaaggtgctgttggccaagccgagagcccctccgctgctccagcttcgtaacgtccgggggtactggatgtcgagggcgtgcttcaagtgccatggcgagttctctggaagaagcaaaacgtgggcgctgaaagagtgtcgaagcatctgtcgagtaaatcgcgttcttcttaattctcaagctagtttctcagaatgatgtctcgggatagtgtctcgaatattgatcgttttctctgctctttgtgcttgctctcagatttggtgaaatggaaatgcccatctgtctcgcaccatactccacctagccgttcatcagaaagatgagaagcgagtatgcttgtattcggcactgctaccactgctccggtcgctaaggctgagactgttccatcgatgggacgaactagacccatggcccatgacatcttggtggtctgtggtctgagggcacttaagttcggaagggccaagtatcgaccattattggttgaagtcgatctcactggacctaaggctcaaagctgtcaaacgtcttacgaagccttcgcttctgtcaaggattgacctgagctggccttctgaagtaaagctgagatcagaatgatcctcttttcatcatcgatgggtctgtactaatattcctttttcttctgtaataacggtatttctctactccccttctctccttcctttctcttcctcccttaagctagaatttcatcatcttttccccttctttcgtgaaatcttcttttccacttgccatacaactattacgtcatctatcactgaacggaaacctgagcaatttctatacctttcaatagccttttgtagctcagagtcttcccgccataacatttcagcaaacgcggttcataggggcttcagactatacaatacattctcagataacagagacagtaacggtgaaagctgagggggaaagaaaaggcgcgaaggtagagagaaagatttcacagatagttgacgagaagaaaagctaactaagtaagagataggtactgatgctacacaaatcaaatatctccaacaccttctcctcccaaacctcttcagaacgagagttggtattgtagatctcagcccatcaccgatcctcgtctgttgttttcaaggcgtcttgtttgcttgggccattcatttactttgccgaaacacaaaactcttaacttcaaaacttgaaaggcgatacttcccgaggaaagcagcctgttctcccctcgttcccctagcctattcaacatcttcatcttcatccgtcgaaacaagttcgactatttgcacctgagggtcacccatccgcctcttggggaccatagtcatgccccaaagctcaagacaggcgaacaaagtggaaaccaaagtcggttcatcattcatgctcttctgtcaacatatatcgttctcaaaagctgataatcataaatattgctcatctgtctgtgatccagtacaatgttactacagattgtaggccttctttctttctgttaacttggatagaattctttcactcactctcgtctgaatcttccgctcataactcaatctgatcagttcctgacctaggccttcatgcggcagccatctcgggcaactatggcctcgctcactacgctcttactaacggacagccagtacgcccaacttcactttcttcctttctcatcctacaaccaaggtctctttagatcgagagcgaagtgctaagcttctattatttcccattaaaggaaaattctgttcttcacgggttgcttcctctgcatgcagcttgctcgggaggttctgagcctgtagttcgattgctgctcgataggggggctgacgtcaacgcgccaaggttggtatagcttattgataactttctactactccggacactgaccgaatgtatatccttatgttttccaaccttaggctgcctcgtaggtacagtaatgaaacgaggaaagcacctagcgtaggagtatctggtaagattagcttccttgtagcagtattttagtcacttgttgagatgcactgtctaatctggcatcattcaggatccggcccccttcatttcgcagctgcaaacggccactttgaaattgttaagctacttctctccaagggtgcaatctacaacaaactcgataagcatggccttacgccagaggatcttgcctatgccaacggacatgacgatatcgtctctgccctccgagcctgggaaactcttcaaaacagtatgcgggaaagagatgattcagatgggacacctgctatagcagaagagggctcgttgtttactcacgctgctcctcggccgaagtcacgggtcggttctgttgggagtgtgaagagaggaatcgagaacatcgtccacagaagctcacgaagagctagctcgggcactttcacctcggatatacatctacctaactctccctccgacctgctgtccctccgaaacttatccaaattgtcaatcacctctctctccccctctgaatcagctctgtctacccactctcctactgaccctccatcccgccgactagccactgaccctccgccgactcctctgcctgcacatatcattcagccccgtcagcgtagaccttctctgccatctatcattgagaaggcggccttccacgtgtctcactcgaaacagcacgggtatgatcctactccgtccattggtagatcaagatcaaagagatcgattgtgtccgatacagattctcggtcggccagcagctctaaaaaaaccaccagccataaatctctccttcatcttttctctcatcgctctagtcaggtcgttcctcatgtcgaagatgagttccagtcggacggttcacaatcctccttaccttccaatgccccatctcgaacggatgatgacagaagcctgttcaatacaatcaacgctttcaccaagaaaagttttcagccagcatctccccggggaggctctcttgatttgccccaagccgctcgaatcgatgaagaggatcttgcagaaggcagacactggatctcaaaccctcccccctcggctccggctgtacgaaccacattcttcccatcctctcctatcatccctcaatctgcatcctcttctttgtcttccactgctccgggcataaatttcagaatggataggactacgtcccggagatccagtttttccgcaccttcgccggacccttctgactacgaaagtggcttaggagaacgttcctggaatcaaaacaccagtggaggagctataaagttcagtgaggctgcctcgaggtctccattaggattagggtggtccactacagatttaaaccgacattctcatgttgacaatagttttgctggataccgtcgatcgatctcgggagagtcggcgccccgtcgaggcgatgccaaaggaaaaggacgagctagctcgtacagcgatggagatagtcaaaaatacctttcatcttcttcggccaatgaaggctcttattatcacgcctctccaatctcttccgaacctcactttcactttgtcaagccaacatcaccctggctatcattgtcctcccgaaaccatgagtacgactccgatcggggaacgccggtccgatccgtcttggaacggtccttcacagcaaacagtggcttcagttcggatggctcttcccttcggagagtagcatcagccaatctcagacgaaactctttccacgaatcatcaaaaacttacagcctgtccacaaccagtctcggcgacgctgcttctggattcacagcaatatcaagcggaccctctcatcatacaagtaggggagtgaagagcccaagatcaagtttttatggtcctaaacgcccgaaaagtctcacacttactgatttgagggatggtgactcaggtgtcaggggctttgaatcccctttgaccttaaatcactctccaagcttgtccaaagatacctctgcgtcagaagactatgcagctcccatcatacttgtttcggatacatctacaagaactggacggccccgcaacatcagcatttcctcagtttcctccgttggatctacgaagggagggcctacatattcaccttcatccagtgccacaaattttaccaacccgtcatttctctcgtccggagcacccagcacctcatctggaggagctccctctatcccttccgttcccgagaatcctcttacgtctcccacagatttcttgcaacaactatacacatctagatcagaagcttcgcttgccatttccagagaggaggctcatcaattggtcgagcaagcggagagagcaatccttgctgtgaaccgtaactcggtcgacggggcgaccgtgtcactctcagctcagctagcagcatacggagagaagcttgctctggaacgatctcttgcgcaaggcgaactgcacgagacgcgagatccgaaagaggcttcagatcgtagagacgagacagttcctactagaagcttcaaatccactttcatatcgccatcaggctcggtcacggttgattccccacacggatcggagaacgaggacccaatccgttcaggcagaaatgacactgatgatactctcaaggccgagagaatttcttctgataccgagttggaggggtcttcttcatttgtttcgacaaaactgccatctgttttcacaccagcaatttccaacaccatgccaacggctctgaattcaccagcctctagtttgagttcgaactttgtatctcgagcaaagatgagccaacaaacaaaagatcgaagagcatccaacaaatgtaagtagccactttgtttgaatttcgatcagcaaactaaactaacgggccgtgttcattggttttctgcattgtaatgtaagctcacaagaagcaatcagcttctacccctctgacccatgtcgcttccacctctctctctccgtcctcggtaccgggcctgcccaatgtctcccaaatctatgtgaatcgtgctgaggctttgcgaaagaaaggaatagagattacatctgctgtctcttctcccttggcgtatccaatatccccttccatccggaagggaactagctcctcaaattcaaaacctttcgatgacgacaatcaagtatggattatctctggacacaaaccgagcacctttatctcaacggtgccatccaagtggggtataccaccaggatccaaatctaacactcgaggacaattgccgttttccaagcccttcaatggaagtcccactaaagatttgaagacccatcgtaaattgagtgactccacaacttcgaacagacctctttcaggcaccggttcatcagtcacggctgtatcgtctattcatccaaatcaactttcttccaacaccccctctgtattaaaattcgcgagcaatcaacaccgtggttcgcctcggtcttcgcctctacactctccgattccttctcctcgtagtacacctcgacaatcccccaggaattctatctcgctctctataccttccggatcaaatcgtacttcctctgagctgatgagccaagagaaggatcataagctagatcaactgagaagctctaatgatgaggggaacacagtcggcaatcgaaatgttgggttgcatcatgatctcgaaaacgataatgggatgggtctgcccgacggatcatctcgaaagaaacatggttgggggtcgcgattcttcggaataaaccgcaagagttcttaaactgtttgttgttcagcatgtatttctcttcaggctgttgcatgatctacctcaacactcccaacaagataatttttgcattataaaaaaataacattgccgcactcttctcgttttgtttcgatcgtatatatcgatgtccctgctttaagaagacctatcttctgattagcgttaacggcactgatccgagttcctgacataaatcgacaataatatccaacttgctaaatcctgcttccttgaatcaattcagttctgagaacagtatgaagtcatgagacgatgatagagtaaaaaaagagaagaaaaagaaaaagttgatgaagacgagattcgaactcgcgccacgaatgactgcgaaacacggtcgataaacctgaacacagcgccttagaccactcggccacttcacctgatgtctttatacaagcaaacataactcggtttggaagacaaaccttacctcacagtttcaatcttacagacaccatgttattttgtttgatctcaagatggcgatgaacatcattctgcagtacaagagaatgtgtcatcatcgtagtagaagtgcggaggttcacaaggaataaattccccgggatcgacaaatagactcatatcagcgtccgattccaagattgatgtagagcgattgcggtgaaggcaagggatcaatactgctttccatcatgatcactgttgaacatctttagatagttcggaggtcttaacgccgtctcggtgttactttctccgagccttcttctgtccctccttgtcctctctcttcagtctcccttggcactttccctcatacaacatagggaacagccatgctgtcttcgtttccctcaacttctcttatcagcatggacggacgttgatcaacgggttaaaaaaaacaggatgtaacctatcttttcctccattcatttcccttatcccctttctacgataaccactctttacttttctccctatcgcacatgacttcttttactcacaccaccacccgcatggctgcagttcaggctgagcccgtgagttaatagaccgctcggtagatgttgcgattaatgtgcctgactgcgttccattccttcatctaattatttaggtctggggcgaccttcagggatctgttcgtaagacggttgccctcattgaagaggcagcatccaagggcatcaaagttctcgtcttccccgaactctggctgcctggatatccgttctgaatctggttccttgctccttccctgtggggtgacttgtggaaaaactaccttgcaaacggcctcaagacagactccgaagagatgaacacgatccgacgagcgtgtgctgcgaacgacatctgggtgagtaatgattagtccactctggaccttacttatataatcattgacaccttcggaatacataacaaccatttctacaggtccttgtcggttatgccgagaagaagggttcaagcatgtggatgtcaacgagctggatcaacaaccaggtaagcttccgtgtgttgccctctgttgtcctatcgatcatctttctaactctgctttctcgcctattcatctacttatcttcacttgtctctgctggtctctcatgacttcctcttttcagggcgaggtcgtcggtcatcgacgcaaactgcagcccacgggtgtcgagcgtgtcatctttggcaatgcttcgggcgatacggtcaacaatgtcattgaatctcccttcggtcgtttaggttcactgcagtgctggtgagtcgtctactgattagctgcctatcgataattttcaagctaagctagagtttaattgcacgcaacagggagcatgctcagccgctactgaagtaccacacggcctctctccgtatgtacagacttcttctttgttagccgaactgcagtaaattgatttctcttaatctacacacacagatgagcaaatccacgctgcatcatggccatgtctctttccacacatgggcccagagcattctggcatgtcgaaggagggaacacttgctttgaatcaagcatatagcatggagactggcgccttctcgcttgttgcaacctgtgtaatgacagaggcaggagccaagtcgatgggttttacacctgagatgttggcggtctcgtttcttgccttgccgggtggaggtgccagtcgtatcattggaccggacggaagagtgcttgcaggagcggacctgcctggtgatactgagacccttctcacttacgacatcgatctggctgagatcgaggttgcaaagcagctcatggactgtgtaggacactattctcgaccggatgtgttccggtaagtcgcactgatcattctctattctttgtgattgtctgctgattctgactctgcatattgtagacttcaagttgccaaccaacacaatgcgccggtccactatcattctatcaattcaaagaatcttcccttgccggctccgattcaggggtttccaactctcgttcagaagtcctccactgagagttcattcgacttggtcgatgcaactagcttgatggctgacgcataatctgggtactattccttcctcactctattttgtgcttttcttgttgtagtttgatgtatgtacggatttcttaatcaccaaagccatgcatactacaggcagattgcaacatagacactggattaaataaaatatgaatagggaagatcgacggtcatctcgaactgatgcccacgcctcgcgaggaaacaacagtaaaaaatgaacaaaagagaatggacaaaagagagtaataaagtggacccagcagggattgaacccgcggcctttcgcatgcaaagcgaatgtgataccactacaccataagcccgtgtgggatggaggcgtggtgtgtcgg

SEQ ID NO: 2464 - DNA, 309 bp, Xanthophyllomyces dendrorhous
  misc_feature (184)..(193): n is a, c, g, or t
acaagctgtttccttctactgtccatcatttatatctctcctcttcttcactctatgcggtcctcgtgatcacgaatgtatatagtctcttcatatgtatatacctacttgcgggccagatgcgcgagacgtcccgacatataaggggacgctctcgcgccttattgatgagagttttcctcannnnnnnnnngcaggagaaacaacagaaccaaaagaaggttaccgaggtgtaacactcaggtcacatccctgacaatgtcaggggtgcgggttaagtaacacgtgtttcgcagcttgtgttactac

SEQ ID NO: 2465 - DNA, 488 bp, Xanthophyllomyces dendrorhous
caagtagcgcagtggaagcgcgccgggctcataacccggaggtcgcctgatcgagacgggccttggcaacattgtctttttgctcgttttccctcggttttttccctggcccccgtccggccgtccgtgctggaggcctgcaagccggccgcatggtgccaccgtctgtacggccagccagccgggcgctcgacataccctctgggcacggaggccccgggcaagcgacccattagctcagttggtagcagcgcaagattccaaatcttgaggtcatccgttcaagtcgggtatgggtctttttttgttttcccgcccgtctgcctgccccaccacagggagctgtgtcgacctggctcgaccgtggtggacacgcgcacacaggccagaccggtcggacagacagtgacccacacaacggccgatagaaacagagtgcagagagagcgtgcagagaaaaagaagggcaaaaaggagggcaaaaaaga

SEQ ID NO: 2466 - DNA, 347 bp, Xanthophyllomyces dendrorhous; identical to SEQ ID NO: 192

SEQ ID NO: 2467 - DNA, 312 bp, Xanthophyllomyces dendrorhous
aacactagacacgtcagatctcgatcacccatggactgcactagacgacgcactcaccgaggcggttctcctcatccggaactctccccgtcgactcgacaccgacagagccatcatccagctcccacccggttcggcggcctcggtgtgctctcgttcgccgacgtcgccccactcgcctatcaggccgcaaacgaggcagcagacaccatcatcgcacccatcctcggcggctttgacatgtcggacgtccagccaatgtcccaaagggctagaacaaacagcatggtcgaacacaagctgagcattctc

SEQ ID NO: 2468 - DNA, 441 bp, Xanthophyllomyces dendrorhous
aacatcatccccttcacctcctcgctccctcagagacgtccacatcgccgccggtctccacttcctcaccttctgccccggccggtccgacctctgcaacagctgccaccaccagaaccactacggacacgacgaggtctgccacggccgcaacccagacaccctcgctagacacggcaacatcaagcggttagtacacaagtcgctcgctgcgaacagcatgttcaacgtagagaacgaaccacttgtccctggcacctccatgcggaccgatctccggatcacttcgcccgacggtgtcgtcgagatcgacgtcgctgtagtctcgatcgcatccgacgccgcacgagagatcgccagacggacccatctgtacccacaggccgccaaacaaaacagatcagcctttgccactcggttcgccagacggaacgacccgcc

SEQ ID NO: 2469 - DNA, 3529 bp, Xanthophyllomyces dendrorhous
gctgggccccgtaaacaccgagaacattaagtatcgaataagaagtgtacgcccctggcaaaaccgaagtcaagttgcacaaggcgcaaggattcagtcggccgtgtggatactcaacccgtttgagagaacgaccgcattcatagaataagcctattttgccttagcctattaaaatgagatccaggccagctagcagaccactcacaaatacatcacgataaatggtcgcacttttcatcctaggttctcgttccattcaaaacccactagtctaggataaggcatgggggcatgcattgatatatatctgtgcgtgatgtgctagctaggtagcatagtagctgtgtgctgtatgaagtgtgaatgaagaccgatattgcgatgtgatgacctgtagaaggacgaaagaaagtgaatggcagggtagagattcgtcatgattttatccgaagccaatttacatcggcgacttatttgccttagtctgcagaaatgcatgggctgctttaatttcttgttacctcgtgaatccatacttaccttcctttctttctttctacaatcatgaccttgttcatgaaacgtgactaacatctcccctgactgattcaatgctaacaatgagcttagcatcattatcccatctgacatggtctctttcgttgccgatttccatctgactcgtcgaaatacagacttcgagtgtgagatgtcagggacggacaaactgagaactgatgaaagtggaacagatatgctgttgccttccaatgtgacaaaggttgtttcggcttgttcctacttcttctctttgcattcttgtctcgaaactgatggcgatcaagaaatagcatattcatctttttctttatttagccattctggtttgtctgagatctaggcagatttctttctcgttcggatgtctatctaacactctcgtcgctttgttgatcaggtcaagcctcgctttctttgtgaagctcgagcctaacggcaagtcatgattctcacagtcagcctccttactcgtctaccatgacgcttctctcctcgtcttctttccttgcgctcccatgcttctgatttggcctcggttctctagctttgttccttttctcgttccaacaggcttcttgatgttttctgctttctgttcgtttccgtatattgcccaactctttcattcatttcttcgcttttcttgatcttcgttttgaaaatctgacgtcacctcaaccctcttcgttggtgaccttctcgtctgtttcctactgctttactttttccgcaaactaccgaccttctcgaatttatgttaccagcagacatccagtagatcattctaacactcgacctatctttggactcatgtatcagaacgcaaggtaagtaatgaacattagagtgaatgatctcaggttggaagagcaccatatcgatctgaagaaagatgcgtatttcaatttctgattggctcgcgtctgagtaagggcgataagtatcaaatgaaggactgcatcctgacgatcgagaaatgataagataggtgaggtgaaccgtgacaaatgtcgttctgtgttttgacttcgatttgactagccatctggccctgccttggccagcagtcgccgaagcgcattgatagacctgatgagccttggcggtcggtgatgaacaatttatggatccttacccttctacttaaagttcttcaattcatcattcttcctaaaaatgaaaataaaatccaaaaaccatccacaacgatgagtagtgccgtcacaagagctaccaatcaagttgagtcgttgatcatcaagaatcggcgcaaattttagacacttaaatctaaattatagctgatatccggtctatctcatcggccatcgctcaaaaactgcaacaaggtcactcaattgtcttactccgacaagctggtttcacagatcctgtcgtctccctatcagtatcactgaatgcgggaatatttctcaacatctcagctgattaaacaggtgatgaagtgatttcctcccttctgtcctctctttgtatttgttccgtctttttggcactgtcctcgctggcaagatcacaaagcttcggataaagttatggaatgatagcacgtatacttgctagctcatcacgctttctcttctctgtgaaattttctctcgtttgtactctacagtcgttctcaaatgatccttgcgccctgcaatttactatgtaatttgatctcttgtgttccctgcgtattgcccaattttatcacctactctgctgagtacaatagcatggtcaattgttcttcataagtttatgatacagtaatgcttatatggtcatgatggagctgtctgtacgtttctatgcgtttaccatcttgtcctttatactctccacatcatatccggatacgttggaaacaggacgcactcttctattctagctaacagagcacgggaacgacaactatactcctctacagtccaatctaagaaaatcataaacatcctttctaattctagatgctcctctgacatccaaagttctatcaatgggtaatcatcgtccaatgtcacaaatgacaccaggccgcaaaatctaccaaatagtcaaatcgttcacttcatatctggaggaagcgctccgtgcttcttgatctgttcgatcacactgctcataccccatgcgaacagtcaagtcgaaaccggaagtgaagacagaagttagatcctcgtccacacattcgtccatatatgttcgtcacacacgcatcacacgaacaaggacacagaaagatgaacccctggaaggataggcacaaaaaaactcactctgaggacgtgttcggtccgaccttgagccccctcatcgtcggctctctctccaggttcctgtccagccatgccttcactcccgtcggaatctccacatgatcgatccccgcgaacggtgaccaaaacacccagggaagcgcgtttgcgtctgcgatcgagtacttacctcttcccggaccgaccagatagtctctgttccggagcctggtatcgagcaccgagtacagtcgtttggtctcatcttggtacctcttgatggcctgtttcgagagatcagtgcgtcagcacctactatactcgacaggctgaaactccgtagagagaacagagagagatacacacatatgggatctgctcgggcgcatatttcgagaagaaaaccgcctggccttgcatcggtccgatccctccgtggacgaaactgttcgagaaagcgagacggagtgatgagatcccgagtgatcaggatgtctctcactttctcctccatctgcgcccagcaaagcgagagacagaaggaagaacgtacaacatccactggaggatctcacttctgaagttatcctcatcagccgagtcgccgaatgagaacttgtggtctgggtcatagctataggcgaaagaagatacaaaaagaaacatgcgtcaggtctgcacttgagagcgcgaaggagaca

SEQ ID NO: 2470 - DNA, 715 bp, Xanthophyllomyces dendrorhous
aagagaaagaaagagaaacaagaggaaagaaggtgtgtctgccggacttactgcttctctagatacagcagtatggcggcggactcccacacagcatggtcccccctgttaggatcgaccaaagcggggatccgcccgttggggttgatcttcaggaaccactcctccttctgttcattcttctggatatcgatctcgttcacatgatagtcgaaagctgggtagatctgcttcagttcctccaagaacacagtggccttctggccgttcggtgtgctcgccgagtagagctcaagaggtttcttcagttcggtgctcatcgttctagcaaggattgtgcggagatcggagggtcgagtcagtcgggcaagagatctgatggctatggacatgtttgccgttgagtttcctgaaagatgggctcagtcactggactgacgtgatgcaaaatagaggactctcagacggccgaggaacggtgagcacttacctggtgatgaagtgtcgtcggtcttgcaagagagagaggagacaaagatgggagatgaggaaaaggaaacatgaagaacgatggacactgatgagaagagactttaaaggcttgatagaggttcgagcagttccgacaaggatgatccgatcttcccagcgtgagttcaagctatctagccccgcccgagcattcctgagtatgcccgggtgatgcccggtcagg

SEQ ID NO: 2471 - DNA, 21241 bp, Xanthophyllomyces dendrorhous
tccgaatcggtttcatagagcctccacaagtcttgaagccgtccgaacgaagggggccgatcataagcgcacctttggccaagcccgccctggtggtaagcaggccgacaaagaagagcttgacaaaagaaagccgctaagattttttatagagagtgcacggcgggagcttggaagccttcttacatatctccaaaagaggacaaccgattcagactgcagacaccttcatgtcgagcaattaaggctacctgacgtctgccagcttgcacaaaccaccttataatgaatggtcgattggacgtttattggcacggttaacaaaaagcgcagattgcggaagagcggcgtgagaagcttgatgaatgatctgatggacatgatgataagatatattcagctcataatcaattcatatttatgatcaacgcaaagaagaggaaagaaacaggataaacacaagagggtgtgataaatgtaatgaatgaagataaaaataaaaacaaaaaccgaagagacaaaagacgtatagcaaatacatatgcacatgtactcaaattgattttaaggcttcgactgcaatgtccaactcggcctcggtcaaataattctgagcgatatagtctatagtcgtcaagctcaaaatcgcggtgtatataaagaacaagaaaggaaacctgacgatcagaaccgatagatacttcacatgaagcttacttgccaaaagctcaaattgcataacagtgatcaaatttacactcaggacccatctcaactcgatcattttccaggttgtcgtgaatcatttcccacttatgtttcaattgatgcgagacttttcctatcttcgaaacactcaccggaaccaacccactcaagatgctgtcgtacactccagatttgcatctgtgtggtagggaagaagcagccagagggcgagtgagtgagcaaacatatatatagacacaaatgatcccaaaactgggtgataagaacgtagcgcatacacaacagataaaggaaactcatcactttaaatctaaatacaaagacctcatctttaagtagttcggttcagtcttctgcttgcttctctttatctcctcgcttctttttcttcttttctctattctctcgtcttggatctaagaaatcgttcatcaaaaacaggaaacataaatataataaacaacaccccatatcttcgaaggttcacttgacatcaaacgtctgtgctcttctgcttctcaatacacttcactaatcgcgcgacttcatgcctcatgccagctcctgcaggacctccagcaccgccgcatgatcctcgacatgagggtaatggccggcctcgttgaccatcctgactgtcccggacaaggcttctgctacgtgccgagcttcggctgctgggtctgagaaatccggatcttggcttcccatcaaaacgacagtctttgctcgtacttgagggatacaagattcacaatccgctttggatgcccacatcatcgcctgcaaagcctgtaaacgtccaggttcgcagagattcgcgtgcagtttgattgcgtattgcttgaggtcgggcggtggatgagctttgaacagagtcttgtaatatactttccaaaacccagcaccccaggactgatacatacatgcccagagtatgcctttgacaacgaagtttactggaatgtcgcgcacgaacgggccacagagaagaagtgatttgatcctaaggggagaatgagcagcagcccaaacggcactcccccccgctgctgagttgcctagtatgattgcatcatgaacatcgagatgatccaatagagcgacgatatcactgcctacagtagcagccgtgtagctagagaaggttgtgcctgattcgccatggcctcggatatccatgttgataactcgatagcccgcctgcgccaatttaggagtgagatgtcgggtcgcttgtcggaggtccccgatacctggcacacagatgatgacttgatctgacttgctgccagtgtcatcataggcaatcttgccttcgggcaactcgaggaattcggtgatggacatgatgatagataggtatacaagattggttcaactcggtttggttgggataagatggtcagttttacaacgatttggtactgctacgagagcgctatgcatcaaacatcatgccagaaaatgtattgtgtaagatctatgaacacatggcatttaaaggcaatgctagtcaacagcttgacttaacggccatctgatagatcgccgacgaaccatgcccggctcccgacggaaaatgcccgaccaattgtaaatttagaaaattcatcaacccggacacgcgactgtaaagattgctgacttcgcacaaaatagttccgctcggtcataaataagaaagtttcctcaacgagctctcccgggattctagttcctcgtgtcaagataagatttatctgacccgatcacctgcggcttcaactatcgtcaactgtcgaactttcattcacaggatctgagttatatctcaacccgtaattacgacaccatccagcgcatctaccccctcaaggctggtcggtctcaaattgatgaatgactaacacagtgtctgcggcgacagacatgtctccgttctttgcgaactatggatatcgccctcgcttctccgcgactgtgcgagatgtatctactccagccgctgcagaacatgtgagacggatccaggagatctatactttctgttgagactcgatagtcaaagctcaggaggctcagaaacggtttgctgacaaaaaccgagccaaggctcatgacttttacgaacgagacacggtaatgctcaagccgacgaacatcaagactaaccttgccagcagcgaactggactataagctgcttggtccattccgtttctttcaaagctgaagcgcacaggacagcacccgacactgagaattccggcttcgcctataacatttttctctctagtatttctttgtttcttcttctctctctcattccctcctgtctgaatctgttcctgtacatacccccttatatcttctcaactttctccgtccacattcctctttttcttctcactttaatcgtctcctatctcttttcctcttcctgcctattccatttcatatctttttatattgaccacctctggctgcactctcctttacccttctacttcttcgtatcctgtcgcttcttattatacttgttttcatatcttctccattctctcttcttctgtatttcacactctctttctcaaatcagctattgttcttgagtgtatttgcccttcctattccgatcgacactctttctaaatatcgctttctatctggcagtggcctatatatcatggctcatagccctggctttcatactgatctatgaagttttgatttttactcaactcttcgatataaacttatattcattctatccggctacggacagcagctcttccacacattttgcaatcttctcgtcatactctttcaaccaatcctcatccccctttattctctcctccgttctgatcacgttcggtggcagcacaaattccactctttccttcaccaactgggacttggttccttcgaacacgtttcttaaagcatcttgacatttgccaccgcctcttcccccgagtgtcatgatagctataggttttctcacccattcatgataaagatgatcaattgcaactttgagtatacctggtacggaccagttgtattgtggtgtgaggattatgatcctgtccattgcagctacccatgatgagaatgcctgaattcgagggtcggagtatgatgatggaatggaagttgggtcgagtgcttgtggaaccgatatgttcatttcgaaagggagggggtaaggaggagcagttagggacaagacatgaatagagaggtcgggatgagtgatggtgaggcgagcgagtaggtaggtacatataccggacgtattggacgaggtacgaggagagcctaagagaagaccaatgttctgaggcttggaagacataaccatggtgttcgactgtttcgatcgtcgttgtttgatgcctcaattgtaactggttccgggtagtgagataaggatatacctgtaaaggaagcgttattgcattctacaagtattccaatttccgaatgagctccttttatgcgatcatgagccgatataaatagcaacctgtggatgatgagaactttgacggcatgatggtctcaaccgaaagaaattgaatcttatcagtatatgctgcatcctgtgccgattatcaacatgaacatctgttgacctataccagtaatcccgttcaactgagaatgtttatcagacattggatgtctccaaagaagtagtaggtcaaagattgttggtgttcgtgattattgttgctctcgagatatatgtctaagacttgagatgcccgatctgggtatggaggatcgcaatcctgctgcatttatacccatatgtaaaccaacagaagtcgagcaatatcatcgtatcacttgtacatctcgtttgaagagtacaaccactgcgatgagtattattgcgtcggcaggaacgtgtacggcttccaagcgtctcaacgttctcgatcaggtcggaagatcaagaggtcttggatatcaatcatccaccccactgtctgaatctaaccctaacgccatacaatcttgtttttgggtttgccaatcatgatttttttgtgttcacttgataaagaattgattgaaagatttggatgaagaatacacacatctatctgtcttttttgggttatttatcttttgtttgatacacatcacacgattcaacttcatatcctcatcactagggtcgtctatgagtgttacaaacacacaaacacagacacagataacacacatgattatatacgatatacccactcacacacaaacatatgtttgaaccaaaattacagggtttgtaatcaggatagtctattaaggcgaaaattacataaacagtgactccttcgtcgtctacaacagccatcgaaggaactttccaatcttggtcgtaggggggttaggatcaaagtcctgatcgttttcgaaaacgcaaggttagcaaggagtcgtctgtctgaggaatctttatcaaacgaagaggacttacgatttcgggaccaggaatgttggacaccatgtcaatcttagaggctggtttgaaggatggccgcttggtgaacaaatagtgcccgaggaagagcgcgccgactgtgagaaaggaaaatcacgggtcagaatgataatttaactgtgcgatcatgattcgtctctcttaccgatgggaatattaatgtaggcgatgatgaaagaggacgtgttccatcttcctttgaggaagactttatagccattgaagaaaactttgtgtagaagatcaacaagtgtatgaagcagaatttcagcacatgtagcgaaacactgaaacccacgtcatacatctatatgtacaacacactcactagtgataatacaccagaagagcgcccagtaggcggggaaaggctggaagcggtctgcagatgtgttgtgagaggaaattagaccgagctcatacagcaagaggaaaagtccaaattagagatatcacgtactataaatgtactttgactcagacctgattatcccctgggcgtcgcatgccgacttgaaccgtaagaacgagacgcagatgaacgcccaggaaataaaggtggcgatagaggtcagatcagaaagccaattcaatacagtgttcgaaccactagacagagtcatataggcgagaaagaaagacgatgaggaacaggccaaagcgattaggggaagtccattcctttcaaggcatcgagaaaatatctttggagcctgccctcgaagggagagtccgtaaaggattcttgatgatccataaagaatggaactgccggcggaaaaggcggaagtcaggactccagcgttgatgaccgaaggaaggcctttgatacccacgcgcgtgaaggcaatgacgaatggcgatgaagcagccgttccagtcgatttgagaagccgcggctcatcagaagggactagcataccgaccacgactgtgagaagaagaaagatcagcctaaagctccgttaggtgacactgagagggacctactgattccaaagaagtagaaaaacaggattctccaaaagatctttctagtgcatccggccatgttggctcgaggattgacaacctcagcgcaagaaatcgcgatggactcgaccccagaaaaagagtaggcggcctgtagaagtgtctggaaacagccagtgaatataccgataggaccggcgatcggatagcttgcgaacgctccgggatctttccagtagcgaaacccaatctaagaacatcgattatagttcagactttgagaatgagtattatgtggatgagtgtgagagtggacacatactcgttcaccaacagggttacctccgagatcgacgataactcctccgatgattactgtggttatgatgtgccagacggagtgatgagagatgtgttttgtctgaggtgaaggcaatgactactcacaacctatgatcaaacatatcttgatcaacgcgaaccagaactctgactccgcataccacctggcgccgaggactgaagataaaacgaatctataagctcggtcatacagaaaagagacatacgccatatagtactaacagttgaacgaagcgcagaggaagagaaggagggtgatgaagccggcaagccttgcgttcgtcatctcgatccagtacccgataatgagcgtggccgagataatttccgtcggaagcgaaatgatgcttgagtaccagtctaagaaaaatcatcgattgcatgatcagcggctgaccaaataaaaaaaactatttcgaggcaaacaagcacgtacgcatccagcccacggcaaaaccggcggaaggatggatgtaacgttccgccatatggacctgtgtcgcaaactgtggttagtcatggtacgatcgattgagaaaccgttctgtacttacgtatcctccagagattggctgcatggcgaagatgtagaagattgttcagaaagcgcgcgagaagggtaggctaaataaaacttacagcaaaacagagcatctctcccagacattgcatgatgcaccagacgacactaccgatgagaccataggcaagcagggctccgcaaggcccagcttgggcgacagcctttccggatcctaagaagagcccaacaccaagcgtccctgcgagcgcgatcatctggacatggcgctgttccatcgtacggtgaaggccatcggtctagataaacaagaaatatcagagatgagtaacggatatgctcgattgcggcgaaaagacgagttgatgtcggaacgcacgataccactatgcacatccttcgcgacgtcatactcatcgtcgtccagaacggggacaacggtgacttcgttgaggtaccccttcttttctttatcttggatatctgtcatggttcaggagtagttcataaatggcttggagaataatactgagtctttagagactggcggtgaggatgagatcgtgaagtgcggaaggctgaaaacaggtgactgaacttgtatcgaaattgttcaaccaagtgagttaaagaaaatgaggaaaggtgacggaatgagaaaagcaggtgaagataatcgcaacggatgatctttatgtgaacgaaaacgtctacccaacagaagaatatcgtggggtccatcgcactacagtgaaggatgttgctattatttggccatcttctttgctcttgacgatatcggaggcacgtcttgagcgtcatcgcacgacggccttctccatagcgtggtagataggcagcacatggtagatgtctgctatccatcttgtctcgatcaactgattgaggggcgctgaacgttagcttccctctgatttacaaacgatgaaaaagtctgaagattccatatctatggatccgtatcggcttccgttatccagtaacgtcgtgctaattaaaaagaacgaatctgttcccaagagagcaggcgcccgtctatgataagttagcagcaaacgtgtgcagaaacacagtgattagagaccgagaggagttcaagaaggtttgtggagagatggggtagagccgaactctactcttcgccatccgagctactgcttatcatttctgttatcatctctcggttgccttgtctcgcttctcttcatacatccttctcttttttcgttttttctgctccggcctcttttcattctttcttatctgctcgatcctccattccttgattgtctccgcccttctttcctcttcttttgtctcgtcttcctcttgtagctatcttgttgttttttctctttgctccctttctccatatctttttcccctcagtcttcttctgcagtgccgtatcttgcttcgtccatccacctagccgtatttttgccctcacgctaggatgagccaacgatctttccttcagtcttgttgtcggcatccatgactttcatccatacgtaatgaaaagacaagaaaatggataaacaccatgcatgtgttccctattatttatcttgactaatgaaaatacagtttgtatctagaatgtttaacatagaaaagtgtgaaaagtgatctttcattctggcacttgtttatagccaggtcctccctggttttccatgacgacatacatgcctgggtggtgtttcagcgagaatggattgaaaaacgaggaaaacagaggagaaccagctagaaaatatatagcttttcggagatggagccttgggactctgcgcgaatagacatctgagggtgttgcctcaaggaggataaaatagaccgcggttgagactaaattgaaactgttaaaatcctgaaccggatgcactctatactgtcgattcaaccacacaacatccataggcacacaccgtcgatggcagcaacccgccgcgatggacatacggaaacaagacgataaagaaaagaatagaatataagagaaaagaaacgagagcaaaaaagagatccccaaccgggagtcgaacccgggcctaccgcgtgagaggcggttatcatagccgttagacaattgaggaggtgatagggaacacgagggtatgtttattatattcaaaaaaaaaacataactcattacatatgtcacgcaaacgcacatgttcgttttttcacgcaccgacagcgaaaccgagaaggtataaattgtgtaaacctctggtctgcttccttaatctttctctttttccacatactgctgtgcggcagaatctctttcaatacaaggtttccccctttgctccttccaccacactctattttgtgtttcagtggttgtcgagcgtcaatgaaagtgtagagcttgttggcttgtcctcttcggagggtggtccggcggtcgtcttagtacccttcacttttgcactgttttgtagtgatgtacagcgagtgtgagagtgggtcggtgtcccgtacatacctgtttatttgtttgcctcttgttgaatatgacaatggatatctggaatctacttcgctggtgtgcatgttattagagttgcaaaggaaaagatcaggcaagaaacatcaaagctgagatgtgctcatcagtctgtataacgatctgatctgttgccaaactatcatcactcgtctcagacggcactcatcatctaccgaacgatacatctgtcgattcttcgatgtacattaggacaccagtccgcaaacaataaacggcattggtctgcaccatcctatataaccttaccagacccgattgttaatttctccaatgtactggccatacgggtctccagcggtgttgtcaacgcctgttctaccatccacatacccggatgaaagttcttctggtccatctcaactggatccaccactcggtctggctcaaaacagattctcctccttgtttgtttctgtgtctgccaacgggatttctttatggtccgccaaggtgtgtctgccatcttcttcttcacataagctgtatgtttggaccgctgtcctttaactcatctgtctgctcaccgggaagccgactgccctgctaggtatagtctggagagagtctgcttcaatagtggacgaaggctcgaatgtttctgcgtgtttctcatgggattcatctattgtctttgtcacagtgagtgattctcaacctttcatcttcaattgaactgttgaaaccaactgccgcattcttctcgtgttacagacgtctaaatccatcattctgagttactacatcattcaatcccctaccccttactcatctcttggtacggccgttcctcgaaatagtgatgaagtgtttcaatgtggagctggtgaaagcacagatcgattgggatggtctttagaatgggcgggaagctgtttgatttcaagaaaaatccaggggttagtcagattgattgattcttactctgatcaccctcttacgaacatctactttgtccttggtcctcaagtatcattccacatcaatatcatcttgatgtcgccgtccttttgcctaccccttcgatctgcatgataccttaccctatacccgcacctctccctgcagaattaaaatcagttcagcttgtattctcccgagagccaactcccggatgtactttcagtctcacatactcccgtgctctcaacacctactttctcgtattcgaaaatggtgatacctggattgcatatcgtgcttcaggcttggaccctgacgatttcgaagtggaacttgagtttgtgtatgtcagcctggtggagcagtccgctagtttaaattctcaagagaaaccagcttcagaatctggtccaaacatgaccaaacccaacttagatggaggtacggtatgtgcgctgaacgcgacattctgcatatcggctgtcggaaccgagtcgtaagtctattctttctgcttatcaagtctgatggtgctgatgattgcgattatcattcaacttttattcaaagaggccttgttcatttatttgatcttccactgtcggcatcatcacccccagtccctcatcttgcctctgcgctatcactacaagcagcgaccaacaatcgtcgactacatgtaggccgagtgacatctctggcttggtcaccagacggttacgctttagctgtcggctgggaaagaggctggggtatttggagcaccggaggaaaacttctaggctggggtgtgctcgacgaagacgatcgagacaggctggccactagtgatagtcacttgcgcggcgtatctaacgaaggtctactctgggtggcttcaggattagagttggtgatactgtccaaacccgttcaatccctggagactcatccagcttcatcttccaagcttggtcttctatatgtcctttcgtttgccaagtcttccttcacgagtcagcccactccctcctcgaccaagtatcctttgctcattctgtccaacaagttattactctcatcaacggcatcccttccttcttcaacatacctttcgtctctcacgccatcttcctccctttggatccctgtcaatcttcctcactcttacatcaacactcaatatccgataaaatacgctaccgtttctgaagacgggcgtctcattgcagtggccggcaggcgaggcctaacacattggagcaaaagtagcggacggtggaagctgtttgaccgcccagagtgggaagagagtttcagagttagagggggaatggcctggttcttgcatgtcctcgtagctgcaattgaagagggcaaagagttttctgtgggtcttcctctgccatactacgtgccagactgtgtgttgtgtctatctgatacttagcatcgagtcatgaacagatccggctctactctagagatgacgccttgactcctacctcacatctgacatccgtgaatcttccaacacccatacacttgatgtccctacacgacaactctcttttagtgtatacaacgggaaatgttctttaccattaccttgtctatcctacggaaagatctgtagaactgagactttgcggatccatgagctttcgaggcgtggtcgcggcgcccggaagagtccgagctcttagctggctagttccgtcagcacaaacaagtgagaaatcaatctgttggcattcttatctcgagcctatatgtcatctgattttgtcatgcgatgatattgtttgattcaagaattggggcatccggcggacgaccttcctttagctacaataattcttctgattaattcctcactggtcttgcttcgtcctcgaaagccctccagacatcatcgacgaacctcatccctaatgacagtaaccccagcatcggaagaagttaaatacgattctcaggtcttggctgataatatcgaatcctattggactcatctatctggcattggtacgctggaaaattctctgtggggatgggacggagaggtcagcaagtctttcatatgtcttctttatgctgagatcggtactgaagagaacttactgtttctgaattcagcaactacgtgtctggctagatgctctgactgttgatcgtgtccaggctgttgctgtcgttcgagcagaagcaggtgctaaagaggagaagtcgtatgccagggtaggagaagtgagtactcaatcttatattcgatctgacagtagcttgaattgactctcgtgcaccagagcgtcagcatacctctcgacttttatcctctttgtaagtttgggttgtctttttttcagatagtccgtgaagtcaagaaaaaggattgaccaatttgtgctccattatatgatcacgcagccgttttgatggataaaggaatcatcattggactaagctctgaggcatcaatccgtcaatctttgagctttgccaactacaaattgcaaacgtcaacgcatctgtttcttccatatctgctccgattccatctttcttgtgggcaagtgaaagctgcagttcgatttgcttcattctatcaatcactctcatattttgcccatgcactcgagatccttcttcatggggttcttgaacaagaggcagacgatggcccagccgccagcccacaagttgttgatggattagaatggcagccaagtcaactgtctccactatcacccatcgctcctgtctttgtcggggagcatccgccaggcctgcaatcggaatactcgcctgcgttcatccaagcaaaaagtccttcaacagaggattccaaacgtatgggtgttcttcctttggtgattgatttcttagatcactttccccaggccttagaagtagtggtcggatgcgcgaggaaaacggagatcgatcgatgggactttctgtttgatgttgttgggaaccctagagatctgtttgaggttagttgtcgtctttgtaatgtcgttctaatacccgctaatcaatcgctctgatctttttcatgatgtctaattggcacactccatgcggtctgattattccattttctttcaatcatctggtcgatctatgatttagaaatgcctcgatgccaatcagcttcagacagcaacttcttacctccttgttctccatcatctcgagcagttagccgatgcttcgatagatactgtccgaatcatccgagctgctatgagggttggtgaatggaatttgtgcaaggatcttttgcgatttcttcactcagcggatgagagcggagcattgttaatcaaggcgatcgagagtttagggctgtatgcttcgagagaggacatggatgctctgatcagctcatcgaacttcggcctcggttctgaaaccccagaacatgatgatctggggggtcatgcatctgttcctatatcagaatcatcgcctccgttgcaatcgcctccgttgcaatcgcctcagccttcaacaactactgtctcggttccgagatcggctagatcgttgactacacgtgcggtgtcctcgaccagccctgttcgaacagtgacttccctaccgccttcagcggagcgtaatcattcatccataggagcccctccgagcaacgccgaatccaggagtgatcggcgctggatttgatcaatgtatagatcgttgtagtgtagaagtaaccatctcgaagaagggttggagctagatgcccaaagggtatttgatgtcgtagagatgctctcgtgtaattttatgatctgtactatcgtatagtgatggtgttgctcaactccatcttccaaacacatgatctttaccgtaacagataatagctatacttctgcttatacgaagtattcagtttgttgtgaaacatagacgaaaagaatatggccaacgcatgattataatcatcactcaagaccttccaaaggctggcaggacttgtacattttgtaccgagcctctaggcacgacgttggcttgtactgctacaggtaactgactgttccaaaatcttcgaatctcaaatccgtcctcgcctgtcagtcccagctgtccaagaactcctcccaaggccgcacctctccgtccagacacagactcaatcatgccatcaggtccagataccaaaataagtgttttcttgcccttctcaagagctgtcggtcggccagaggaacttgcggtatccaacgattgcgtgtctggggttgagacagtcgagggttttccgaatagggaagcccaaaacgattcaccttcttccttcgcagccgtcacggtcgactggatagaagcatgacccggaatcaaaatctgtcccagatctttctcaccgaatctagagggtgagagatcagcgagctccagccgagcaggcaacaaggatggctcgggcagatagtcttctaggagagataatgtgagagcgttagacgtgtgaacgagggtgatggttggaaggtcaggcggcggcggctgaggtttgagcgggttgtatggcagtcgggggggtgaaagggtatgaagaagttgagtgaagggagtgattccggtaccaccagatatctgttataatgtgaagattggtttcgagcgagataatatttcagatcagctcaaaaagaatgatccatgaaagattgattatatgaaagatcaagaatgacggaccatgagcactcgatcccaaccctgcaaactccatcccttgagctggtcgatgttgggatcctgctcaatgacgctaggtcgaacaacttcaacttgagtcgggaatgggcctcgggcttcgatccaggaaaatctcttgagagaatgaataaagcgagacacttctccctgaggctcacgctttaccaaaatcgaaagctgggtgggtagtccatcgacgtgttcgggaggagaaaagatggtgtaaggctacagacaagcagaagagagacgtgtcggtcagcaaagaatcgttaatcaaccaagagaggcgaagattagcacgacgagtcgagatcggtgcaaagtaaagaaaagaaggcggaactgactctctcgatctgtagggaggaatccttgatcatgatgtggtagatcccttcttcatttgtctccaagtttcccagtaccttgggatggttgtcaggtagtctcatggtgaggactttgtatgttccgtctttgagtccggtcgatccagtctcatctcgatcgagcacctcgacccactctacaggaaacgctttgtacttgtcctggtcaagcaacggactgtgggccggcttgaagacaccataggtcacaaaggcaagagcgacgcaaccatagaaaagtgttcggagtccatttctagaggcatcggtttcaccgtccggtccaatgaccggtttcacactcggattgaactttgttatcttgaacagcgagaccaaacgctgcctagtggtctgttcggtcggatcgaactgacgacatggccgagagatcgataagtgtcttgatgtgaagattgtcgatttagatgaatttgctagtaaagcggcagtcgacggccgagccagacgagtggcgaacatattaacgaacgaaaagaactggctttctaacggtctgtgggtggtggataatgattgatagcctgccgagggtcaagtttgaatcggtcgagagtgtcgaagacgaaaaggacgaacgggagagcgcacaaagaaaaggtaattatatgaaattaacgaaattcataaatctgagttaactagctagaattctgtacctgttcctctttttccaacactagcttccgctccttcttttactcttgatctttcctacgtttcgtcatacaggtcgacatggtccgcatattcaatcaagttcacacctagtatgggcttctattttggaccgctttgtacgctatcttgtgttgagtatgcttgacgctgatttcccacctggtttccgctatgcacagcaaggatgactttcagaccgtcgctctggcctactttcttcgatatccgtttgtctttgttcattctttctgctttccccttgtcagaagggtcagattgatcagtagggctgacattcacttggctccttgctgctctcaggaacccgtttgcaaaacacatcatctcttgtgatgttctatcccgcacgatcaccccagagggaacgctcaagacgacgcggctgattctcaagtcaggaaagcttcccctgtgggcgatgacgctcgtaggtggctggggaggaggcctcggtgcctgggtactagaagagagcgaggtatgtggaatgtttcgtccttgattcgagcttgcccttgtggtgacatgagactgacccggccagatgccgggcatagacacaaagcgcacgagtagggctgacgtaacgttgcttcggcctgatagtgctatccttacccgccctacgcatttctaagatcgaccacccgaaacatcactcacggcaacatactttccatccatgaagtcagtctgtcattttctttgtcgcttccgctttggttttcgaccaggcatcttggttggtcagtcgggttgtcaggactaactttgactgctatggctcattgtcatgtagacatccctcttgaagccggcgtcgatttcgtccgaatcgacacaaccaccggtttccatgaccttgcacgaagtggagggccgaatactgtcctccttgaatactgttgaagcagtgaaacggaagattgagactttcggagagggcaggtttgcgaaaggattagaaaaggtaaattgtccagctcttgatttcaatctctaatcaattcacttattcgatttgtatctctttcggcggtggcccatctgtcgttcggtgtatcacagtcacgattgggtatctcgcatatcatacaaaaggtcaaggaacaccggcagacgcttctcgatcgtaaaaccattggtgtccgtgggttaggcttggagatatagtattgtcggttcccaatagggcgtcgcatttagggtctttctcagccctcttcatctcctctgtttttgcttgaacaatctctctctctcttgggttttagtctctcttgtccgtcgtcaacaatatatactgcatggtctgtcaagttcagaaatatgtatttatacctcaatcccatctattttgctcgcctatacattcgcttctctggccacgtgtcctctgtaaaatacatacctcactctatctatatcacaagactctgagaatatgcgttcatgaacggagtttgagcgagcatgatttgagtttggcttgaagtcgatgaaattactcctcaaccaatatgtctgtacatttgtctcgcatcaaaattctcatatcaagaatgcaagggccgatttacttcagaaagctacaactttggctttgggctttctagccggagccgagtgagcaggagtcgagcccacaggtcgaccagcaatgattccttcctccaaatcgacagccttccgttttcgattgagagtatggaagtcatcctcatccgggccgagtgaacgagcagaaggatcgagtgagggaggaagaagagtggtctggatagcgcggtctagcgaggaagacgggtgaaggaaaggctgtcagaatcacaagcggatagaccgttgaagtcttgaggaggaaaaactcactgtcttttcgcagctcgcagtccttggcaagatgatcctttccttgacagagaatgcaacccttgccgccattcgggtacactcccttgtcttggttttggggacactttccggctaaatggcctttgccgaggcacacaaagcacgaagcgaacggcattggatcagccttgttgactgggcggggacatcgaccgagagtatgttgaggcgagccgcaactgtgagagagagagaacatatgaatgattgacaaagcacatcagcttgacatacgacgagcaagaagcatcaaaacttgcgagaaaagaccgatacggaccggtagcaaatattaacagtgtctcttccgaccatggtcctgattccgtctatttcgaccgcgccatccaggttgttcgggcaatctttagcggaatgaccttgggaccgacaggcaaaacaggtcgtgttggcctcccgttcagcgattcggtccaaacgcctcttttctgaagccagtcgacgggcgtcaaattctgtgtcgtgaagatttatcaaaatggtgtcgataaggaaaaagagaagcacgcgttggatgtggtatttcataaccaagagaaccaggaaacccagggttagagactgccgctatagaaagagagaacaaaagtgagaggcaaacttatcgactatcgaaaactcacgagactgtctgctatcctttctcgctttctttcgttccatcctggctgcgtgctcctcgatcgtctcaccaggtttgggacctttcaatccggccatcgtctttcttccttttggcgcgtccggttttgaggctcctgctgctggtgtagtatcggctttgggcaaaggagctgacgatgtgctagaggaatctatagaagcaggctctgtcgatcgctcgctaggctcgcccgtctcagcaagagactcctgaggatcactctgtccatcaatgacctttcgattcttcttatccttctttccccgagtccctctgtggactttgcgtttcttggccacaggctcgtcgtccggtccggtcgtaggtgccgacgcggtcactaccggagcaggagcagggtgtaggtcaggctcagaggccctctgggcggaggggatgagatcctttcgtttgatcccgaaggaggtgattcgggtcatgtgaatatatgcgtatatatgtgtgtatgtgtgtgaggaagaatggactacgagccaagtaaggtcaaggtggaagaggattcgtgcggttggtctggaaaggcatgatctgaaattttgttgatttcttgtaagaatgcggggcgccgctgtctgattcattgtatctaatgtgatgtctgcctgagttcaattgagctggatctttgtacgacatttatatcatatcatatcaaacttgaactttgggtgttgcttgaaggactgccagaaggttgatgttgaacgttgactgcagtttgatgagactctgaagcacgaataggttgcttcttgacagagtctgcgtatctagctctggcctattagatcataaacggcgacggacaaggcatcaatatttgatgaggcactcgtgtttgatggcaattttccctggacaaagacacccactatagccagcctctgagctcttgcttctttgcgctccgaatacttgccatacatcgcgtggatgacggcaaggggaaggacgaggtagagaaagaaaaggaccgggtcgagcgtgatgagtgccttgatttgatcgactagaaaacgtgtgatttgatccatcgcagaaatttgaggttcgcttgagatcagatatggctgatgatgagctcttctaaacggtttctgctactgctgctgctgttgctgttgcttgtgctctcctttgtcatctcgtcctctccgagctctcgcactttaagctcacctggagaatcctcgggcagatggcagtgggcggtgtagggttgtatacttacataaggtagatgaatacttaggtagtatatttgaataaacaaccccaggcgcctgcttttctctactgttattgatttcttctcgttctcacttgttaccttcactcgcctgctctccatccgtccggctctctctctttcgacggatacacagatacacagatacattcatacacacaggctggctcaggatactcacgcgcgtgcaatctctcgctcacagcaatctcccgatgacggcctttctctcgtcgtcgccatcgccgccaatctctccgccagcaatctatcctacatcctcatttaataccattcagacacgttcgcacgatcatcagtccatcgttcacagtggtcgagatatttcaatacttcaagatcagaacaacgatgacgacgacgacgacgacgacgatgatgatgatgacgaatacggagattccatgctggacctcaagagcatgggcttcaacttcaactatggttctcctgtcaaaccatcggcttcgtccacaggagttgcagtcactgcaacctcgtccggatcatcgtctgttgccattgcttcttcaagcgcacatatcagtcaggcaggagctagtagaccactctcaccctcatcccagtcagctaatccatcgtattcccgtccgaatcccatatcactttcttcctccagcccacctgatcgactacccataggctcgaccgtcgattctactccttctctgtatggtggatcgcgaacattagctcccaatcatactgctagcacacctcttctgtcgaacctttcatcagcctcagtcttgggttccggaagaccctcaggtctgaccgctaggacaattggacgtgtggcctcggtaccatatccatcagcaggcagagatgtcaagagctctttagatcgagacgaccatgatgaccaaagcgaggtttgtatgaactgtctggatgattgtttttttttttttttttt

SEQ ID NO: 2472 - DNA, 543 bp, Xanthophyllomyces dendrorhous
ggaaaggagagacatgtcccaaagaagaaactagattgagtcaaatcaaatcgaattgaatcgaaaccgaatcgaaccgaactaaggccagatcagatttagacggaaataaaaaaaagaaagaagaacggcatcaaccccttctcgcaccccaaccaccgaccaagccagccgcccactctgccacagccgtcccgccaacaccacccaacggtctgatcccactaccgagtatcccggacggcgcgcccgagcccgggattctagccctgcctcgaccccttccgccggtggcggcggtggaaagagaggaaagactggccatcgggttatcttgagattgctgacggagtatagatttcgtcgtcactgtattcttgcaagatcaggtttcgaaatgacagaggaccgcgtgaggcggatgagtttgatttttgaatgtaacaagttgcagtcgttgcgcgaaggaaaagagaagaggatggagaagcaggaaatgatgagtatgcataaccaaacaacaggatagaagagggatgaagg

SEQ ID NO: 2473 - DNA, 2710 bp, Xanthophyllomyces dendrorhous
ccgttttgagaaatagtattgatatttgtttctaatacgaggccgccttggatgatttccgccagggtatgatgaacctaagaacgagatgccaagtcaagtcagatccatcggtttagaccccaagatgtacattggagaagaaaatcacagcaaaaggcaaagaaaaaaacaagacaaagaatggaaagacatacctcgtcgaaaccaaaaaccaaatcaagctcacagacattctcaaaaaccttatccaaagcctcgacaaagacctggatgagatccaacacgcccaattcggattctgcggtgtcgcacgtgaacacgaatgtcaacgtggcaaactgtctgaagcgaacgtgaacaaaagccgagagagagaatagtaatcagccagcctagaacggatatagtttcaaggaaagcaggaacaacagaatggaacagcaaataacgataaagacgatggaagagagaagcaaagagagacgatacctatatatgaccctaatatcctttccatcctcttcatccctctccctttcctttcccttgcctgtgctaccaccgacgccgccaaagaatccctctctcagttcgggcgcgtccagaaagctgcacatcccggtcggccggctttcgaccaaggcgtatatccgactgatcagcttcttctgttggatcggtgctgttggcgtgtagaacttggatagacgaggtaggccaaagttgttgaatatgaggaccgagaggatcatctgtgcgtttgatctgttccggtgtatcctcggtagtcttggtaaggtaatatgttgagggacaatcgggtcaaacaagactgacgacgatggtgacgacgatggtgacgacgatggtgatgatgatgagatgatgggtttctcttgaagcagaaggacgatcttgtttgggaggaaagccgcacccttggtcagcggtccagagagtcacgtgactgaagatcggttgatctaacaagtctctttctttcttctacttcttctacttgttctcttcgttcaccatcggtcttgaaagattgaagtgaaccaatgcatagatgcaagtgcagatgtgaaggctgaatagagcggatgagagaaaagggaattctaaacgaacgcaaaggtatacaacggaggcgcagggtgaacggagaggtgccgcattcaggatataagaagggtaacaacgagaaagatacggtaagcgaattagcaagcagggtagcaaacaaataggcagacacaaataaatagcacaagctgatggtagtcacaaccagggttgcgctgagacatggggcagagagcttggggctttcttttgacaacgaagcgttgcgcaatatacagaggggaagaatgaatgaatgaatggaaggtgaaaggacaagtgaaaatgagagacataagcaaaaacaaacgtatacaagcgcaaagcaagcaggcaagcgaaaaaggcaagcaaatagaagaagaagaagaagaacaagaaaagaaaagacatatcggcgcgattaaccgtcatcagactcctcttcgttgctgagtttcattcgaacaagagaaagcacaacgtcggcgtcaacagggatctcattcccctggaagccttccgggtagtttaccggaggcagagtagctggagtgaaggtactacatgggtacaggacgttgtgaggaagaccggaatcaaatcagctaatgaagcaacggagaagatgaagaggaaaagccaccaaccgagaaccccagaaaccaaagtactgcatatcaagaccacgagaggtaaactcatagtcgtctgtaatgggtcatcattacggtcacatcagtgtgaaaactgaggaacgacgaaagtagagacatagaaaaggaaaataaacgaagacgataacgaacgggcgaaaccgtccgggtagaagaattccatgaccgtggtcctgatctctggcttcatccagagcagatgggttagtccgttcccgtggacgcccatcaggatcgttgtccttgcggccaagcggatttgctcctcgttcgaaagcttatccctataaaatagaaagacaggtggaccgttcggaaccaacatttcagtttgagatgttgacacaaaacaagatggtggaggacgaacatctcgacaacgttgagctcccaatcatcttcgatactggctctggtgagtgtctcaactagacgttcgtgatcttcgggcttgagcattcgtcttccccaagactgtcggctgacgtaggtgacgaccggccgggggcgcataccaggaatgaggtccacctgggcgacgccgccgatgtggtccataagagagtttcggacgggcgcccaccagtttggcgttgatggcagaagaaatgcttcactagagtagaaggagaaggaagagaaaagagtcgcccggggtaagattgagaaagattctatctcgtttcgttttatcccttttaatgggaggattgactgtgaagactcacgaggcggatctttgagtggcagcaaagcggtcacctctgtaggcggcagcccgatcggcgaggagaacctgctcgtagacgaccggtcgatctgagttgaccgagtcctttttaaattcaacggtagcatttgggagcacagcttgcatctagagaatcaaggtactttgtcaatgtatgagagagagttaggaa

SEQ ID NO: 2474 - DNA, 1246 bp, Xanthophyllomyces dendrorhous
agagagagagaaagagagaaggtatagtacataatgaaggacggagggaaaagagaaaagagagagaaagtgaaaacgtacgagcaaggcgttcattcctgagtagtccttccactcttctgatcctgttcgggcaaagatgagtctgtttggcatctgtagctgggcgtgttcgcctttgtcggcgatcataccagggatcagggacgagtacgtacgccagagcccgtaaaggcactctgcagcaaagtggtagtaatgattgatgacttgaattcattgtttggaacgtgaaaagaacaaggcgccgcgatcagctttcggagggcagatttgcgagcaagacagagaacgctattggatgatacatacattgtgggggatcattaacgatccagctgtgcccgtgttgaacaagagcgcctaggggtgtcccgtctgaggaataggtgactgggaagagaagcagagcttgggctggagtgatgatgcgaatgtctttctcagtgggttccctgaggggaggtaaaagtggttacgagagcgcgcaaagaagggaggaagtatgagtggtgagatatacgacggatggagaagaagaagaagaatatcaaagacaggtgttgacatgaaaggcacaaagaggcaaaaagaaaagaactgacctcgaccgaatgttttcgtgatcgttccggatgtcttgaccggtagagatcatcattctttctggaggaaaggccgatgggttggaggtgacgatgaggtaggtctggttgatctgatagaggttggtaaagaccgtccagccgggggaatggacgacgagctgggtttccgttgggtagccggtgcgatcatggccgtaggggatggcggttgtccctgggcgccattgagtgagcttgttggccaagccgagctggagaacgcgttcgtgaccgttgcgatcagtgtagctgatgtcgaggtcgagttggaggaggcagaacagggtgatcgcgagtaggctgaggagtccaaagagggagaagggtagcctgaggatttttcttcggaaggaggaggacggggagtaggaggaggaagaagaagaagaagaagaagaaggaggaggtgtgagagaatgtgagtaatgagtagatttgtgggtggatatcgggtatggcagcagtccgttgtgctttgtgagtgagggtgagggtgggccttgggccagtggcaaagaatccttttcgagtgagcgtaa

SEQ ID NO: 2475 - DNA, 2472 bp, Xanthophyllomyces dendrorhous
gggggagggggagggaagaatacgaagaaagagggaaaaggaagagagagaggaggaaagggaaaggagagagaggaagcagaagggaaagaagaaagagaaagagaacgatggagtgaaagagagaagagaaagaagaaagagaagaaagagtgagagaagagaagagaacgcagactatttgaaggaaatcccagggcgggggggaaggaagaaggaaggcagcatggacaaacgggaagggagacaggagaggagggtgttggatgctaggcaccaggcaccaggcacaacacaccaggcaccaggcacaacgagcagttcaaaaggacatcgtcaatgccacaagagagagagagagagagagagagagagagagcgtttctctcgatctctctgtcgctctcaaagggaagggcaaggaacccaggaaaagaagcgtttcagggcatacaggcacaaggcacacccacccatcacacacaaagagacaaaagaacgagaacgcgttcgctctagatgatcgaacgaccagagacaatgggaagaaacgctcacccacccctggcacaggcacaggcacacaggcacgatcaccactggcaggacaacacgagcgtaccctccacagtgctccgtctctctgtgttctcacacacacactcacactctctctccccctctctacacactcgaatgggttcttccggtccttcatggttcaatctgcgtcatacggtgactaacctacatactgcgcatctccggcccaatctgataaccccgcggcccttttgactctctggccttgtagtcttttttttcttttccccttgccttggctctcctctccatctgtactctgaccaacgcgttcatctccagtgattgtgctcgctcggctggactcgctctctctctctcttttctcaggcacaaaaccaccaggcacaaaacacaaggcaccaccacaccaccaggcaccatgtccaaaggcgttcctggaatcctccacacctacatccaacagcccaccgaactgcccttgttcgagtcggcctctctcggctcggccaactgtgtctgtcctcttttcttccttctccttctccttctctttgtccatgctcacttagcacttagcacttagcattgactctcactctcactcattctcactctccagctagtattcctgcccggtctgtatgacggcctggtgaccgttccctacgtggacgcgttaagaagacatctcgagcaagcaggctggtcactgttcgtcctttctatcttctccctctgtagatttatatattggtctatatgtctgcagtctggctcacgcttcttgctctatcgacttttctctctctcttcctttctctctttctcttctcacatcttccatctcttcctcttcctctttctctctcctccttccccacctccagcgcccagcctcagctcacagccgcactcaaagcttggggcagatcatccctcgaacaagacgcagacgagatagaacaggccgtcgaccatctccgagcgatcggtccgttctcaagatttcctccttccttgtctcgttctatctctctctctccttgtatcctcccgctcacattcaactctctctctttcaaacaggaaagacgaacatcgtcctgcttggtcactcgacaggctgccaacaaatcatggagtatctcgtccaacccaagaaatcaaacggaaagcttaggtcgaccatcaacagagccatcatccaggcccctggtcagttcccttcggccctcctctccccctttccttcttacctttgttcttccctcgtgaatcatcagttctcatctcttccccattccttccatttttcttccctctacagtctctgacagagaggcaaacacagactctccatcgtatgatccgaaaatacaagagaaacttcaggctctctacgacaacaccccgggggacgccaggcgggatacgctctgtcccccagagatctgcaaatactttggacttgacgtcaccgtctatcgcgcctggagcactctctgtcccggcggcgacgacgattacttttccacagatcttcccttgacctcgtcaaccaccccctcggttcttcgaccgctcgaccagacgtttggcaagctgcccaaagacgtccccttgtttgtcatcttctcgggcgccgacgagtacaccccgaacccagagaaaactcagccggccttgctcgataattggactcgcgccgctttcacaaacagcccagacgctccttcctctaccgccggcgcctccaaaggctcgattcgaggtatcatcgttcccggcgccagtcacaacgtcaaacaggcagacaagtcagaatggatggcccaacagatccttgactttatcaaaaagtgatcaacattataactcattcaatctatagtatccatatatata

SEQ ID NO: 2476 - DNA, 452 bp, Xanthophyllomyces dendrorhous
atatatatatatatatatatgtgtgtgtgtgtgtgcacgcgtgtgttgagtgactataaaagtcgaacttgaaactagaaagaaaacaaaagaaagagaatcctttctatcaattccgttttatgaatccagctcttgatgttccgtctggatcgatcgctggtatgcctccaaacgatccatcgtcgagtctgctagcctggatgtagatatacatatggaaaggaaaaaaaatccccaattcagtcaaccgtgttcccgtcagtcagtgttcgcaatcaggtagactgatactgtcgaagaagaggaagtcaatgaagagaatgaaccgaaaacatcactcaccacgtcttccatgcattacttgccccaccgatgtcggtcccgaactcgtaccgaccatgaccgacgagcgggggcaacagactgaacaccccacctgctccctctcc

SEQ ID NO: 2477 - DNA, 15916 bp, Xanthophyllomyces dendrorhous
ctggattcagggatgtagtctgcaaaggcccagtcgaccggcttggtgaacaactgagcgtccctctggaggaactccaagatccgcctggcgcccgtctgagataatgagtagccgaacgtgcccaacggatgttccgaaggtcggacatacggatggtggaccggtcggttggctgtttcgtcagagaacgaataccctaagtagaccatctcccagtctccgtttccgtccggcgatggatcttttggaagcgttcgaaagatcgaagaccacgaccgacggaaatcccacgcgagatccacatcatcctccaggatgagcgtccggttgagaccccggtcgacgatcgaccgcaagaccgccagatgggaagtccaacaagctagtggaccgggaagggaggtcactccagagttgatcaacggaaactgagtgcctagaatggaacgcgaggcgtaaatcgacttgaacatctcttgtcttgatcctccctccttcttctccttctcctcatcctcctcctcatcctcttcctcctcctccgaaccagatcgagctagccgctgacggtaaaactctcgccaactgaccgaatgcccatcaggatccacaggtccgtcccagacgatcccgttttgatcctcccagagccgttcttcgatccaaatgacctctgggtcggtgaacgaggtggctttgaagaactcgaattccatgtcttgtgcgcgcgccagtagtttcatgtgatcccttcggtcttaggggggttgcgttggcagaaggtgtgagcgcaaagtaaagtatgagcagaccgatcaagcaaaaacattgtgtaaaaattaattttaaaaaaaatctcatcagcacaagttgaacaacctcaccttgtcgtcgggcgagattgatgacaatgatcttgtcaaactcgctcgcctccagagctggatccgtgcgttgttggacatcccgtctgaacagacttctggcaccttcccatgatccgctcgggccctgcgctttttcaaggaggaggaacgagtggatgccgggcgtgaacagtccaatgaaaaaagtcgcacagattatcactgccggccagacgaggatcaggtagacggcagagggtaaagaacggatgaacatctcgtaagcagtgcggagagggaggacagttgtagcgatataatgaaagagagaagcatgtccaagaacccaggtttggacggaggtcagttcatataagactctcgggcaaaagacatggacattcaaaacatagagtgagtgtggacatgggattcaaaggccccttgcctttgtaaggagaacttgctgtccgagcatgtatgcgcatgcatactatacacacacacacacatatatatatactcttaaccggattgatcatccctcatcaaacacacgagactaagctaggtctggagcgcatcacccaaccttcaaactcggaaacgaggtgaccgaccaagtttggtacatctcagagcgaggatgcaaggagagatgatcatttaaatgcttgcacctcttatttttatcattctctatcatgtgtccttcttttctctctttctttctttctctcctttctcctcgacaagagtgaaagtcaatggcagcttctgcggagcagaatgaactaaacgtatgacttcattgcccagtttcgtttttctgcatcgactcaatccagacggtgtgctcaacactcccggccaacctcacagccgaagtgatgcgccgaacgaaaagatgcgcgttattgaatgttagggttggatacctcgaatgactctcctctccatcgtccatcccttcacctccgagaacaagatcatctcaccaagcatcgatcgtcagatcaacacaacatctcaacacaatggattctcacatcgctccttcgtcgtcgtcgtcatcctctagattgactaccacattgtcggtgtttgatgtcctatagtcacatttgattcctgatgcgtcccgttctgcacactcactcacgagccttgttctctccgttcgtccagacatcctctgcccgtcctcaacatctctgaccatcacacccggaccaggcttcaacatcggtctgataactataaaagtacggtgtcagagtcttcttcttggatttttctcctcagggacgttgacaataccagtttgttccgaaatcacagtcgtaggagctctgatcggtattcagaaaggcaacgaggtcgagatcgtgaattcatttgagctcgccctcgttggcgatcagcttgagaatagcgggatggaaatcgacggcgaaagagcaccgggtggagataaagttgaggtagactgggcgttctttgaggagagaactgcaagttgtatgtcctgcattcctctgagcgtcttccaaaaaaactcatgtgtcccgcactgtcacaccatgctaaggttattcgccttccggaatcgatttgttcttgatttccgtttggacaatggtgtcactcaaaagtcaaacaggtcttccccacactcgatctcattggatggtactctgttgggaacacgccttcaccaatagatcgaattcttcacactcaggttcgtcttcaacttgctatccatcgagcatacagtcggccgactccgttgtgttctcaatcctttcctctatttctcttcttttccttttaaagtttcaagcaagagtcgaatccgcactcttccttcagctagatactttatctccccaattgtcctcagactcatcatcatctgaacaagataacaaagaacaggaccttcctgtagatctctatcaaaccgttcacctcgctggcgccgcgtctgcaaccacggccgaaggaccgacactcgccaaagaacatgattcacaaaagacttggtcgttcgaaaagatcagctggaggatcaagacaggagaagccgaacggatcgctgtagaaggtatcggaaaggccgggccagacttgctaggtgatacaggtggaacctctcgttcgttcctctaaggcttttttttaatttaaaatatttgaatttatttggtcactctcgatcagcccgaactcacctctttgaaacgtaccatgttgggcgccgaatttatcaaaagtgatggtccccgttcgaaacgcgcttcaaaaactatcgaatcggacccagctcatagtgagctatctcgacggctgtctccgaggagacctccgtgtcgatcaggaagtccttcgggagatagaatctctccttggaggtcttccggttgacggaggtcacgcctttagagaagaattcgacatggtcagttcgcgaatcgcttcctcgacctcattgatctcgacccgttcgatcttttgtctgattcttttgtctttgactttatctttttattctttgttctatcatgtttcgttcttgattctctccttttcctctctgtctccttcaattggataaactcaatataggaatgcgccgacaccatgttgacaaattatttgtcagcattaacaaaatccctacacgctatgaacagtgtgagttcctccttgttttctcatcctgatatcagtgcctttcctttcgaccaaacctaccgcacttcctgacgccggtttgagcatttcccgacatctaataatcatccagacgaccgacaagttcaccttccttcacacatcttcacacgaacgtggtccaggagggatatcatctgtaggggggctcaattcgaccgacggatcgtctgcaagacgatcggttggaagtcgaaagaaagtttgattagatcgccccaaaagaaaaacaatcccctttttatactcctactccttctcctccttgctcttgtttctccttgagcttcctctctcttcactcttcctgcatccaactattctgactggatcgataggctttccttcatgagagagaggaaagtagatatatacatatatgttttgcatccttgctaggcgcgattgattaccagtaatatacatatataagtctttcttttctcaagttatagacaagtatgtctgacgactatcgacccttgttcttcgtttgtctatcgaaaacaagttcaaataagagaaggaaggcgttgttaatgtttcgtgatttgagccttgcatgtttttttcgaatccacacagaaagaatgggaagaacgaaccggaaagtaaagtcttttcgggtgtgagcaaactcgccaagcttgtgaccgatcatttcttcagtgacgttcactggaagatactgtgtcgcaacaaatcaagacgaaagaaaggaaaggcatcaacacaagtctttcactgatatacgagcaaataatgaattataagtagaacaatcaaagcagaaaagagtacgaacccgacgaccgttgtgaacctcgaacttcagcctttcagatcgatagcgaaagaaaaagaaaggcgttaacgacgtcactcaagttgacaaaggtactcaagagcgtccaatcaaactacgaggctatctgagtcactcggataatcttttcagacatgtctgacaagacagtctccgaatgctcgatctggtctcgaagaactcgcaatttgacttcaagtgggttcgaacgtgaacttacccgacaaaggatggcacgatagtcgcgtttcgagcttgcgtcctgatgggagtcatcgtcttcgcatgctcggccaaattggggaacggtgggaagtaaggacctgaaggaagaccaagaaagagtcacgaaagaggaagagaaaacggtcagttgaggcagatctgcgagtcgactaaatcggaaaattcgaccagagcgaagaatgaagagcggacctttccaggccgatcttgccatacgagacacggtggggatcatgctgaagcaaagggaacggcaagtccgatgatatggatggtcacagaaggagagctgtagatgtttccagacagacgtagggaagggatacatcatgcattatgacgggttcctagaaactcatgatctatgcatttagagaggttcacttgttctgatatctcttgatcgttccatctactcgacgttatctatccatcccatcaaccaacttctaagagagagctttgtccgttgaagatgtcaacgttgaggaaaccagaagaactatttgagtggcttacagtagatctagcctttcccgcgtctcagaccttgaagctctcccagttcactcggtaggtctatgttcgagcttattcatatgtgtgtccgactgttgtgtttatcttttgatcaccggtctgttccatataaaacatccagactatgtcgagggtctcttcatctactactccatttgctttcgcttcatcttcttggcatagtgccgacattgcgcaccaggtctgagcttcatcggtaggtgtaatttttactgagcttgattctttcgaacctaagtccagagctgagagttctctcgactgcacgcgtaccatagttttcaggcactttcaatttccaatcagcttcctggtccaacgcgatcacttctgtttccctcggaatcttcctacgcaacctgtcatcgaactcatgctcacatgttgcgtctctgtgacaagctggcgaaagcacagaaagagttgaactcgatactggcccttactcaggacggagagaggtcgagagatcaagagaaagagagaggcgtaaggcagagtggaagattgaaggtactggaggaaacaaaaatcgggtggattgaaacttgggagagattggaaaaactaagaggaatggatgcagcagaatcaggaaccaccagtttggaccatattgtgcgtctctactttcctcacatctgctaatactcacatactgtaccatttcctcgaggaatacgcatatcagaaaaagtcttgagaatctgacaaatgcttcgggctatctcttgttaaccgtatagatacttcaaaaagtactcgatcaactgactcgatttgtggactcagctaccaaatcaaaatcgcgcgctacacagtatcctacttcattggacatattcaacatacgtgatctgttcgaaccactgaaagaatggatcaccaagataaaccatcgaagagaaaggcatgttatttcttcgttcatccgattggttacaatatgaacttacacatgctgtgttattctcttgagcagagcggaacgacaagatacaaagggtggtgataatactctagagatggatcatctttccgatactctctttgtatgtagcgaatggaagagtaacatacacgttcaaaattatctcataaagagtttgactgatgtactggcttgccgttgatacgaataggaccttcatagactccacatcgaacttgctggccgctctttctcaaaaacacagtcttccgcaaaactaagttctgatatggaaccggagagaccagcagaggattttgttggtcataaccagagaaactacagactcaagtgggaagaaaagctgaggagacgattagaagacaggtataatggtgatcaggacaaggttcaagaaaagatgttagtactcgtaatctcccgaatacagccttcttcatacccggtgtcactcatcatgtcagtggcggcaatcactgacagttagaagttgtgttttgggtgtcacctctttggaatcacgctacaggaaatctgtacttcagaaggttcagcagagaacagacatagcgttcgagaaacagataaatcaaacatcaatagaagctataatgaacaacagatccatcgatgctgtcaagttgaacaacctgaagaaagtttggaaggggagagaggagaggaagttatatcttgacgcactggatgttcaatgggtaggtctcccgtttctctgaaccccacctcatttttgtattataattattttcctcctactgatcgtcggatgccatgagacagcgcaagatcacgagagatgtttactcgctattacaagtccatgagcgccttgtccaatcaatatctcaacacacacagtcggtctgtcctctcacttggccatcttgtgtctctaatatctcttttcgacgcgctctcgattagtccagcatctacttacctcttgttgtcgtttctgtcgatttgaccagatcgacaaaacatgtatcgttcgagacaatgtccttgacgcaattcgttcatcgatagttgggcttgaagtcgagcttgagaatcaagtcagtcaaacgtgtcagaaggaagacgcaacctcaggtcacccgaatgctcgtacaaagaacggtttgcaggaagaggtatttggaaagctggcagaattggtttgtctaatgccgatttgttgtcggtctttatcttccattcactgaccatactggtccttccgacaaatgctccgtcttgataatgatccaaagacattcgaaggaaaggtcttggtcatggaacgagctctgcgcgaaagagcagctctgacaaaaatgattgacgcactgggacactttcgagaagcgcttacggctgctgagaagtttgtagacaccaacacttgtgagattcttagtttctgcgccgctctcccgcgcttcctcttttcgagcccgagtcagtctttcagtttctcgacggacatagttgcttatatcgtgatctcccttataattttcttcgaaatagtgttgaatacagaaaattctcaatccatgaaatggaaatctcaactggataagcttcatgatgcgctctctcagaggtcgctagacatccaagaggcaggcaaggagttcagtgtttacaaacacgagatgtacgtccttgatgattttcactttcttgcccagtccatgtcacaacaagtcgcctggctatcgagtgttacaagttgatgagatgttcggttgtgccttctgtggtgacagggatgcgttgatgactggaaaaataggccagcgaggcaagaaactgggatagagataacggaacttcaggatctggaggcgctcagagatgtatcatttcaggcttttcaattttctggatttccacaaagcttattcgcagaccgagcgctacccagtacaagaaacagagaaagtttgaccgatcaggactgctaactacgcatttcattgagggcaagacatccatgcacctgtcggggcaagttgtattcatagacgtgatatgtaccaacgtgcgaagagacaagaaccagaagtgagagatataatgggaatataggctccatctatatttacgtacaacaatcgcgagatagaatattctaaaaagatatcccgagaagatattttgaattcctgcagatggaggacacacgagaataagggaagaagaagatgcagacggaaggtgtagcgagaaggaggaaaaagatgaaggaagaaaaagatgaaggaagaaaggcaccagacgactctattcgaccatagattccactccgttcgtatcggtcttgataccagaagctgcagcagcggcagcggcagctcgaacaggctctgtgagaattggtcggatcgttcggtcagtatacaggggaagaagagatgactaggcaaagagaacacagtggtcttatatcaacgaattgagagaacagactaaagtaaggatgttgttgagcttcttcggccgttactcgagcctgatggtcaaatctgataaaaggataacaaggatgaagatgatgaggtgtaaatctagctatgaacacagggtttataaaaaggaacaacgtatgtcaaggccgctacaccggacacatacctcaatagacaatctaggaaactaaacgcttccgggctagtatatcgctgattatcggcagtcacaaatctagatacggataaaatcgccaaaagagcatccaaagtcgtatggaattttcaatcacatgcctcgatactgacaaaaccaagcaacatgatattggaaagaaatggaacaaaccgagaccatgatttacgcgaatatcggcccagaatatcgtcaaatatcggattgagttctatgtcatatttttccagatactgtatcagttgacgaaaccaagagaatcatacggtcagttcatgaaagcagagaacatgcatgatgatagaaaatacaagagtgaacggacagtgtatagctcatcagttcccaagaccttgcatatcttgacaagctggtcatggttgtcgtgtccgtggaactattgtaccagaaaccacacaagatggtgagccgtcagatgctgcaagctctaaatagtcagtacattgctttacaagaggaagagccaggacgaacaaaaggatccttcctaaagatcatgcttgccagcatacatccaagactccacatatctctgacagtccacgaccaagaaaagattgagagcaagaaagaatgggggttggacattgaggtcaacttccattacgtcgaaacggaagtcaggtatgatatcgacgcacaaactataatcgtattcttgaaaatcgacaaggagctctggtcctttaaagcatctagacgcgactcgaacattgtactcggttccaggatgatagaactctgctaatccccagtcgatcaatctcagctgaacgtgatggccgcggtatggaaattcccagaacgaatgtattaagctacaagggttattgagagagaaaagaaggatggacgacgaacagaacgtttttcatggtcgatcatgacgttatgtggctttacatctcgatgcatgatccctttagaatggcagaagtcgagggcctgcgtacgtaggaaaaggtagatacggcatggtatgataatatggtggacagtcaacatcgatgaatcgtacgactcaggagtggatgcgacacaccttgaggagctcaaaaatgtagtatcggacatcaaagtcggtaaaagttgggtagagtgtcttgaagtcgatgttgttgatatattcgaagactatggatggtgtctttgactagagacccaggagggaaattcaaatcgatcaggtttgatgaacaaagatctgctagttggatggatgaccatgccaccaccagctggaaacatagatagtctaactcacctggacgtctcgaacaacatctagcagttcgatcacattcactcctcctcgtaaacacaacaagatttgaatctctcgtttgatctttttttttttgacaggcttcagggttttaatgacacatctttcatttgttgataagatgactccttgaaagacctgagctcaagcagacgcgagtgatagtcagagaaagatctctaggaagagccgaggttgagatgatcaggtggaacgtacttcagagtattttcctcgaccaactttccgaatgatctcatagtgatcttgattaccccaggtgacttgaagattgtctaagagtgagagacaacggccggatgaatgtcttgtcgtcactctaaagaacagagaaagcaagacgacttgaccaaccataatcccaatgttcgggtcctaactgctcgttcgcatcggcgtaaaccttggactaatcaaaaaagcagaaggcagaaagaaaaagaccaaacatcaatctggattacttctaactcaaacacaccacaagaggtagcactcacgatggatttaccgtcgggcataccttccttaagaattcaatgaagacttgatcaacgttgaacacaacggcatcaatcgctgcaggcaccgatgtcgaccagccggccggcgggctggttacgaccaattgattacgcgtcacatccggatattgctacaaacacgtgactaggacggcgttagctgacgtaattatcgatcgataaccggccccttgtccggcgttgagtaacaccttctgtttcagcttcgagtgaggtgagttgaaaaacgtgttggtactttctgatctgacaaccattctcatctttctcatccgttctatctgtagtgtcaactccgatcaaacacagtcttcatatgtcgtcctcgggtacgtcgtttaacgatggaaaggatcttcgttcctctccggagacgatctcgccagttgcagattctgggaacgatagtgacgcttcggctgagcagggtcaacctccgataagattccaggcgatcagccctcccgaatcaaagcaatatctcccaatgtacaagtctgcgctccctcccatgtttcatatgatctcccagattgcccagtccaacgatatgaaggatcagccctcgcacacatctgtctcgtctatggatttctccgacattgaatccgaagtgcaatcacctgttgcaggcggagatgatgactgggtttctccgtttatccttcataagcaaaagaatggtatgaaccacatcagcgaagcgatcggggatgatgatgatgatgatgatgaagtagaaaatcaagaagagatggttgatcagttgggtaccatgcctggccagggagatatacatcggcactccgttttcaggtcaccctctttggattcgcaggacctcgcagcacgacttgctcagctcagcgtgtccaatttcgttggttcgtctggtcctgaaacagttgacgaatattcgggagctggagagaacggttcgaacgaatcttccacgcgaatgagcgatcagaagtctacatccgaagaggatgaattgacagacgaggagaagatggatgccattgtcgacgtgtttggcgagtacgtcaaacccggagaggaaaagtttgtctccgaaaccaaagggggattcttcaggtacgtatctatcgttacacgaattacggccgagccagctcaggactaagcctccttcgtcactttttagaggggtggttattctgggaaacttctgtaagtatccctcgacggtgacgatctccaaaatacatatgatctgtataccatcagccgttctgacaagaagatggtatttgtttcatctagatttgacgacccataggttaactttcaacgccatcattccttcaccaaagttactggagaggatacaaggaagcaattcatcgagagactcggcttcgatgattatcaaagcaggcccggtaaccgtacaccggaatagcccctacaagaagaagaagaaggtctggctagagctgggacatgatacttgtagtgtttatccagtaagagatcttttgcttgctgaatgttcatccgttatctcaattctatcgtagctgagacattcagaacacgacaacgatacttatcgttccatcaactccaggacgcttccgaagaaggaagaacaagacccttctatactgtattgcgttcgtcgatcttagcctctttcgtccatgttatttcgtttatataacgtgtgcatcgttttcacagtctcatcttgcaagcagatcttgccggacgaccctgaagatccgctcagcatcagaatcgtttgtatgtccgatacatatcgacttcgttaacatctgataactaatctacggatgcgcctcaatcatttcctcaactagatacgtctcctcgtcggggcgtccttgaaacacgccggtttacttttgacactcgggaagcaaccctctcctggcgccgggaatttgaaggagcttttttccatatcgaacgtatgcggctcatacaacgcaagtcgacttcacaaaaagaggattcggaatcttctgcagagagcgctgggtttggtaagaaagaagactgggatcgaatcaagatcagtattcctcttgaacgaatcgtcaaacacgaaaccagcaactacatggcttttgcgtccttgctcatactttccgtcgataaccgaccctccgcagattatctctcagattcaacatcgccttcgtctattcctaccgctggacgcgaatctctagtcaaaatccagtttacctgtcttgcttctcatatgttcttcatcgaagcgttccagaactcgttggagctcgctcaacagagaacggatgcccagggaaagattagcgcccgtccaatgttggatttcagtggttcgtcgaagcatttcatgaaaaaatcgatcggcctatcagagtcagatgaggacaaagaagaagacgaggacgaggaagatgaggatgaatcgatcgatcgagaggcaggcgagaaactttcgaaattgagagcaatctttgggttaagcaagtctgagccaatgtggggtaaggcactttcttcgttctctcgagcttggtatcctctactctcgtctctggtttgctgattatgtatcaccgttggcactaattacctgtggccgcaatttattcagctactcgttgtgggttgtccaaaggcctgttagtcctttacggtcaactcttcgtcagctctcgatacataggattttatcgcaagaaattagccaatacaacgatggtacgctttgacagtatcttttcctcaatgcctcctgagaatccatttgctgatcaagaaatcctacccattcgatcaaatcagcaccgatttcctattcaggacgtgagaggcgctatctcatcgtctaacttccacatcgccatgaaagaatttactttacagatagtcggacattccgacatgcacttcaactttacgactaaagttttacgagatgaggtgagcgtatatatctatagcatacgatcgagccaacgaaatgtttatgagtctcatcatcttttttacgaccgaaggcaattggaagaatcaactcggcaattgaacaaaagagcaagaacacccccacaagtactcctcgaccgctcgaaaatgctctcgatccgaacgaggacgacattgtttctcaagcatctaaaacgtctgaatcctgcaatgaatacatgcgctctgttcgagaagagcataatcaatcaggcaagcagatcgacccgcatcgatcaaagactttagattccatgtgggcgccagttgtcatcccagaaggctcgatgcatagtttgaccgataagcaatacaagtgagtgaatgtcctcatatttctttctctcgaatcattttcccaaattttctactgatgttgacgcgcaagcttctttctctatcgactcaaagttaccgagcaaaaattgtcaatacacccttcataggttcagaaagtcgaagaagcgtggatgcccgacattttatcatgctgacgattgggagccggggagatattcaaccttgtatgtattctattgatctgataaacgttatcgaaaccagacgtgtgctctattcgctctattggctgacacgcctgaatcgatttttagacattgccttgtcccttggtgtacgttcaagtctactcttatctatgttatcatctacacctcactagctttcgctcaatgtgtgatatcgtctttcacagttaatgaaacatggacatcggtgcacaatcgtgacgcatgatgaatttaaggagtggatcgagtcgtacaagattggatatcggcaagcaggaggtgatccagctgcgttgatgaagctctcggtgggacacaaggtaatatattgcgcctgaataccattctttcaatgcttcttctatgacttgataaactgaacctttctcaatttgatccgatagatgttttcccctggctggttcaaagaaagtttgggatcttaccgagaatggtttgatgacctcatgcacgacgcttgggttgcttgcgaagatgcggatgtcttgatgtgagtaaacatcagacttggccgtttccgtcaccctcctactgcatgacggctgaccacactcaacaaacactcgtctgatagcgagtcgccatcagctatggtcgggattcatattgctgaggcgctcaagattccttacttccgtaagtaacatagctagcctatgatgaatcaacgttccgatcgttattctaccaaggctcagtacccagtgtttctcttgactctgaaggtgctttcactatgccttggacgaggtatgtgaacaagatcgtcatattcatcagggcagtatatttgagtaccatgtcacttatacaaactgaaaccatcctttcaacacagaactcatgatgttccccacgccttcatgacacctgcagtatgtactttatctgccctcaagatgaccgataggcttatgcatccttcatgaaataactctggtttgtttcttcataggtcgagctcacaccgaatctaaactacgcggtttgttcccatctttcttgtctcattccagcttatgaagtctcgcaattgcttaaactctaccatcttcatgccacattgatacatatacagacttatgttctttttgacaacatcatatggaaagcaaccgctagtccggtcaacaggtggcgaaagaaagagctgggcctcaggtcgactgtaagtttttcctctgatatgcttgccgtaacttgaatattttgtctgaattaatagaactccaatactaccatttgaagaacatggaactgcttgagcaacgaaacgtacctttcatatataatttcaggtacgagactgagttgaatctcgcttttcctatcatgcgcgctaacgagtttttggtgtgctattcggtgcatcgtttctatatcattagttcggctgttttgcctcatccaatcgactggaaggtcagtctatctgaaattttatatatatattttttcgtaacatgctgaacgttgaatcagtaattttgatatcaaaaggacaacatgtgagttgcttggtattccaatccatttttggtatagcttttatctgtcgaaaccgtctggtctaagtaaacgtcattctggtttacgtacagcatgatctctggat

SEQ ID NO: 2478 - DNA, 59604 bp, Xanthophyllomyces dendrorhous
cagcatgatctctggatactggttcttggccaacagtgatgccgaatggaccgctccagattcacttattgcgttcatggagcaggccagagaggatggaaagccgatcgtatacatcggagtaagctttctgcatctgtttcatttatttctagcctcatctacgttctgttgagacgaaaccttgctctgtttattccatcagtttggaagcatcgttgtgcccaatccagtcgagatgactaagaacatcattcgagcagtcgagaaatcggacgtccgggcaatcgttgccaaaggatggtctagtcggggtcatgagcttgggggtgagaaggcgcctgtggatgttcccttcccagatagctgttatccggtctgtcgtccatcttgttcagttactctaatggcaatcttttttttaaatgtttgctcaccagatcgtttgttcaattcatgtcaaattcaaacgacgtcgtcttgacagatcgacaaaatccctcatgattggctattccccaaaatcgatgcctgtgttcaccatggaggcgcaggaacaacaggaggtatggtttttcttcatgactgatatgttctacctatgcatccaaatgaaatacactctgacgctctttgtggttgatccctcctccctgtgtaccactcacagcgagtcttcgatggggtcggccaacaatcatcaagccttggttcggagatcagttctgttgggcttctcaagtaacaaaactcaatgtaggctctatctttttatgcactggtctgttcctgacgtaaagtcccatactgatgacatctctatcatattcaggtgggagcccgagtaaccaccctttccggctcagacttaaccaacgcactcatcaaagtcacccgagacgaggccgttatcgaagcagctggcaagattggcgaacggatccgagcggagaatggagtggcaaccgctatcgagtatctatactcttacttggatcgagctcgtatgtccctttcaccttgttgtttttcgttgttgtttttttctttgagagttttgttttcttctctgtagcatgattgaacgaccatctgtgatctgctaatcattttcttcacgcccgtttgtaattttgctcgcacaggcgaccgacacgtctcttacaagcctgaagcaactcgaactcttcctggcccaaagcttactttcccattcagctttagttcttgaaatccttttcttttcattctcaattgtaacatcatttcggtttttagtatcggctatgcctccttccttttgtagttacatggctcagttagtctccttctggttgagtcggctagaaggtgcagcaggtcgtttgcgatgatatttgaatttatcgtttcatcttacgttgtttccgaattacttctgtaacaaagaaatagtgacattcatgataaacaaaatgatagaagtacacagtgggcatgaagcgcagacagtaaatgaaagaaaacgtgatcagtaattaaggataagagtggtaacaagaattatagaattaaagggtcaagctaagacccgactttgaattaatgttgattagtgaatatcagttcaagaaactttggtagatacaaagtcgtgtcaatatacagacaaagaagcaagacctgtgccaatctcttcggtcagaaggatgaatctttacttggatgatccggttccaatcccgttcaccagaacattcagccagccgctcttcttctcagtcgtcccactggctccctgctcctcctccttcggatctcttgaccttgtctttccgagacttaacctcctcatcaacgggtttgaagttggagctgggtgagagcctaccggaggaagcttgtattggtgcgggaacctatcttctgagattctagaagaaccagacccttgagtctggacaggaccttgactggttgtggtagtcgtagtggttgtagtcatagagtccgcagacatcatgtgtggggagatcaagtgtatgatcgtctgctgaagagtctgggcctcgctgataaagatcaaagtgtcaaaagaaggtaagagaggaccaagtgcgtagacgtcagatgagaccaactcttggtgatgacgacaagaaagggacacgtacggatctccactaaacaactcgccaaattcccactcaattctcacacggccatcataagactctcctcccatgacatgggattggtttcccgctgggacgtccaagattactgttgctggagctcggccagagctacgtcccttagcgttctttgattgaacgaacgaaactgacgatgagttaggtatggcggacagaggtacttggaagtaagtcagtggctggttctattgacgataacgaaaggagagcagataacatgatctaatcagtcaaagagcggaaaattgtaacggattgaccaaaaagacgaacaccgatgctcaatggccattcatttgtagatcctgtgaccaggggaccgcccattgatttgctccgtgagttcctgagggctgtcgattcatccggagcaagatccctatcatcaaatgtctcttcgtctgtcggtcccacagtctgattggtctgttcagatttctgcccagagcccatcatgaagttcgcaaatgacaagggaggagctcctgcccgtccttcagatctagcgttattgtcaaacaaaggtggtgactcggtctgccctccttcctgatggagacgggtagctgacttagcgtccttgttgccaaatgatttgagtctcagctttcgaagtccagtaacaggatcagtttcttcctccaaagcaagattgtcagaagtagcgcctggaggagactgagcagagccactagaagaaccgaaggagaaagaaaatcgcttcttattcatctgcggaggtgacgcaggaggagaggcaggctgggcgattgaggtggcaggttgattagagacgggtcgacgataagctgcaggagtagttaaattgaattggatgagtttctgacaagggtttccccgttcgtggtttcattcagccaaaaagagttgagttcttgtgtcatctcgataagctgaatgataggaggaacccgaaatgtgtaccaaccgatgtgactagaacattgccattcatcacatactcccataacgctccagagctctctgcttcgccaccaaagctctttcttcgggctccctgggtctgctgagggccgctagggagggagagtttgcaaacaatgggttgagttttgtacggcctgaacccagtgggctcggctggttcaggaagtgaagcagaatgcccaggaggagaatgaggaggcgtcgatgcgctaatgtgagtagcttcgatttgtgaagtcaacgaagtaggtggggttgtaaaaaagtaaatcattgtatcagagcgactatctcggtggtcagtggtgtcaagaagtgtgtgaatatgtgaatgtgagtatttatgtattgggtggaggggaccagaatggtgcgacagagagtggagatgggaaaagatgaggaagaagagaggagaggaaatgaaagagaagccggtgggcttatatgaagatgctgatcggtcctgtcactcaaggaacaaacctatcaggtcatcaggtacggacatcaacgctaaaaaaaaatcaggaacctgaacgggccaggcacagatcagcatcacacatctcctctccatcgcatcatacgtcatggagacgaccgagtccacgagccaagacacaaacagagctgccggtatccctgtgtctctgggtgtattcctcccacactgctgacgaccactcggaaaccagggcgcaatgcaggacaaagagagatgcatgaaaacaggaggaggtttgtttcgagtggccctcaagcacattcacccttgttgccactgttttcaagcacagccgggtagacccaagcgttgaaattcttgactattcctctggaggcgtcaagaatagctagattaactatcacataagatcccatctacactgcgcaagtcttggattaaaatgaaaagatggagactggtccaactcagcgcgcttggtgttctatgagatcgatccactttcttctccccaccgttgggatctcaatttgatacatacaaaccggcctatacatacctaatcgacttctccgctctcatcccaggatggtttttatcaggctatgcacatcgtgtagtggttatgtctacgacaaaaactcttttctagatattatttgactatctacgcgagtcaaaatgcagagtcacgagatttgcctgacttatccctacttagagtttgtgtgtctgttttcagatggagtcgggtctaaacctgcttgaaagacggcattaaagaaatcttgggcgtctcagtttgatctcaacttgcgttatgtaatcgtatataccgtcgtaacacccgcacgtagctaccgtaaccattacaccatttctttctctttatcgtcttaacctttctctctcttccttactcgtacacacacttttttttcatcagcccatcatcatgtcgtcctctgcaccaggtcagctcggatcttttttcatcgctcagctattcggaaatctttggctgattttctttttcttttgtgtctggttgtgtctggcaaaatttgatagttactgtcggagtcattggaggctctggtttgtaccagctcgataaccttaccttcgtgtaggtgcttcagttagatttttcttgctttccgttgtagccttctgagatacaatctcaacgataccttgttcttgatacaatcttttccagtcgagagatcaacgtcgaaaccgttcgttttctgaacccttcacttctgtattcgaccaaaatgcgcaatatccagctcatttgtttgtaatcgaacgattaaacacgtcttcatattcagccctggggatctccttcttcgcctatctcagtcttttctctgccctctgatccctcgaaccctgggcagcctggatcagagatcgctttcatctcccgccacggcaaggctcataatatcactcctactgaggtgccctccagggccaacatgtgagctcaatattgtctatatatttttagccaatctactctctgctgatcaatcaatgtaccggacggaaacagtgcggctttgaagagcattggtgtccaggctattgttgccttttccgctgttggatctcttagagaagaaattgcgcctggtctgtgttgctctgacaattcttttattttcttaatcatgtacactgattccggttgttgttgatctcacaggagacttcatcatcccttctcagatcatcgaccgaactaaagggatccgaccgtccacctttttcactggccttggcgtcgtcgttcatgttcgtcctctgtatcggcatcactctcatgtttttgctcatacaccagctgactgggtcattggcaacccatatatgttgaatcatattcataggccatgtttggagatcccttcgacaaccagcttgtcaagcacattactcctctcgttaaatctgtcctttccaccgcatccgagtccggaggcgaagtcaaggtccacgaggacaagaccgtcgttgtaatggaaggccctcaattctccaccagagccgagagtctcatgttcgtcctactcattgcatgctttcatctctatcttgcacaatcaaatattgtgcttacttctattctttctcatgctgtccgttctttctctcgtatccaccaggtatcgacagtggggtggagatatcatcaacatgtcttccattccagaggccaaactcgcccgagaggccgagatcccttacgcacttatttgcacctctactgattacgatgcttggcgagccggagaagccccggtgactgtggaagaggtcattaagaccctacacaccaacgcccacctgtccaagaaggttgcagaagtcatccttcccgaggtcgtcaaagccgtccaggccggtgacgtcctgacggagacaaagggttgcatgaagttcagctgtatcaccaggaaggatggttggtctcaggaggccaaagaaaagttgagctgggtattggattacttcaaggaggagtagacgaagcagtagatgatagaacaatctcaaataagaatgaacgaaatagaacattgcattgtccggttgttttttttttagaaaaaaaaacttgatcgaacgagcgttctggattaggtagtatttattggatacatggcttgtagacaaaacaagtggcgagttggaatgcacacgtcgctcgaggcgtgactctatggatgataaggaggcacaggttacagaaagaaatatcgtggcagccccggaatacaaagaagaattcaaaatatttcaaagacgtatgaaagggatatcgctcatgggtggtcactccagaatggtagtatgggcacaaacgccagtttcattctgacaagatcgatctctttatgtcgactgcagaaagagattcatttggggattaccggggagataggtgatgcagtatcgtaagtatctcatacgagatacaggtgagcggaggaatcttaggagatgggcatcttttagagacttgatcgtcgaggtctctcccttgcttgcaaaggaaccccactagaaggaaagtactttgatggagaggagtgtttagtgctggattgttagcttgatggatgttttaacgcaacggatgtaggctttgagaagaactaacctcaaaagtctcctccaaaggtgtcactaacaggctgttctttcgaccgctttgcttttcaacccagacttctctcagtggaggcatcggccaaacggccgcatcaaactctagaggatcttcctcttcattcagtccctctccgtcactagatagcttccaatgtggtatatggtaagagtcggacgctggttccgagcgctgtcttgggataaacctctcctttctttcgccgactgtttcgctcgttggtgcgtcgtggtacaatccaaacatcccttccgtcaaactagatcgaatagtggccagaggcgagatgctggtgtattcataatagtcatcattcagaatagagatacctagtcctcgggctgccagatcaagaggaacgaagggggtaagagtatcatcaacatctggaacagaatgattgatcttgtgctctttggatattgatgcgcccgtaaccgctgaagaaacgagggatgtaaaggacgcctgctctggtgagttaaccaggccttcaaataggacatctttctttccaggtccggatgacatgattgaagaagacgttgttgttaacggagattcgaggcattcagaactgtcgctcgagaccgaccacgaaagagaacctggcggagactgcatggggtccaacggcgacggctgacagtccgaattcacgtctgggtcttgatttgagtcttggtttgaattgagagcacggcgggtagagccaaaggaggctgggatacgagacgtacctgccatagacgtcagattcggaagcacacaacgtctagcagaaggtagccagagaaaaaagtcgaaatctatcatggatgatgtatcagaagcttggtcggctgatgtagaatattttaacagccccaaagagggaaacgggaggagaagatcatcaggaactgattagcactcttctctcgaattcctagacgaagagggcgacgttgttatgaaattacttgcaatcatcatccttgacatcatccttctgggtgtcttcctttccagacgagggccagagctccgctccattaaccccctcagaaggagaccactcgagcttcttggcttgaccaaaacgaatttcagcttccagttcatcactaaacaaagacgaactcggcgacgttgacgccaaactttgtctctcgttatgtgtcggttcttcgtttggagtgaagagtattgactttaataaagaagattgtgaaggttgagtaattgatgaatgttcgggcgcagtcgcatgctgggggcccacaaaggtggtccgtggactgatcggttcatccatcggaacatcaacagcagacggaccaggagatgtcgcgttcggcgggggaaacgagaaggtggagaacgtctcgttcagtgcggtcgagatgactaaagaactctgagcattccgcccggaatttactctagaaattccatcacagttagcctccctcttaattgttgattgagcctggtcgggttggatgatttgctcgtccgtttcaaatgtacccattgtcggtcgaccgaggggcataaacaaatcgggtgtagacgggacggaggggatggtttcatccgacgccgtgctcaccctcgacgcagactccccttctaatctgttcttcgaactttgacctccttttttgagcccaaagctgatactacgttttctgaaaaacttccgtaacccatccagcggctcttcctttctgggcgcctgattggtggccgagggagcagacacaatggtgcttgaatctggtacgggaggtaaaggaggagaaagagaagggatgttcgggtcgactttggacagcggcaatgagaagtttctcggtttagattggtatagaatttgattgggtatctttgttggaaaagtgctgaacgaaggactctgtcgattatcaacaaggaccaacttatgttgtcagcaacacttaatcaggaacgagcaagccatgaaacagacatgtagaaaggaaatacccagaccatctcagtagtgcatctgaccaccttccggtcgtcttgatagctcaacctactgagatcgtattcttgggtatatgatttatgtagggacaagaaatggtgaatgttttgagttttcaccgccctactcactgtaggtttatccatcgacttcactgggagattaagcattattggtgtcgtcgaccaaacttcatttggtatctcggtgtttgttgaagaagccgaagacgtcggaggacaaaggacggatgccatgccgtctttggtcggtcaccttaggggaaagcagaggtatacacaaggatgaggatttggacagagggtaatgacgtccagcatatcaactgatacacgtcgagttgcttccctcttactggtttgttgttcctgaacacaaacaaagggtcgaatgttggggcgaagggcctgaaaactacgtcaatatctgtcagaaacatactgctcgtgctcgctatcaaattgtatcccaagaacttgaaatcttcagcagtcaattgcccgggtcaacatctggaacgacctcgctcaatacaatggaagagtttcgaatacagcggcatatccgagcatgacgtcatcacaagtaatgatacagcctagaatacatgtgctcaaactaggtaaagcacagaatctaaaagagatcgatagcaaaggagaccaacgtcaatcttggcattcaacctgttcaaaccaggcttgcctcgagatgcaatgacagcgtaaggaagaagaaaacgaacaattcatcatacccgtcgtctgtcaaccatccctctgctcaacatatcaataacccaagctttaagcctgcccagatcgagagcccttctgagcctatgacgagcgtgttcagttggctgattcagatttcctccatctggtcgtacttccaatatcgccgtctctgccctggcaagaaggtacattgagaagaaagacagtgttttgtagaggctcagaaatgttcttaattcgtgccgagaagaggaataacaattaattagacatgcagtgagccaattgagagaaacaaaattgaaggtgagggagcacaaacctgacactgcccacggtgacaaatccgacaatgagaaatgccccgattcttggtgtgttttcgacagtccggattcgtcttcgtccagtagcaatgccggggaagatgttgaacatggagagcatggggaggaggctcatggaaaacataagcgagagaaagctaactgagccaaccaaggagaggccgaggagaaacctattgactagactggtcagtgccgagatgggaccggaggacgaagggagatgcctgaattccggacgaatgggatctgcggtagcggcctgcgcaccaaaaaacgacagtacagactctttccaatttgcttttggcgcgctcggctgctgttgaagacctccgggaagatgatgaccggaccgatcaaacaaattccagataaacctcaatacgtcttcaagctctcctctagcaaagacgcctattgcgtctttaatgatctcgaacgcggtagatgtgggggtgaatcgaatggtgtcaatcggttcacaaagaaggatggaagcgaccgactggtcagcagatcgggcgttcagtggcttagatagtaagaacagtgttaacatgtggcccgtcacagtggtcagtgtcaaaaacaaagctgttgtcgttgtcaatagagcaactgtgtaggaaggttggaagcacgaaagaactcagtcagtgtatcctaatctgctggttccgcgtttgaggtcagaattcgatacctttgttggtggccaagccagagattcgagttcgggcgaaatgatagtcgaagccgcattgaggacaagacctgataggagaagaacgacatcgaccgaacaagcaaatacacacgtcaacccggaaagaacgagacaggtaggaaagaggtatcaatagacagatcaggagtgggcgactgaagtgtggaaggtctagaattctgaccagaaagccacatcactagcggaggatgttctccaactgtttaaacaagacactgccggaacacgaatcccgttggtgccagtgtcaatgttccgttagaggtcagcaacataagaagagaataaaggaaggcaggattcactgaccgtgtacatgctgtaatgaacgaagtcatgtttgtctcattagcacagtttgtatcaagacaggcgagcagcagttcagaacaagtaagcgattgcccccactaaccctcatactaccattgcagacgcaaggacttatcaaccgtccaagctcttcttcgtcttcgattcctccgaaacatattcgacactgtttctctataaaattgccggactcaaaacgacggtcgtcgctgttttcgatcgtctcattcctctcgccatcgggattttcgaccggattagcctttggcggaaacaagagtgaggcgtcgacgtcgtccagatcaaccccgttatcttctggatcttcatgttcaagcatattccatgacatttgttgtgtgtaatttctctgttgacttgactgttaggcgactgagatgagcctcgcgtcagtacgtgagggaaagggaggatgtatggatatgtgatggtgcgagtagggggacgcgggtgttacactgttctactcagtagctacgaatcctgatcggtgttactcgtccaccaaggtcgagctcggccccaatgatgacgatcaatcttattcacaactcggtgttttcttgttccgaccgaccgaccgaccgaccgtccgtctgatagtcgaggatgtatttaattcgggccaagctattgacatagcttaaagaagaaaacgcctgtgaccacctttcctactcgttagggactcacatcctgtcttttgatttccaccttctgctctcatgacgcgcacgtgctgatcttacattgctgatgtccctccggtggtccactgcgctgaccttctattcttacaacctttcatctggaactcgaatgtatacatctacgccgcctggactcactcctttcttggtagcctttttgaattgaaacaacatttgtttccatgtgttggaactgaatgctaataatcgattcagcttttgggatcaacccgctcacctgttcaacccctaagaaagtttttcatataataaggacacccatttaagagcatacccatcgggtatctctcttcttcttcttcttcttcttcttcttcttctcgtttcctctgcccttctctcttcgacactcactttaccagctgctcttcagacaaaaaaaaccttgaatcctctcttctcgcatcctaaaaaggaattaaacatggtctttgctcccctcattggtgccgctgcgatcgcttttgccggtctctctgctaacgcccttgtgagataccttcttcttcccatctcatatgctttgctgcttactttgctgagttttaacatttcttctctccttctttactttctcggcctccttcgcagcctctcagcctcaactgcacccagtccctcgcactcgccatctcggccgacccagagtcgacctgcttcgccacgcctgcgctcgaggtcttcttgccgacactgatcggctcgacgaacacctcgatcgccgccccgctggcgacctacctcgaggccgtctgcccggcgcccttgtgtacggatgagcagatcgagcagacgtttgctactatcggcgctggctgctctgacctgttcgctgagcttggcgtcagccccaccgtcgtcagtctgcccattcgttggcctgcttctgttttgtgtgtctctttgtctggcttctgaacgcttctcggtctgctctgcgatatagcttggtgggatcgtccctctgctgcctacagtcaaggagtacgtctgcctagaggccacctacgatgacccctccgatgatacgcccccagagttctgtgttgtcgatatcatcaactcgaccgagactctcatcggcgcgaacttgactgtggacctcgtcttggtaagttatttcgcttcgactgtataaattcgacctactccttccgtcacgtctttcggtctctaattcgttctcttgacaaatcaaatcagggtctcgtcatcaacaatggctctatcgccgacatcatccccaacaggactaccgccgagcttcaggcgcttgctcctcaagtctgcactgactgcctcaagacctactactttgccgctgtgaactcggccgaggagactgatttcgaggccaccgacggcaacaccactatcggatatctcttcactgaggctactatgttcctctccgaaatctgtggacctgatttcttcggtcagtttgtcatacgcacaagtcttaatctacctcagagacgcttcaagctgacacaaacagatttctttactcctctcttttttcgatgtttctcttacatacagacgctaacatccctgtcttggtttacaacggaaccacttacaacaccatttttgactaaattcgtttgcctcaaacagtggtttgctcattcgttttctttttcgtcttagttttcctcccgatatttcttccggacccttttcttaggttgttttactcttcatcttgtacactctgtttttaatcttgctgtcttcatatttaggaacaaagtccgatatacatccatcctattaatctcgttatttctctgaaactcgtaatctatggacttcatacgtgtgcagacggatagacaaaccccaaactcttggtgtcaaagttaaagatcaaaacgaacgggatgagcatgataataaatctcaaagcatgaattatttaaacgtgataaccctaacatgccccatgccgccaggtattcaaatggacccgggactttgccgtgcatgccaatgacgttgttaaattcttcgtctttcaatcctttccaaccgtcttcttagccagactgactaaactgactgtctgcctgtcggccaaaggtcatcaacgatgtccgtctgacgcgccggtagtgacatcacctcgccctagctttgctctgctctgttacgtcttggagtttgtggcgattcgtacatctttcttactttctatctctgacgttcgttacgcgctcaccgctcatagcctcatacgtactggcttggatcttatgaagagtttcctataaagagcatacatattgactacttatcaagctgagcgtgaccacctcctcttcttcctcctcttcttcccctcaccttcctcctcttcttcctcttctccggcttctgttaccattgccatcctcatccttctcaaaatcgaatcgatttcctcacaatcaaatcagacatgttctatgctcctctcttcggattggctgcgattagtttttcctgtttctctgccgacgcccttgtgagtatttttatttgctcctctatagatacacacatgtattttctactgccttttctatctatcgctcgtcagcatatgtttcctgtttgatagtctcacaattttccttctctcctttccttctccttcgcagcctctcagcctcaactgcacccagtccctcgcactcgccatctcggccgacccagagtcgacctgcttcgccacgcctgcgctcgaggtcttcttgccgacactgatcggctcgacgaacacctcgatcgccgccccgctggcgacctacctcgaggccgtctgcccggcgcccttgtgtacggatgagcagatcgagcagacgtttgctactatcggcgctggctgctctgacctgttcgctgagcttggcgtcagccccaccgtcgtcagtctgcccattcgttggcctgcttctgttttgtgtgtctctttgtctggcttctgaacgcttctcggtctgctctgcgatatagcttggtgggatcgtccctctgctgcctacagtcaaggagtacgtctgcctagaggctaattccaacagcgcacctccggaatattgcgtcgtcgatgtcaccgatgcaatccaaactttcgtgggtcagaatataaccgttgatctagtgtcggtaagtacagcactttatatcctggctttgacctttctctaaataccttctctatctgtgtgtgtgcctccactataaattttcatctttctaactcttttgatatgaaacatatcaacagtctctcgtttctggaaacgtcactctcgccggtattctccctgagagaaacaagaccgaactcgagcaaataagtccgctcgtctgcaccgactgcttcagagcgtacattgatgctattacagtcgcggtaaacgacacggaattcatcgaagacaacctcaactcaacggtaggagttctctttgcccaggctactgtgctcatattggaactttgcggattcgaattcttcagtcagtcattttgagcatctacataaaaccttttgaaaacttaaattggccgagagcgttctgacctgtttggtcctgattttttgttttgttttgttttgtttttgcattttagacgtttccgccccggtgaatgtttacaatggaacgaacattacgcttgttgtttgaaagcacgaatacaaggactggactgttggttttactgcttcgaatgattgggactatgaatcctttgttggatgaactttcccccttactctatgccaatatatcgtatttagtgtgattatcgaaaactatcttaattttcaattcataattatatctaatatctgttcggtctatctctaggatctgtacatatctgatcgattttttgtccgagtgcaagccaaagtcaacttactacagctatggaatttatcaaaacgatggtggaagagaagatacgagtgacacgtgacaggcggtgatttcgcctcagatcatcgagttctcgtcctgtacagaatcatccctttgtccacctcgaacctccatacaactccagtttctgtcttcactcttcgctcattcaactagatagatcttgaagtatatctgtcatgtccgacgctcgactcaggagaatcactaaggagatctcaggtacgtcttgctctttctcttttttcccattctcggttagatcctttcgggccgatcaagccagagttccgtccataaagcttggaacgtcttgatctcttttgcaggatatcgagcttgttgtttacctctcagaaatattgcttcttctgttgtaatacacgattatttggactcttagaactccaaaaagacaagaccctgcagattactgtgacaagtacgtgtcgtctgagcaggcctggcggatcgcagtcaattatactcacgtcgaccttgtcttttggtttctcttacctctctagtgattggtttgtagattctccactcgatccgaatataaatgttttcttatatatctgttcctggttaaacctaattaacgacccacgcatattgatgatcggctttgttcgcattgaataacgatgatagacgagtctccatttcatttgctcggaacatttatcggtccggtaagcatccgccttggtcatgacgttgtgtggtgtgcaccagtaaagatacagtcagaagctgagtttctgatgaattttcttttgagaatatttccagccggatacaccgtatgagggaggtcaatatgaagtagtaagttgctttgtcttgccactctctagatatgagaggagatggttgatgtcgatcttggcttttctttttttcttttttcggctcgcgcacttgttatattttgtttaggacatcattattcccgaccaggtaggcttttgagctgattcatatcgtgattcatgtatgatgctgaagataatgggctttctggctataatatagtaccctttcttgcctgtaaagatgaagtttattacgtgagtgcctgaatatttgatcgcatgaagcttgaacgaacaagataagcctgaacatatctctgtccgaaatctgctgttttcaagacggttataccgtatgtctggttttagccgaaaagtttcgagacgtagtagactatggaagactaacaaagacgatggtggctttagacccgaatgtgtcatctcagtcggtacgcctatcgttgtcaacaaagaaattcccaaggtttaatgaattcatactgagagctcgatccttattccttgcccactttctgtggagaagggagctatatgtctgtcctcccatgattatctgtagtcaaagtagaaaacggactgactggctttgtaaccgtttacgatcgatcaggccttgatatcctaaaaggtttgtctagcgattctccgacctaggcggggctatctgaatcccgagacttgagcgccttttgaccactccatctatttcagaccaatggacgcctgttcttaccctcaagtcgacacttatctccctgcaatctctactgtgcagtcctgaaccgaacgacccacaagacgctgaaggtacattcaagtctctttctctatcatccgcgatgattgagcagttttcaatattgacttcggctctcgttttgacccaacagtggccaagcattatctaacatctaggttcgtgtcaacacataaactcttgcaaacgttcagcctgatggcaagttaaattatagatcaaggatgttcatcgcttcttgcttgtctaccaattcgacagggagtctttcaactcgaccgctcgctattgggcgcaagcatacgccggtgcgcctggtggaaactcttccaagaagactgggcccgacacggatgggattgccctggcagggctagcaatggaggatgtggctaaattcgaagtggtcagtactatggccataattgatctacagtcgtccacatgaagataacgaaataccttttaccttgtagatcggtttcccgagagataggattgtgagtgggactcgtaactgaccaagggactgaaaatgtgtgtgtttgttggctcatcacactctatactctcctatcgtcggtctgtcacccaggttgattgcctccgacgactaaattatcgagggtgagcggttttctcgttgtcttgaatatctttagaaaccgcaggctcatacaaaagctgtgttggttggctgtgtcttctcctctgcccaattagaaataacgtcaagaatatctctgatgaccgagtggtggaggagctgctcaaatagaggttcaaacagagaatcgttcagctgctttcgtttctttcctatttttgatgtatagactatcagattgaatggaatatacccccttggttgaatgaagaggagaaccttcacgggcacagttggtcgagggatgttcattaaactgggcaactgacgatgtgccggcgggcccggcctcggcggcggcggcggcggggctggtacagttaaatgagatcagggtccgggaacgactgcggttcggcgatgaccgatcggtcgggcttcggtcgccgcgtctcgctcgcctgctctattctgttcgagtcatatctcttccttggtcgtatgccacttcgatgatgattgataggtttgatggacaggatgtgtgtacgtgtatgtgtttgagtatgcgtgtatgtgaatgtatgctggatgggtaacgttagacatgctgacagaagatgctcttagtggccgaacgaaggtgcatggcttcagcaacacatctgcctacaggatattgattaaattatctccggcagttatcccgggcactggtgagcggagccgagccggggttctgatattttagcatgttcagtgaaattgctttataagaatacgccttctctcgttatcatctccttcgtctttctgttttacttaaaagaagcatactctcttagcatatcttgtcttcctctcccttcaaccatcaatccttatccctgatcttccccttggtcgcctaaaatgtccacctctgtttccattccagcccacctggtgtcatcgccctggctggtgttttcgacgtacccaacggagacagaagcgattgactacttcagcttcaacccacatcctcagtggcgctcgtccgaaccttctgatgatgaggaagatgaagaggacgaggacgacgtcgaaaaccactctgggtacgactctccggacgacgctcggttcgaaatctatgaacaagacaaatttaaccagtgcaagaagcctcaaggacttcggctgaaacctgcgagcgacgaagtatggtctgaagaagatgatgacgatgaggaaggtgaagatcactggtccgacgacggatcctcattcgctggcacgtctgatcgaacgttggtcgactttgagtttgatgaatccccacctaccacgcccggaggagattggacatatgccgcgtccaccgaggcggcaccactgccttccgtgtgcagccccctgtcagagtacactccgttcgcccgctcggccatcacatcggatggtggcactcggtcaaactcgccaatgtctttgtcctcgtccttttcatgctcaaccggtgtatcccatacgttcccacttacacccattcaggaaactccctccgttcatgctcgggttacatcctcttcgtattcgtcccactcgcgggaattcaccatggtacttcctccactcaagaagagattctcgctgtcctcttcatctgacatgaaggtcagaccgatgcgcacctcgtttatcagaccagacgtcggtgatattcccgtgcataaggcacaagggaggaaggaatccgttcacgtcgatacacccttcccctctttctagaaagattgtctcatttggtctttgctcttcacctcctggatccaatcctcataaatatcagaaccaaacaccaccactcgaatcttgatattgcgagataactatatcgcacgtgctctgattgtacagagcggaggaataaagattgcgaaaggtatgcagaggttgcgttaagatttcaacaaatgtttctcgtatgggtgttgaaggctgaccaagttctcatgtgtacatgtcctgggctgttttcttccaatctaggcttccacttcttttttctccttcatcggattaataatcgggatgattaatccgacctcttgaacgtgcggggaaaatatcttttttccgatctccccaatgacgttcaaacactcaagactcatatcaagatcgccgatgcttggcatcttatccgttggcgatgtcattatctcaccaagagctttcatgtatactttgattctttctctatggcccttctcttaacgcaccggttcacattcccagatcacttttttttgcctgaaagagttatcatactccccacccttttctgtagctttttttcttgtcttttgtcttatctttttaggtacaaaggttccatcattatcatatcagaaaaaaacaagaagaaagataaaagattcattaagccaaccaacaaggtcaaagttcggaaaaaatctattagtacagcacaacatgatttacgtaaacccccaattatgaacacgaaaacgccctgaaatctgatcctagatatatgaacatgaagccgactagtctttactctccgttaaaccccgagatcctgaagttggcgacgattaaggctgtggctagacggctgagagtgttccggttgatcggcaagcatgctattcggccagatgaactctgttgaatttctcctctgatcggatcgatcgtcagatataggaggtgatggcggatgtggcgagcagaacgctaacatctgctgctggctgctcgagaacggaggtagaaacgatatggggggaaattgaaatggcgtcgtcggcggtgtagctggtgacggcgagatacgaagagaaggcacaggggaagacgtagatgacaacggacagaccgaccgaacgaagaatgggctctccgggctattcagcagcggcgaagtcaacaaggatggaggaattggggtgtatagcgagcttctaggcagatggtgaagtaacacaggacgtggatgacccgttttatgtgatggtcgacggtctgcgtcaacaaagtgaagcaagaggtgaagatgagtgagaacattgatcaagaaaaacaattcagatggacaggataaacatacgaatgctcttcccagaaggtgttgttgttggtgtgcccttccctacgtgttcatccgggctgacacctgacgaaaccagagacgacttcgacccaatcttgagtgccccacaatctatactcgctctacgtggttgtctcggcttcggatgagagatacgtgaatcacgctggtagtgaaaatgactaggccggttgttctggttcctatccgagcggctctcttcagggctgaccatatgctgggtcattgcttcgagtgaaggcataggcgtgtcgagttcggtcatgttccatataccagcgagcgaagcagagtcaggagagatcctgggctaggtatactgaagaagcacctttggtagtctatcttgaacggacgttatgtatggaaagcgaatgcatccaaggaagaaagagaccggcagcataagacccatgtttatagaactggcgaagaaaaaacgggatggttcacactcttctggttcgatggaagtagaagagacggttgttgagatcgtgatgacgagggccgccgcgcagtttcgagatcacgtgcaaaatcgattggccaacgtcaatcgatacacatacacagctttcagccgtctcagccacagaaacacacaagcaatctccgttcgaaacagtctcatcggtcttttaaaccccatgtgttttttgttttgtttgtaacattgcctgtcggcccgattggatagaaagaaaacaatcaagaggaggaggaggataaatcatatataccaccaggaggaaagaaacgtttacaacaggacgagggataaggaaagaaaacaaaagaaaagaaaagaaaacaaaacaaaacaaaacaaaacaaaacaaaacaaaacataacaagccaagacaaaataagaataagatagaatgagagacaaacgatgggagtaaaccccagttgatttgcctttaattgatgcagatggaaaatcaaaagataaggctaccaattcagaagataaacaaacgcaaaccacaagaaagggtagagcaaagccgatgtatcagaccttgtaggaggtaactaactatcagttcggaagcacatccacataacttcctgggaaagaccctttctgtttagtagaaccaatcattccctgccacctggattgcgcaaaccccacacagaacaatccaaataatcatcagcaaacgataaacggtcaaaaccagagttgactcgaacggaccagtcgttttttgtttgtgtcatctccaaaatcaatatgatgtctccttttctgaacggaagatcaccactctgtgcatgacacaaagaaagacaaacataagaaatccatacagatgacagtcagaacacatacgaatcagcagccactgatgtgaagacggtacgaacctctacgccttcaaaagtgaacttggcaacagcttgaccaaccgctccatactctttcatcaacgagtccatctcctgagcacccttgttcacttgtcttgctgaactggctccgttcgatagagagtcctcgccgccagaactgtccttgagattcaagttcgcgagcgtgggtatcaacccaccaccaaaggagttattagccgccagcacggctgcctcacttccacttctcgtcctacccaacccaatccttgctttctggcccaacgatccccaatcctcctccatcatcgagggtccgtctctatttgacggtcgggaataaatgcccctactctcataggaattcaagagatcgtttcctccgcctgagcttgatcgagcccggttgaagcttggcggtacgtttctcgacgttcggcttgatccgtctgttgttgttgggcggaaatcgtcaatgggtgcgtcccaaactcgtctattgaattcttcagaaggggaagcatcaagattatgtcgatcgtcggtgtagctgtcagttgactgtcgatggatgtacgagctggagagtgaggacggtaggtaagacggtcgagtaacagcagtgtgactagtggaaagtggaccgttgtcccacgaaatcggaccattgattgagccgttcgacccagagtttcctcgccgtcgtccgtcagcttcctcacctgctcggccggtcctgtctctttctccaccatagccactatcatcatcatatggtctatcagactcatcctctgaatcgtagtcaaacctatgggcaaactgaggagtgcttggcttgggcgacgcgatgtacgactgagacgacgggttccgctgaaggaaaggaggtggatgtgagtgcgagggggagtttgcgaacggaagtgacttagcaaccattgagggtgagggtggtccgccattaaagtactgatccgcctgggtgtatgattcagaggtcgttagccctggagaatccaaaccagacttggaatttcctcgctttctactaaaggacgacatagatgaaaacaaacccggcctggtaggagtcttgtttgaatttgattttcgactgctagtcgagtccgctcgagatcgggttaccgcgttgtcagccttttgctcagctggcgtgtcattctttcctcggctgcccaagatacttcgacttcgagttcgacctttactttcgagtgcgcctgaaggcttgaccgattcttttccgtcggaacccatccctccgaacgcataactgcttggactagaccctctccgatcgttcggtgaatcgtagcgattctcgcgatccgtcccatctccaaattcctcactccaagtaggagagtgcgtccgtgcagtgaaattttcgttggactcatagtttcgaggagaatcttccacccatgcccgaccgcctggcaagccggtcgacgtagtcagcttctcaatcaacaactgcgcccatggtgggggtgggaccattccagatagtaattgcttcgaggtcacgtttgtcccataggccagtcggttcgcactgatatgatataaggcatgagtgcatgatgaccagacatagccacagttgtataacttcaggtcacaagtaggcactcactcttgtcgctccacaatcacactaccttctagactaactccgccaaaaagacctttagttttagagtatgtgaacctgataagcagtttgactggatcagtgacgaggaatgagtctccaaacttgacacaatccacactcacatagccgccacttttccctttgtgttcaatgctcccatcccttcggcattccgtcccagtggcccgacagccaactatcaaacagtgtatcagtcaagactctttgcttctaaagatctttgatgtccacctacactcatgttccctccaatatttaagctgcctgctgccatgaaactgttcactgccgctctagagtttaagacctacagcaacacagatcaaagcttgagaaacgtgtttcctgaccagatggacgaactctgcgacgcaaagatctggcaaacttacgatcaaaaaatcggtaacttccgctccagcctgaccaccaagtccaacaccacctgtaccaatagcagtaggcgctgaccacgtgccgtcggacagccgagcgattaccacgccagatcctgctcggactgaaacgagaaaccctgctttgacgacggtaaagatagcgaaccctttggcgtgctccatcacttttccgtgacgcgcggagaagaatatacgaaggacgcgttagtcgacgaatagggacaatgaagccgagattgttcaccttgtcgaggaatcatcttgtctaatccgttgtttgaggaatcgacaaatgaccccactaaatgaggaaatttaccccggtgatcgtgccaagaaaagatgatgtcgacaacaataagcatatacagtaagatatccatacggattatgatactgatgataaaggtacaagggagaatataggaacttgcgaatttttgctgcttttctgcattcttcgggaagattgactagtacaaggatgaagaggatgaagaaagtggaacgattgcagtaaccaaggtggagcaattccgaacgagcatccgaaagaaggttgaaagtgcaaaattgagtccaaagaggaagaaaaagatcagaggacaaaatgcaaagataatcaaggacggatcttcaatcctacctggtaccggagagttgagacccatgatgtgagctgtctctacgagaagagtcggacgagatggtagttggaaaagaatgatttgagaagatgagccgatcccttagtaaagagtaatatgcgtgttagggttggaacctatatctcgggctatgcccgtgcctgtgcctgtgccggggcgagcggaccggccgaggctggtcgttcggaccgaacgggcctagactcggcctattttgggtatatttggggcgttgtcagggcacctaatgattgattcgtcattgatcaccgcttttgtccacgtgactaacgaaccccgagaatcgcaactacaacggcccagtttcagttgctttccttcccggtcttgtctatatggatgaaccttctgtccatcatcctgtgtactcgctcaccttcttctgctgtccagtgacttagaagaagacaacactagcttataagagacacagaacgactaagacaagatatcatttcgtaggctttttcgctatcattttgcgttcccggttaggaaaataacgttttccctcatgcctcatagtaagcagtcgtcatgctaggctcaatacctcttgggaatctcaactctgggccgcttcttcccaagcacaatcgacatgaccggtcctcttctggctcatccagtcctcccgtacctccctctactggacgcatcctcttcaatcttcgtcgttataaacagcttcagataatcgcgctcttcctggtcgttctatccctccttgttttctacactcctgatcgagcctctcactttgagctcttcccttcgagcggtttcaaatcatcatcatcatcatcatcatcgatatctttcgaatccacgaacaatggagaaaagtctacattcccaagcttgtcagatatcggccgggctattggttttacaccagagggcaccttcggcgtgttaggctctggcgagaaatcttgggtcaagctgttcagagaaggtctgacatctctgggaagagaagccgacgaggcattcttacttggagaaaccgaaccagttgcttacatctctcaactcgaaacgttcatacagatgagctttcctactcatttgaaggaagacatcttaacctcggttcgtactttctggaaccgcgccgctattgaccctgaagacgcaactgcggacacactacggaaacttccagcgatggttgaatacaagaacgtttggcagacggacaagaagacatcggacgccgatggaggaggctggacggcaaaaaatccaggatggaagtgggagttgatggatgatgaaaaggcggacgagtggcttaggcaaacgttcggggttgactcgcaaagtcaagaatccaagagtacagtcgaggctgtatggaacgatctggagctggggattctcaagagtgatatgtggaggtatctggtgttgttgtgcgtatcttcttgctccttagccctccttacttctcggttcaacagtttctcccaaaaacgggaataaaagggtctcttgaactgaatttcttgcgagatacatgtctcacagaattgaaggtggcgtttacaccgacacagacaccacctgtctccgtccagtccatcaatggggccgaggagctgatacctacccaggatcccattcgtacgggctaccaagtatgattatcggggttgaggccgatgtcggctctagagaagactggcacgacgtaagtctattaacatgttcatttgttccgcagttatttcaaccagcctgatgagtgtattttcgatgttttagtggtgggctcgaccaatacaaatctcccaatggacgctctcttctgcgccacatcacccgatccttgtagatgtcatccgcaggattcatcactcaaccaccatcgcgctctcctggctcactcatagagaatcactcgcagtatcttatgaagctgctgggaacgctgaaagggcaaagaaaataaggttgataagtttgcttgagtcaaaaggtgttgaaggggaggatgaaaagatcctgggcaagggggtgagcgtaatggagtggacggggccgggtgtttggacggatgctgtcatggcgtaagttatactgttcatctttgctctatttctctttttttttgtctgcttctatcctcgaacgactggaactgatgttgcataagctacaggtatctgaaggcgcgacatcaagtaacctggcccacgttcaaaaacatccaacgtcagatctgtttctctttttctcctattcttatgtacatccgttatctcacgtaatcctcatcttcattccaaacacaggcccattacgtataggagagattgttgtcttacccgtaactgggttctcaccaggtgtcgggttgtttggcgcgcagaaccagtggcatgaagaagctatggtcttacattctgttcgttttttgtgttctttgctcttctttttgtggtcgagtcttgtactgatgtattgatattatgatttctgtgtgtggggcaattgatcaatccttctgaacgcacatacttttagttctctggaagttggaaaactgatggataagacttatgcattttcctttgttctcatctacattttctccctcctgataagatcttagttacacgaacattatatgtcctttctcgttcttagctgtacctagcttcgtaacctttttcatacaaaactcttccccctttatacaattggtacccatcgctgcatgatggggcgaatgtaattatgtcaccttaaaccgaagatcaaaaagactccatttctaatcagaacccaagaaccctcacgccaaaggaaagaaaaaatgggttctcaagtttagaactcccgtccgatacctcccggtccaaagtactcctcgatctcccatcccattccccagtacttgacctggcatttcaatccggccgaagctccttctttcgcaatcctctcctcgagctccttgtgagttcggacgagggcaagatcttggctgttttggcccacagaggcacagaggtttgaatgacagaaagaagaaaaaagttgaatcagagactttgaagaggaaagaaaaggaagaaagatgaaattgaaaacgaacgggcggagacgaagaatagggcagaaatcgttaccaccatcaccaacgtagatcaccctgtcgaacggaccgttctccttgatgtaagcatcaagctcttcgcctacagatgatattaaaggatgaaaagacatgacgcaaaaggagagaggaagtctgtctgtcagcatgttgaaattcctcaagtttccgcaacacagaagactaagagaaaggaaatatacccttgcacatgttgggagagcagccgacctggcagccatgctgagtagcatctggcgagatccttcgattgatgatcaatttatcgttctcatcccacttggaagggttggtagtaattcggtcgaacaactcggtcaacctgtggtgcttgaggatagtatcgatgtagacctggttggagttcgagagcaagaagaaagaagacttgggctcggacgcagccttgagaccaagagtagctcgcttcatggcggggtgctgtgagaaaagaaaaaagattaaaagacgaggagggaacgttaagatcagcttgaacactgaatacgcacatacgcgcgcgcacatacaccttcactctttacgctacctcgcacatcacccaaggatagaaacacgcacaaccggcagatcgcgaagggcctcctcgatctgagccttggtgataccctgctcgttttgaagcctcttgacagtgtgtgcgctataacaaagaggaaagcacgtgtgcgaaaggtatgagagctggttagtcaccgacaacttaaaaaatgggctgtttggctttcatcaacatcggatgtgatgtccgaaaacgaagggtgcaagtcaaggtcactatcactagctgggtaatactcacacagcatcagtgtactgcatagacttggtcttgctgagagtctcaagttctcgccttaggggggtgtagtgatactcaagcacatatcggtcggtatcctggtccacgtaggacctgtaaggagactacgtcagctaacagtactgtgaatagagttgaaaaaacaaaagcaaagcgagcactttaacgactcaccaatcaaaatcaaagactacaagttgcgatttgggggacatggtgaagttagtttgaacaagttggttgtagagatacgaacaaggcagggtaagaaagaacgaaaaaaaagtctaaaaacgaaattccttacataagcaaacgctaagacggggcatgatagccgcttacgtaatatattcatataatattcttggttttctggcttctgatgaccactacccgtcagatcagatacatatatcccatattcgctcttcattgggagatgcgacagtcatgatcgagaacaacaattctacaaagcttgagacggcacaacatttcaacgagagacgaggtcaactttgtccatgaagcttaaaagcctcttctagtcagtcccgaagctcatcatccctagctggagagaagagaagagatttgaacaccaacagaaggagtgagaacttgtagtatatttaaaagcatcctaggttcaagagcaagcatgaaaaggcgaacatggtgtaagtggtgtatgtgttaagcaagtgaggtttgtctttcagggacggcgcagatactatgtatattgatgagataagatgaggaatacatttattgaccaaaccctacgtatgatcatcagattaatcgatcatcttcaattcgtttttgacttcgatttttgtctgcatgaacattctctttctgaggttgacgatgatggcatcgattttccagtcggctaggccagccttcatcttctttttgatatcatcgatctgggcaccaaatctccgatccgtcgggtcaaaccagaacagtcgtagttccgttcgattagactcgagcgctcgttcattcaccctcctggataccacaagagttacagacctatcatcgctaggtgtgtctgatcgatagtgaatagagaggctacccggaagaaacaagggcgcgaacaaagtataaccgaacataaatccagacagatagacgagatgagataaaaaacgaattgttgcaagagctcaacaaattccagacctcttctgttcttcttctctacttccatgaaaccttcatccatttcaacattttctgaatgagtagtcttcctgaagttcactatgtcctttccgaaggaagcaaaaagtgggacattgggagctaccacatacgctcgcgtccttttctttcgtcgtcatcatcgtcgcaaacggtaggatcttacaagcaccgttaacatcaacattttttcgtgatccacaatagaaaagacatgttgaactaagcatgtgatggaacaggataagtatatatgtatacaatgcagaaacaaatcagacatggactatgaattattcaattggctcggatttttctacatgttttcgaatctgaccagattttcttacataagcaacatcgacacgtgacttcaatttttactgtgtggtctttcacctttttgctttagcaaataattgcagctcatccatccatccaccgggtcaaccagcttcgcctttcttcctcttctcttctctcccctcccaaaacagatcaacatggccgccaatctgaaagccattgctcccgttccctcggcgtcggtgcgtagttaataattctggcttagttatcgtggtctgccttgttatatttgtactgattattctcttctctttggactccacctccttataactgtccgccttgtataggacttcttggacattgtgtaagctgacttctatcgaatgcgggaatcttgaatgcatgttaatttgattccatacattgtactcccatagcttgtccaagacccagcgaaagacgcctactgttcgtgttgctattcggactcctattgtcgtagtaagacttcatgtggcctaatattctcctttgacttgtcttttatctctttaggtcattcacaagaacttcaaggtatgtcgtgaactgtcatttaatcttgacctatttcattcatgcgaactaacgattcgagtgtacctctcttctgtcctacatagatcagtcgtatcagaaacgtaggtttctcacccgcgccacccgcgctttgaacctgcattagcccactgctaacctggcctatggcttcttcatccgtcacatcgactttccagttctatatgcgaaaggtcaagttcactcaggacactatcgacgagaagctttcatctatccttcaggagttccccatcctcgacaacctccaccccttcctttcctccctcctaaatgtcttatacgacaagaaccactacaagcttgctctcggtcagatcaacacagctagacatctcgctgatcaagttgccaaggattattgcagacttttgaagttcggagattcactgtaccgatgcaagcagcttaagagggccgcccttggtcggtgcgtattttgttcactccggttacgtctgacccttggatggtccacctctagagaagagaatcaaaatttgacaatacgcgccgttgtccattgcccgttttattttcacgtagaatggccaccattatgaagcgacagaaggacccgttggcataccttgaggaagtccggcagcatatctctcgtcttcctactattgaccccaacacccgaacactcctcatttgtggttaccccaacgtcggaaagtcttccttcatcaacaagatcacccgagccgatgtggatgttcagcctgttcgtttctctagtgctttctatcgatacaattttgccactggaactcacttttgccctttcttttactttttacagtatgctttcactacaaagtccttgtttgttggacacatggattacaagtacctccgatggcaggttatcgataccccgggagtgctcgaccaccctctggaagagatgaacactatcgaaatgcagtctattaccgctcttgctcatcttcgatcagccgtgctctacttcatggatctctccgagcagtgtggttacacgatcgaggctcaggttagttgttcctttgtttgagatcgttctcgtatgttttctgaaatacggcttgtttgcaacatattttttcagtgcaagcttttcaactcgatcaagcccttgttcgccaacaagccaaccttgcttgttatcaacaagattgatattgttcgactatccgacctgactcccgccaaccgagctctggtcgacgaaatcaccgcccagggcgatgtgactgttgttcaggcgtcatgctattctgaggagggtgttatcgacgtgcgagatgccgcttgcgacgctttgcttgctcaccgagtcgaggccaagcttaagggatccaggatcaactcggtcgccaacaagatccacgtgtctcagccgaaacccagagatgatgtcgagcgaaagcctttcattcctgatgttgtcagggacaggaagaagtacgataaggatgatccggatagaatccgaactgagaaggacatcgaaaacgagcagggtggaccaggagtctactcgttgcccatgtggagtgcgtctgttcctctagcctcattttctacatgtttaaggtttcagctacttaatgcatcttttttcatttcttgaactatcttagagaactacttgttggccgatgactcttggaagcaggacactatgcccgagatcatggacggcaagaacgtggccgacttcatcgatccggagattgccgagaagctcgaggccctcgagcgagaggaggagcggctcgaggccgaaggtttctacaagtccgatgacgaggagattgtaagtatttccgcgggcttgttcgtagtgcacatatcgatcgctgaccgtatgatttcatcaattatctccagttggattccgacgaggaggagttccgatcgacggccgcgcagatccgagagaagaaggcgtctatgaagcgagtgtctcaggacaagaaccggttgaagaatcgacctgtcatcccccgaaagcaccaatctcgaactctctcccagctctcaaccacccttcgatcggtcggtttggatccttccagaatcgaggagcgagccaaggtgcttgccaaggctcgaggtgtcgaagtcgtcgatggcgcccaaccgagaggtctggccattcctggagagaggcagggcaagaggagaaagggagcgagcaggttggaagccgaggccgagttggcattggaggctgccaaccaggagatggacgtcgatggggacgaccagcctgccggcaggtcttccggaagggttgctgccgtcaacccgagggcacccaagaccaacagagctactgctggacttacccagtcgcaattcgacaagtcaaacgagctcagggactttgctcagcgaccgcgaaactacaaaggaaagggtggagaggccgatcgtgcaatcccgatcactcggccgagatggatgcttgccggaaaggttcgtttcttgatgtttctttctctccttccccgtctttggcagcaaagttactgatttgccttttccttgcctacttcgcacaaacagagaaaagccggaaagaccgactaccgataatctgctttctcttgcgatcaaaatttcacctgcctgcctgcctctttccattttgtgggctcccaagtgtttcccgtcttccttctctattttcccctctatcttcttatactttgttcccatataggcaattctacatattttgtttcctgtccttttcttgtggtcgcttcccttttgcttgtgggttattacatgactttctcttgatgattgcagctgaggaaaagtaaatgaaaaccttatatagccttaagtaaagagcttgacaacatatactctcgacatctctaacttgccatgccaactaactttccatctttttgcctcttctcccatcctttcttgctttgattgcctttgtcggcacaatcgcaagcactcgtcaagccctgtccgcttgctcacctcctcctcatttgatacgatggtttcatcgcttgccgtcgcttcgtcactagctcttatatgggcaaacaacgtccttggcgtgtctgccgccaaaggagttcctgccgacacgtctgatttgactgaagccgtgcgttccctgcattcatctcatcatttaccatagctctgctatcttccatctctactaggtgtaaacctgaatcagtgccgtgccttctgtccaaaatcttgaaaatacgattgacattggtcgttcttctgactatttctgtgcttctcgaatcggggggctggcgattcaatcttgggttatcatctcagacggtaccattgagaacacattccttgtacggtcgtaagtggcggtattcctatatgattctcttctctagatttatttatcgtgttcttcataggagatgaaaggaagcaactaacaggatgtggcttgccttttcgtcggaatcgactgtgctctatgacagcctacgttgacaatgatttacaaagtaagacttggctcgtataaaccgaatttatcttcttcacagagcattttgggtgcgcgaaactcatcttgcttgagtgaatctttgaacttttctgatgaaaaatcaatagatagatggtgggacttcggagcgtgagtgataatcttaatgcgttcatctttgtatctcttgaatggcctatcgacctcgtgttacaatctcttcccggaaattccagggatactatcatcaatacaaacaagggaattcgtctgactcaagatagaccgtctgagcaaggttggctttggtctcgactaccgttaacaagtccgaactatcagatcgagtgggaattcaaagtgagtcttttggtcgttgaccaaggtttcgttaatcagtagtccataggagacccactgatttctgattttgtaacggaagattgattctaagggatcaaacatatttggagatgggatggcaatgtggttgacaaaagatcgggctcaacccggtcctgtattcggaagtaaaggtgcggtacctcgttctatatcaatctaccgatgattctgatcagtaaacctttctttactgctattttagatcagttctatgggctgggtgtctttttgtacgttggttttataaactcttgacatcaacctttcggtactactaagaattctaatcagcgcgattattatatataccattgcgctcttttggaatatagtgatacgtatgcaaacacgagacattcgtacactttccctcgagtgactgccatgatgggtgatggccgaaagtcgtatgatgctggtacagatggggctcaaaatgaattggccggttgctcggtgcgcgctcgttcctcgccctctgtcttgtggtcatagcccgacatcagattctgactccctctttgttctctttctaaaggcaaactaccgaagaacagaggtgccaactaaggccaggttgacctatattcgagggcatcatctagaggtcagaaacattgttgtctggtgttgatttgtgacaaaagttctgattatttgttttcgacacacagctcgagcttcactacaaaagtttgtttatctgtacattcgtaatgtgtttatatcaaagttttgacacttatacatatcctcctctttatcattgcttcgattgtgtctaggttgggacgaatggacgccttgtttcaaagtaaacgtgaccatgccttccagcccatatgttgggttctctgctctgacaggtcaagtttcagaatatcacgagtatgttgtttcttatcaacgtacctacctcctttgaaaccgggattgaagtttacgcctccccttgatctttgtggatgtctttcctctgctatttgtctagtatcatctcggtaaccgcctcatcggctgtgctgagaggtgaaaacgcggcgttgatgaacagaggcaggggtaacggtcatgctgataggcacgacaagaagacaggtctatcatggtttttgttcatgcttaaagggataggttcgtctattcttcttttgtgcccagtttattgtacccgttttgaaaaatcacgtggagacttatcgtgcgtttgatgtcctcctgttacagccctctttgctttggtcgcttttggctattcattctacaagacttgggcggcaaaagcacggaagaaagctcggatgaagcgagaatggtagtctagctcagagagaggacatgagaagtcacaagaagagagagagaagaagacgtttaagtgggagtggagatgagattgattgattattgatcttctacgatattcatggctggaccaagtcgatctgaaactttaagcgtgaataaacaaagaccagacgaatgatcacgagacaacggggcgggcaaacaagccatggggagcattcgctttcttccccatcgattgatgaagaacgagaggttctcttcttgagattcagtcgaggctattgagacgatgtattctgtttgacatctatcgtttgtctttttttgtgacctctgatcttatatcaagattgtctagaggcagtgtatgccgacaatagcaagcttctcacgtcttgtgcgatcatgaacctgaccagaagaccatctgcacaaccaagccatctgagtcctatgccagaaatgttcatcttctaatcgctgtaacgatctcatgtatgattgccaaggctttatacttgacctctagtccacctgacggcctcttcaagtagttcccagcctgattcgtttgattttttttttcgttatgtttatcgttcacagaaacaacaccaggaaatctttttagtacatgatttgacaacgagagagcaacagacaagacaaacaaagaacggaccttctccttggaagaacatctgaccaaaagggtttccatcgttccaatcagccgctacccaaacatcgggtacagcttctctcaacttgatcggcagtcggtcgactgctttgacgatgttgtcagcataattcctgacagtgtgagacgccaaagcgagccctctatgcgtgggaagcgtgaagagtgcagctacggagactgagtatcccaaaatgaccaaagagaatcttgatgagcgggtgacgcgagcggatatgagggacgagggaaatgcaacgaacgatcttcgtagagaaaacaccaggaaacgatccggcgctctggatcttctaagtctcttatacaggaagatagatggacaagaggcaagaacgcctcaacaggatatttcccaattccttggttcaacagctacatcactcaaagaaataatatatcagataccggttcggtcgagacaaggcagctcagaggaaacaggacgaacatcggccatttcttcggctcttacaacgctcttttcaaacctatcggacaagatcttcccactcgccacctcgccagcttttttctgaaccttgtaactctttccacctccttcagaatccatgctctccgagcctttctcaaaatcatctaccaatccgtcaggaagacctccaaaggcgaccttgagacctttgcatgtcgtctttagggcctctaaaaactctgtgagaagggcctggcgggaagtagatgttacggatggatcagaaaatccaaaatgaatcttgaatcttccttccgaatcgttaagcgggcgcacgaaaaagatcgcccatgatttctgctccttctcttccgacgtcacaggtgctggtgaagatgatgagaacaactcggccggtcgttcaaagtagaagatcttggattctgcaccgtaaaagtctaggacagtcgaccattctggagccttctcttcgcaaggaaccgggtagtcagtctgagttatgaatgctgccaaaaggacggattgcagattcaacgattggggtaatgacggcctatcagatagcctacgaacgatatctatcagagaaggagcaggggcggagggcatatctgctagttttgttcttttttttcgcgttcttctctagaggatctttcttattggtgtcgtctaggagcaagccaggatgagggtctgagggaaatatcattctgtagacagtcttttataagtgttggcttggcgttgagcaaaaaagaagatcaagaaatggaggaaggaacagttctcaatacagagggcacgtgacttgacctcatattctttctccaactccttcctattatcgtccactccttgtccaaactatagccaagactagtcttttcgcgctggccggcctgagccacgagagcaggatggaggattgttttgcaacacttgacaacaaatatatatattggcgcggacagatcgggaaaaacaaacgtatcaaggatacaagatagtacagaagaatgataagtcgaagcaggagagatgatagcctgagctgcatggatttccttgagagaagggacgatatgcttatagagaatcaaagcgcgtagacaaaagaggtaaggaagaaaagaagaggcagacaagaagcagaaggcagacagcctacgctgtgaagcaaaggtgacacatttctacctgtacctgacgaaatgttacaagctgaagagactgaacacatcttcccaatatggtcaacttgatttctagttctttatctagataaacctgatctagctgttctcgaccttatgaaattccccgccgttcggtagaccttctctagcgcctgcagcgggaacctggtccagtggtctaggcaccgtctggcccatgttcgctatcccagacgagcgcgggttcttgtatgcagatcccgatttgattcgattattggatgtggattctctgtgattgtgcatggccaatcatgcgtcagtgttgacgtgcaaaaccaagacaacatatatgatcatcactaaaagatggccggaccttatttcggcgatgagatcctcaagtttgtaaaaaccaaggggaccaaaagggaagttcttgatgtaaaacgaagcaagatctagtggcccgaggaatgcatggagtgtcagatatggaagcgaagcattcagcgggtcctctgtttgaaatgatgatatgtcagcggggtgcatatatacaacgtcagtttggtagacttgatgatatgaaaagggcaagcagctgacggaacgaactgaaaggtccgacaacgaatcctatactctctgtgagcaagctagttgatccctgaggtctcggagggaataccggtctgctctctacctcttcatcttcgacagcagtactagaagaaccaggcgagggcgatcgggcgatagccgccgaagagtatggatagagagacgcagaagaacggatgaagcgttcatggagaaggttgtgggacagttgcagaagccttgacaacaaaggtatggatgctggggagaagtcgtatacggtcgataggggctgcgcgatcagcagagttatgtggcctggattagaagtagaagaaacagtgtgagcatttgtaaatttgacccaaataattcaaggatggctacagcatgttctgtatcaaggaataacttgtgagcagcgacgggcaagagcacagacaaacgaacctgcagaagcaagctttcttccttttgcgttctccaggagagcagtgacttcgctatcagagtagatgatctctgaatctcgaagtagctcatctggaacacaaacaggactaactctgctgttgataccggcaccggtgacattcaaactctcaccacctccgcccaggggatgactagaagaagaggacgtcatgtatggatgatagacgtctgagtgatggatagatgtgcaaacgcaagaggttaacgaaaagaccaagtcacctgggcctataccttcaacggtgactaaccgccacattgaggacgccatctgagataaacagagcggacactgttccaaccttcaaccacgatcatcctcccaccaacagcaagtctattcgagtccatcttggtcaagtacatattggagttctgagagatgtccgtcagacagctctacgctcgtgagtatgcttggaagatctcatgtttctgttgacgcttgttacaaaacaaatgagacaacctgttcaagtcgctttcttgattactatgttcctatcaccttacagccccggcggatgacttcctctttcttcctccgactcttcctccttcctcctcctcctcctcacctgctcgatcatctccttccagaactgtagctccgcctgctcttgttcttccggaagcttctcggtcaaatttcccgtctctatcctcgaccaccaatcaatcttttaaatcctatcgtgatcaattcgtgtggacattgggaacttctttcttatcatccttccttgctcagcctttcgaatctggcaaggtactttctcagattcagtacctacctcggaaaagacttcttctctctggcggagcctccgcgaatgcaacctcatccagagaacctccaccggtttccgaggagccaatagatcctactgagctttctgacgaggaagatgctcaagcatattttgaagacttagtcactgaggcaaacagagcaaaccaggaagcctcactttcagtccccattcggccgagagagacggatgtggacggctatgtggtccgaagaccctcgtttagaggaaggtccacaggcctcgaccggccggaagatcttggcgaggctaaacttgagtggattatggaaatcgggtatagcggcgatgggccttgggcaatgacaaagaggctatggaatgaagaaggtccggctggcccttggaaaggtcagtgtctccaatcattgtccctctttgtatgattgaatagctgacagctatggtctcgaatgacatcaacccacgacggtctccgcttaggtcttaccctttcttttttcctcgacaatatcagcaccttccttcctcgcttcctctcctcatttatctcgccgttcttcccctcgctttctgctccgctttatacccgaccttctcttgccatgccaccacgttcgatatggactcctctctttccagctctgctctctcagacactctccgggttcctcctgtcgccgctgtctttgctgcacactcgattaattgctcagccgacacacagacttcatcgaacatactccccgacaaatcctctacaaggacttgctaccctccgcgcacaagcaggtagctgggcgaccctctactttcacccgagacttctctggccgacattattggatgtgaccgttcgggctggtgtcgcactgtccattccaatcatcatcgagcatgttctcggcttcagctcaatcaactctcccttggcgtacaaggctctcgaagcagcgctcaacattggttctctcgtcgtcacccttccactcgagacggccagacgacgacttcagctacagtcaatcggaccaaccgccgagcaaccattcaagacgtgcgtcgagatccgaccggcaccatatgccggtgtcggagagtgcctgtatagaatcgtcacagaagagagcgttagtggaggagatggctggtttggaggtgtgaagcagctgtacagaggacttggcatgaatttcctggccaccagcgccgttgtcggcttggagcttgggctctgggcgctgggtggagagagcggcaggactggaggtgaaaggtggatggagatttgaataatcttttactcatttcctaaagttctgacctatccctcatctccttcctagtccatgatcattgtctatactcaatcttaatcagaaagtcccaagattctatcctctacttctcttgatttttatcaagcaacggacgagtgctacatatctctgcctgactttgagttcatctgtcttgttcttttctattctctatgtgtcaacatgttctctttcttcttcaaaagatacatgatgactttctcttcctctcagaggcttatctttatcgagtaggtcaacctgtcggatctcaagatgaaaactatgatggcctatcatatagttggttaataaacatgttgatggatacagtgttgatacattgcatcagaaggatccctcgttgaaatcgagaattaccgcttcctgaacaaggggagtcacgaatttctaccgtatcaaaagtaaacaacaccatcaatacttatcaaagcaagtattttcgagaagaacaaacgacgagacccaccttgaactcatcatgggctggatcggtgtggagatagtattgcctgtcatcatcgttctcgaattcaaccagaaagatttccttttccagttttgaaacagtacccaagacgcgcatttagcatcacatatctatcatgcggacagacgtatacatcaagagcccacctgaagacctctagtcataccctctggactgttctctttaccacctactaatcgcacgatataccgtgcgtcggtcgtgcccgatcggacacaacgttccttcagttcaagaaatctcgaagccacggttgacacagacgatgagttagcgtcgagtttatatttaaaagctacgatgtgctgaataggcattgtatgtgtttagcacgacgataaaagaacgtatatgatgtcgagatggtgagatattgaatggtaagcagcggctagaaagagacgagatcaggggaaattgattacaagactttgattacataagattattgatttgaatcatttgagcgaaaagctattctactactggttgatctctagcaaggatcaaattcgcccttgaacggggatactcagatatttacttgttcactactggaggtcttactaagtccatcgtcgttatggcagcgccataccgaattcagagaagcagagtgtccgaccagcagactatctgcagtgctgttggtatactatttcataatgccgcggtgaatttgattatacgagggctttgctgaagggaacggtacgaaggacctctgattatttcataaacatattcatatggagcagatagtttgaactaggaacgtagtcgtcaatatcacagatagatatttgatgtagatgctcaaagttgtctagcaaatgcgcgggtgtctcgttgtcataagagtacatagatgatgtgtgttttcttcttggcaacctgttggtagtgtaggctgccatgtcgttaatgccggaaatagtcttcatgctgaaattggcgaaaagaatttagttatctacacacatcctaaactcgaacttcagtctcctgcagttctcctacgcacacagcgaagaaaacgagctcccacctttattcgaccttttcgatttgaagaacatagccaggttcttgatggcttccccaaaagtcgagcatacttggacgtcttcctcgatccatttaggtagtttatttcggatggaaggttgcgaaaaacgtttgtcgacgaggatcctgtatcaatgagcataagtgatggtgtgttgttgatcagacattgaattgcctatcaacaaatgtagagaggtaacaaacaaaacggcataatcatttgcatgccgtatggctcttcctatatataaagagagaggtagagagtgtatcagaggcggcgctcagctttgaagttacacgaagaatcgaagctcgaacctatagattgattcactgctttcatgcagagattctatgatatgtgggttatattcggtgttaggtaggtcaagtctgggagttctttgaaatgtggatgactgaccatgtaaactaaacgaaagcaacaacgaacaagaataccagtcagtatcactgtagggattgctgaagacatatggacaaatctcacgttctctcccggctttatcgccctgcggctgcttattagcaattgcgacatctgtcacatacttcatccgttccttgagctcgcatgaggtcaagttcgggaacggaagtccaacctgatcggaatgaaatgttatcaagatgagaacggcccttcgaggtagttgtgaagcagagaatccggaacctaccatgactaccgctctcgcaagcctgcgccaacgacacggcgatacagagcatgagataccaagtcttacaaacgcgaagagcgatttttgtttcaagctgagatcgacttacttgtcagagaaattgataccttcgctcaattttgcacctaccactgctagtaaaagcgcaccagatttcttgttggtggcagatgatccctgaaagagaataagccgcgcccagaatcgaacgagagactacgtcaacgccgatatagagacaatggtgatgaaggaaagacgtaccaagttgatagcagtcgagtactcctctagcactgtttcaacactaccaccggcttgaggctcatagaacagctgaaggtaggttattgacaacaaggcattttaagctgaagatcacttcaaggaaacaaaagccaaacttcgatgtagcacgaactgattttttcattcctaactttgctagcagaccactcttttcccaagtggttttgagcttttctaaaaaccgatagctaggtaagaatacgacaacaccatctgggaccaaattgcacacgttagagagtacagctccgagctcgtctaactgtagcgatgtttgtcaatttttgcgttgatcaatatcggtgatgtacatcgagaataatacaaagaacgcagagatcataccaggtttgtatcgttttgagtttcaaacttgaactctaaatccttgcccttgggactcttggtgagaattattgttttgagattttccttcggaatgacatgcccgcatgagaaatttgcaagtcgagaaggttccacttggggaaaaagttgaagcttgaagtcgttgacctgttaaatgagatgaagattctctttagggaggagttcaggtgtgagggaaaggtgaattgattaaatcaacacgcactggctccatcgttcctccagccagaactatgctccgtgcgtccgctacgatatcactaaagtgatccatcggattgagcaacacatattttagtgtgactagttgcttccccgatgacgatggagagctagtcgaggacaataacacacggccatcggcatcggcgttggagagagagaggagaaatgactccagctgatgcatgtaagagatggcagcgtgtcgggtagtagcacgcgtttgagaagttgtcgtagttgctgagaaataaggcaaaattaagcaagtgtttagatagacgtccgagaccaagatcgacatgtgaacgattatgtacctttggccagctcctcttcgatcagcttctcagtgtagctgctgacctggatggtgttgatcagaatgcaaatattaaagagaattcaggtgctgatcaggagaacacaaacaacgacttactttaacagcgatcttgctctccttgaagtacccaacgatctcgtacagattgacttgatctagtcccttccccataccctgcaccaactctccaactttcattagcttgctcgaatccttcgcttgttctatcgattcacacaccgtgattaatccggcgagtatcaggagaacctgtttgagcattaccgcgttcctccctttcaatctgttcttgaattttatcaggtatgttcggagctgatctctcgcttggatcagtccaggaagagagagagattgggaatggatggagagaattgtatcgatcaagttatgtgcctcgtcgattaaaagaacttgatctttgagtgagatcgaaagcgcctcgcgcgcagatcgttggaggatcaagttgtagggaagcgtaacgatctgtacggcaaacaaagcaagcgtcaagttgaaattaggttgtcaggtgttaacattggtgaaaagactatatgtacgtacatctgcttcagggatggcggcccgagtgccataatatgggcatatatgagtttcctttcccaaaacaacaagatcttcgatatcctggatagtggcctgtatatatttcaacacagacaccacaaggtcaacggtcgctgttcaaaaagatatcgaaaaaggacgactgactaagactttatcagtaaactctctccctttggttccttccatccctccttcatctcttccgggaaggtacttgcaccccttaccttttcccgcactctgcaaatccaggcaccgctcatctattcctgtttcgccgctttttctcacttcatcgttaacgcacaatgtttttcttgaacctaaggcgaccgcccgagttgtctctgcaaatgacgtcttgcgaagttcggacaagatctgagatagctgggagtgtgtacgtgaggtgaaaaagattttggtttgagtcggaagaacagcgggaggaggcgctgagggatttattctgaaggaagacagaaaggaaggagggcgcgaattcagtctatcgcaagagacaagggtcgtcgagaacagaattctagcggacatactgagccatgagtgctaatacatcgggcgaaagattcaggccttctgcgttggtttgaagtctgtttgctgatggatcgtgaggaagaaatctgtcttcttcatccgtgttatctcgatctgcgtgctcaaaaattgtaggtctctactggtacaccatatgttagttttaaaatcccagttgcatggattggaaatttaatgcgacacccaccatccgttttcggtcccggccttgcgctcttaatgtttgctttcgttcttcttcttgtcgccggacttgttgtagtcgttcatctgtctcttgcctagcggcctctagttccatctttttcctctcaaacatccgctcggcaacccaaggaggatctgaagccataaaaagtacgattcacgtcaggatacgacactgatgaagatttcgtcatttgtatcataaggtttaccggttgatttggtcttcaaagcgagctcttctctgtacgcttccagtgatgccgtcgttgttctacgcaagtcatcggctggaaggagagaaagtctagagtagtcagtgtcaatatctagataatcttgttaaacaagaccaacgacgtacccaaccaggtcaacgttgaacacaagagcgagagactctttccctgtagaggttatacagatgcgcgttcgaccgaaaacatcaagttgtctatcaattgcacgtataaggatattcaggcctgttgatctgtagctcgctcactcaccgtgcctgttgggctttgaacgatggccacactcttaccctcgatggctttgtacacatggtgcatcagatcagactggatgccataaggtgttgcgtaagggaatgagaaggattccggcggaggaagcgccaactgaagctcttttggttcaacggttggtgcgcccatcattctataaaaatccgatggtcctccagtatcgtttgccaaagctttggccaaacagaatggatgtgtttcgtgtttcgtgtttcgtgtttcgtgtttcctggacatgctgaaatgttgaacaatcctccgacttcggacttgagcgcctcaattgtcggactttaaaaatcttgtgattttggggcttttttttctgcctccttttttttctagatcctttctcctcttctctcccacagatccgaagtctttcccatctatcatatccacaatgtctaactctgagctttcctacatcatgatcaagcctgacggtgtccagcgaggactcgtcggagaggtgtgtacttctgtttctttgatttggttatctgaaggatcttttttttctttactggttgcttttttgcagccctcatcgagaaataagatctgacggttctcttttacttcggacatctcacaattacctgctttaccttccctggttgggactcagatcatcgctcgattcgagaagcgaggattcaagcttgttagtctttgatttccttcctttccttttttgtctctttctttagagcccgattctgcgtctctccatctctcaaagggaacccgagaggtcctcactcagaacaggacatcacataaggaacgctgctgataactatttctgcccttgtccatgccccatcccttaggttgccctcaagctcgcctccccctctgaggagcacctcggaaaccactacgccgacctcaaggacaagcctttcttccccaagctcagtcagttctcgcttgctttctgttatcagcctcaacatggttttggatgctcatctctacaaactttcccggcccttacagtcaagtggatggccagcgccggacctgttgtctgcatggtttgggagggtaaggacgtcgtcaagaccggccgagttatgcttggaggttagtattatgcctttagttgttctcaagcgcttgtagcagctgtacctgtcatattgatgcaaacaatcgttcgactgcatatcagccaccaaccccctcgcttcccagcccggaaccatccgaggagactacgccatcggtcagtcatcgtcattgctcttgtcttctatcgctgatgaaagaatcattattctaaccgaaccctcaaccgatacttcaatgtagatgtcggaagaaacgtctgccacggatccgactccgttgagaacgccctcaaggagatcgctctctggttccccgaggtccgtgatgttcattgtctccgtccgttctcacacaatactcatcgaactgttgtttttgattggtttcacagggtcttgctcagtacacccgagctgacgccgccaacgtttacgagtaaacgtttttggtcttcacttattgattatttcatatttccagtctcatcagttgttcacatatagttcatgggccttgatatcactagaatgcgcttaaagttgcattttacattgaaagaaacacattcataaaaccacatcaacgactcaaagagagattcattgcaactgccacaaatgacagtttctctgtgttttccttaatctgctggtcaaccgacttgcccataccgtgtccagtgctgggaatgtcaatgaaacatatgacatcaaccagtctagtgtactaccgagaattgatttgtttccgatgtatcacttactctgtgtagatcctgtaaagcctgaagaatcaaagatcgagagcgtcaaacgcagactgatagtcagtgactttttctatacaaaaaggaatcaggcaatcgaaaaggctgtacattggggcctcattatatgattgtctctctacaagactcgaaataaagtcaatctactggatcatacaaaccaaactaaactgttttgggagagctctcgtaccttgcaacgtagcggcaaacttcaacgtatgacctacgaatagaaagttgaggatgggtcaaaagttctttcgaataggcatggcctcgatttggtgtaactcggtagagagagacatacctggaatcactctggagtcatgttccgccgtggtgagaaagcatgccgggaaattttgttgagaggggatatctcgttaaacagaaaagcgcaccaacaagataggatcagccgagtgcttgaaggagagagaagctcgagaagataggtagtttctgataactcactatgaagtggtgatatcttcaaaaggctcgcaaattcctctatctcatccagaatataaaggcatgaaaaaacatatagaaatcataaacgatgcaactaaaatctcaaacaaaagtaaaaaaggacattacgaaccaggatcttctggtgagccatactctgccgtccacagtgcgcccatagtgaacttatggaaccggaggagatcatgtactcctacatctggaagagtagcatcaataagatctggagcttgattcgaaacagcactgcagagcaaaccacctaaacagaaaacaaacagtcatgattaacgtcagaagggctccggtatgtagtatgagagaacctgataccgttggaggctccgtgaacaactatcttgctactcagtcctgtttccttcaaccatctcgcagcctacaaggttgaaagaccatggcgtgaatcaaggtcagtctatgattatgacgccagccgagaccaggagaaaacctagatggaaagcgcaaacgacttctggactgacctctaggaagtcatcatatcccgtttgtctcttcactccaactgcagctttatgccattcgtttccatgttccccgccacctctgatccctgccacggcaacaatccccttgaagtccttcatgaagcttgcaaacaatggttcccatttgggctcttgagcccagccgaaccctccgtatccgaacagcaaagtagggtgagcggatttagattcgagaaaacttgagtagcaaatatgcattggaatgagtgtgccatctttcgatgggtagatcacctactgacagcaatcatcaggcgacgattacaagagcatagtaggaatatcagctaggatgaaagaaagaatcttgatacctgtgatgatagaattatagattaacctgcttctggatatagtcggattcgctccatccgtcgacattagagcaatgcaacatgctaaacacgacatctccatcggccactacacctcgataaagcgttggaggggcgatatagctctcacctgtccgatcagaacgcgagtcggattcgtatatcaatcctctgatcacgctttgtatcttgacctgatatcagaaagttatgacttacagagaacactaaattcgtttgtattcttgcctgtgtccaaactgttgacgactcctgtccaaggaatttcgtcgtctcggactctcctgatggtctcgccctcatcgttgaaaatccatagttcattcgcaacatccacagcgaacacaactagaattaatccggatcctattgagatagcgcgctcgagaacaccttttggatgtgagggcacaatttcgatccactgggactgagttgtggtcagatctaggtcgataccagagatcttgtaccgaggagatgaatcccggttagttttgaagtacgagatgcccttggacgaagtcccgatgtctgtttggtagcgtttagtcagattgtctgaacgacaacattggtatacgtgtcaagacctctcacatatgtaacttccatcccatggtttcgtcacttcgctccagatcagatcatgtttgactgctttaccttgggcatcatccaagcctcgcacgggagtagtcaagagtcgcacagtagggtccgtcgatttaaacagagaggtaatgaggtgttttttatcttgtgaaacaattggaagatatgcctggcaaattgggtcttcaaagatctttaaatcctctgactaattagagaaggcgcagaatttcaagggaatgtgtgcagatgttttagtagttcaagttcgatgtaagtagaagacgtcaagtatgagatgaggacatacttgaggagttccgatgtaatgaatcagagagatgtaacccctctcagctgtatatgaacagttaacatggatggacgtacagaattagatgatctccttgaaaattgcctgatgtgtcaatcggctcaccagacgtgttgtctttatgcttggtaggcccgatcttgtatacgaagccctacaaaaaattcgagattctctcagcacaagacatacaaatatgctgatactaaggtaagactcacttgatcgcctaaccaagcaagtgtccagcagaacttgacattcaagagctcctcgtccacttgcttttttgtctgagtatcgattatgacaactgtctgccaatcggatctgttgatcccgaatggagaaaaaaaaaacacacagagagagaacagaaagtaagatatcgaatcagcttttgcagaagattgtcttggatcgttatcatgatgttaacataccctcctctggatattgtggtggcccaatacttccctgaatcgctgaagctgctccaagcttcactggcagaaccctcgctctctgtcgaatactggttgacatcaaaaaatacttctgcgtcgtgccagttgtccgccgttgaaaccttagtagatctcaaccaaacgggttggtcaaaatgtccaggattggatttccagtagaagaatgagccgcatggggatttctggaacgacgagacaagaggaaaagaggtgattgaacgaagagaggtcttaagagcagctccatggggaaacttgagaagatatctatccgttgtctatgttcaagtttatgaacaatgcctgccgaagcgtcagtctcaccgtacagtggttgacgatagaggccgcttgagttggggatcttgacgcacatcattctgtgctttcacgaaagactttgtagactctgcgaacggatcttccagatgtctgtccatcatcccaggccatgatgcgacgtttgacattatcaccagcatccagcaaacaacccataaaagaattttttaagtctatcatccggagaagtgtgtttcagaggaaaccatctcacagacctgtatggatcctatcattcacacacccatagcacgccccgtagagaaggatcactcagtcgcttttcgacgatcgcccccttgtgattctttccattcccattccactcacttttatttccttaccgtgcaggatatcagacgtatcgtctttgtgtatcttgggataacttattgccatgatcgagaggaagatagtactgttcaagaaaacagtttcggcgagatgaacacaagaaatgataaactttgcgaaagtaggttccatccgatatctgataaaataaaataagcaaaataataaaaactcaaactacttctgtatttgtctatggcgcttccatgcgatcattctgactatttttccaagtctcaacaacggaatcaagaagtcaagtaagattcagagagacacaggctagcaccaaaacggaagatgataatatgtcgagacacagatacaagcgaaaagaaaggaataactgctaccgtcgtataaaatgacaccccaagacatacagcccaaataaatatagaaggaaaaaaaactaatcccaaaaaataaaagtcaaaaggatacaacatcagatcttgacaagtctattcgattgacattctccagttagaatttcggtatgtcctattttcagtccgtcccatatttgaatgtacacataaggtcagagaagagcagaaaaccaaataaagtagaagaagcattcggagaggcaaacaaaaaagactcacgccctatccacgtcactcaactcggttgaggaggaaccctgttttctcctctctttgtcgtgtttcgcccttcgatccactatcgagcatcccgaggcaaataacgacgcgtacgttcaacgagaggaagaaaatgaacgagaatcagagacgttgctataaccaaggtgaagagccaatgtagaactcacagccttccttgaggcccatcccgaaacttcgccagattactaccgtgaaaatgaacgtcacgatcaagagggacatggccaatgcagctagaagagtcgcgtttcgtgtaaggactcggaacacatcaggcttccgacacgttgatgtcgtgtgtttttccatcctactggaaaaggggggaacttacaaaacacagtcaaacttttgatgatggtgctcaatcctatctgttgccaaattcttactgtcttgaggatgaaatacccaagtcccacggcgagaccgactaagaacgcgccctgtagaagtatgagggggaaagagaatatgccgatcagggcgactgacattgcgtggctctttggccggaatgacaggatccaacgttcaccgaaaccctttctcaggttgaacagaaagatagatgctgaaagaatgctgaacgtacaagcccgagccgatgttcataccgggcgctcatccagccaaggacgagcaaaagtattgtaaagggacacgcggctatagtaaggtagtattcccagtcctttgacaatacgagatatatcatctggttgaagacgcagtgttcaatcggaatgcaagaaatcaacctgagtgtacgagggaatctgtaaagaacttgaggagaaaaggaacatacttgaaacgaaaatcccagaaagaaaaacactgtaaggtccgcgcacggatgccgaagcgccgacacgtcagattgatagcgtgttgcttcgcgtagaagaataaagcgtccactcacaatcaaatttgcataggcaaatgaatacgttataatgaaagaatgattttttgagcctcctatcagctccaagagctttgtagacgtcccatccaaattctttatagatgaaccaactaagaatgatatacccaatctcacacaaccctatcattgccgggatgagactcgtaagaagcaggacaggaacaccattgaccagacttgttgcatcggcgttgaaggtcgtaccaaacgcgattcgaatctcgtcgatctggatgatcgagtatccgaggaacattgcattgaagacgacaatgccaaaaatctgaatgacatttcttccttggacggcatcgagagccatgagaagaagataaagatgcgcgagaccaaagatgcctagatagactggcaaacgcttttcagcagcggatccggtggaaagatggaaagacgtgttaagttggtaatattggtacaaaaggaacccttctatggcgaggtcggcaagcgtttggatgatgacgagaatgacgaacaatctagtcactagagatccaggcacgtaggagcggagccgacctggggggactgttttcgatttgctcgctataatggatgcgtccggcgtaggagaaggaggaggaggagagagagatgatcgtgggaaagtaggagacgtttggtggaagccatcaggcgtttcactcatataatggctcataggatgggcagaataacttgattgatcgttgtgcatccaatcctgttgaattcccactgattttccctcccaattgtatatggtagactctgaaagccctgttgtgagaggatgtaacgggatggggtcgctttgaaaatccgacttcaagttccgaggtgccgaggtgtagtgaggaccggttgacgaagaaggcggcgagtgattagtctgagatcccaacggcaagcgcgaaagctcaggaggagctcgatcagtatggtagataataggcgtggttgattcataagactgagcgctagatgatgatggaaaggaatgtaatgagggaggcagggccagctgacgtccgggctgaatcttttcggaaggatagccatctacatgacgggatgcataagcatatggaggagagaggtggtctaatggatcattatagtctgtccgtgaaccatccaaaggaggaccaaaatcggtaggcagctccgctggagacagagtggacggagaacgcgacaagtttgatgtatagtagtcgaacggagggagccgaagaggatcctcgtcgacggttgaggttcgttccgattgtttgtccggtggacgactggcgtcatatgggaatatcgtcatgctggatatctagatgttctttgtgctcctacgtgtcagtgagcgtgtaccaacaacaaacagacttgctcgttaaagtgtttgctttggtcgatgtcgtagaatgtgttcgcttgttttctcttgaccaaacgagccaaccgcgcggggttggtccaacccggttagtaaccggggttcaacctaatcgtgttttacgaccgatgatcgttaacgatagcgccaatgaagggatccagatcatgtgcgatattaggatcaggatatgggaactgtactgacgaggtctcagacgattgtttagttttcatttgagtatgatcgtatgtcccgggtggctctgagttttctgatacagtcgatcttatcccaaagaatactctctgctgtgcgtatgatggctaatgagctaggcatacgacacatcatgaggttgcaagcagcgcaaatcaaaatacagctgcggcttgatacaaccgatgaccagacaaaccaaaccagacactgatacaagagtgtgcaaacagagtttcgctcaatgctcgacggcaaccgaaaccagagccacagctactttcacggaaaaaaactcaacatgttctttgtgcgctccctatgtatacttcactgagcttatgctgttccaagagtagaagtatctatgtgctgaaaacacgatcgccgtctatgatggtaggcgtggtagcggtcgtccagcacattgtgtttaataagtacttaacacagatattcaaatatatcgctgactaggaatcaaccgcgtttttcttcattctatactctaaccggattgatctctatcactcaccttctttggtttctttgtctgttcggctctctcttctcgtgcatacgaacgcacacacatatacacatacatcgagatgacaggaggaagaagtattgtgagtaaagtgtttcaccacaaaatttcaacagcccggcctattcggtcattcctcgtccagtctcagttatatatccttcccgtgtcttttccgactggccgagacgcttgtccgactgttgactggccagatttgttagaggctcatgtctaattttgtaactgtttcaatcacaggccagagtatatcctgattccaacgagaactttggtcgttcttggtgggactatggtacgatccgtttgctcaatcgtttcaaacaatcatcatgacccttaaattggggccgagaagtattgtccttgaggcttacaccatagcttcttattttctttttcttttgtttttctttgatctgttgctatgcatcttgctggacgtgtcctctttgtgattctaattggtaatctgccctattcgggggtcatccagacaatcttcaggttcaatggggtagtcaagatcaatatgagatcgtccgtaaagtcggcagagggaaatattcggaggtaagttccttcatccttctctgatctcctcttgagatcaactatccgattcctctgaaaccagagctcatcgatctctttcttcaatcatttttgggcatcttgtactctcctcaggtctttgaaggaatctcgttaccttccaattcaaaatgcgttgtcaaagtgctcaagccggtgaagaaaaagaagatcaaacgagagatcaagattcttatgtgccttgccggaggaccgaacgtgatttcgctcttggacgttgttagagatgttcaggtacgtgtcacattttgtcgtatctcgagattagcctttcctccgtttggaaagcgctcaacaccatcagtcattctttgcaaactgacaattttaaaccacgcctcggatcgctgctcattccacaacaacaaacagtccaagacgccgtccatcgtattcgagtatatcaacaacattgacttcaaggctagtgaactctgtttgttaccaacatattctagccggttctcatatattaacgcgccaactatctggttcttcgcatccggcaggtcctctatcccaaattcacagatttcgatgttcgatactacattttcgagctcctcaaggtttgtttcatcatcttcaatgtctgtgccatatacttcccagacaacttgttgcttattcacgtcaaaatctcaacgtggttcaggccctggatttctgccactcaaaaggaattatgcacagagatgtcaagccgcataacgtcatgattgatcacgagaagcgcaaggtctgtctgatctctcttttaccttgatgaatgaatctgaactcttcctctattgtcattcaaaacatatcttcagttgagactgatcgattggggattggcagagttctaccaccctggcaccgaatacaatgttcgagtcgcatcgagatacttcaagggaccagaattgctagtcgacttccaggaatacgactatagtctgtgagtctctccttgatggatgtatattgatttggcgcaagccagcttccagacccgtttttgtctgacgattggaatacatcttcctcaatgctgaccctttggttcgatagggacatgtggagtctgggagcaatgtttgcatcaatgatcttcaggaaagaacccttcgtaagttcatcaaatacatctccatggtcatgctcatttctcacttttcttgtttcgatactttagttccacggatcagacaactatgatcagctgggtctgtcctttgatctggactggtatatatagcattgggcaacctgctgacatctataatttgttctcaccagtcaaaattgccaaagttctgggcactgatgagctttatgctgttcgtttgactttgatcttctctcctctgtcatcttttcaacgagtctctgacttacctccgctttgcctggccacgcctctgaacctgatatttatcagtacctggagcagtatgatatcgatctcgacccgcaatacgatgatagccttggaaggtatcagcgcaagccatggtcaaagtttatcacgaccgaaaaccagcgatatatctccaacgaagccatcgactttttggataggcttttgaagtatgtctttcatttgattctccttcctcctccctttttcttccttcctttcttacaagactttggcagataaaaatatgaaaaaagctgattctgaaattgacgaattttattgaaaccagatacgatcaccaacaacgaattactgcccgagaagcccaagatcacccgtactttgagcccgtgcggacagccgctgctgctgccgctgctgcagaagctgctgccaacaccactgcttcctcatccgccgaggacgcctaagggtgttgtcgtgttgtaaaagtcgaaagcgtaaaggaggtcaagtcagggaaaagcagaaacccaaatcattgttttgtcgtttttatcatcttttacttctctcagtggccggaaaactctatttttcgtccgtttctttgttcatgttcttttaatagataatgatttttttaattttgtttcaaagaaaagagc

SEQ ID NO: 2479 - DNA, 5243 bp, Xanthophyllomyces dendrorhous
gtttcaaagaaaagagccatagaacacattaaaagaaaaaaaaaatcaaaaaagactagaccactaaaacgaagatagatgacaaaaaccgaaaatgacaatataacggcatacatatgaagatcgaaggaggaaaaaaaaaccccgaaaaagaagcttgagagggaggaacttacgacgaggagctcgtcatgtatacaactgctcagaacaaaagctgaacagagtcgtcaatcaagagggtgatcgtgatcatcatcagggtcatgtcatgtcatgtcaagatctgatcttttggtggagttggtcccgaccctcagactcctgaccaacgcacgaacagcaagttttcgaacaatgatacaatcgccgttataatcgtcgatgttagctcagagatagacttacatgagtcagcgacgtgagccagctgccgagcgaactgacgtgaggaatcaatccgtcaaacatgttcgttccctcatttgtacgcccgtccgatcgactatacgaggtcaaatcaagggtctagtccctcaagcaaagatcgaggactgaagaccaacaggttgattcaagtattattgcgatcaaagccggtacatcctgttctttgctcgaggcatgcgttcaaggttcgagaaatcaaggactagagagtaaagcatgggaataagttgtataactgaaaaacaagcaaaaaggagcgttgacatgattctcactaagatagtggagaagatgttagaggaaggtagaggatagcaaggacgcatcgacactgagcaagaagaacgcgatggtagcaaattcaaaaaaggtgggtggaggaggtaatcaattgaaccagacggaaggcgaggatgaccagtgttctgataagagaaaatttggaacaaagagaaatagaagtagaaaaacagaaacgggggagcggaaggacagagggttaaccaaaggcaaaaggagaatgtacagaagggtaaaggatggaaagaagaaagaggaagggcagaacgagaaaagtcaaatcggaggaagaaaggaaaagtccaatcgaacgaggagaggaagagtccaatcgcattttttcaatgacacgagaaggtatcaagtctgcgatgtgtttccggaagaaagctccaaaagtgataaaaacggatagaagagaactggagaacgacgaaagatggcgagaggtatttgaacttatgcaagatgctggtgtttgataatgatataaacgagtagaaggaagaaagagagatgaagaagaatggacgaaagggtaacaaggaaagtctgaaacgaacaaagaacgaaacagaccgcacagatatcaagagttgattgaattaagaaaaggagggcaagccaagtcagattgaaacacaacacaaaatcacccatatcagaaagccaacatgatcacgcctaaaatcaagagcaacaaagaaacgctcgctccgacgcgtctctcagccccggaagcttgagacgacgacgatgaggatgatgatggagcagaagcactctgtgtcgttgcgctatcggtcgaagaggcgaaccaactcgacggccaagagctcgtcggaagctcagctaactccgttgtcggtggtctgcccatttgaccagtaccaagcatgacccatgtggcttctgacggaacgccgttgacaacacagaataagagagccggaccaggcgcgatgacagctggattaggcggagcctgagagacgtggaagatggccgagccgtcatcagaggcagtgaaggaggaatcaagctcgacatgtcgcattcccactatgattattccagtccacaacatcagtctacaacagtcaagaatttagataaaacggtgggaggaaaacatactattgaaggcatgtgttgagaacccggttcgctcaatgacgaacttggtggcgttgatgtccgaatggctggtaaacgcatcagatgggagggacacattgaagtaatcaccaccataagagatattcttgggcatgccgacggggacgggctttggcttgtcccaataatcagggtaaaagatctcaacctgatactcggtcacgtaagtgatcgacggatcgatactcttgtcaacatctaaaaattgattatttttttaaggtgattagatatatatatgctactgcagactgtacagtcaaaactgtgtactcacaatcagggtttgggttggatccagagaccaagatggatccgtccatcaagagggtagccgaagaatgatataatctctggacggtgctcactccggccttagaccatcgctttccagacgcagccgatggatcaaagtaccaagattgaagaagaggctgatctccataagatcgaccgatggcccctgaaaacggaccgagtagaatcacgagtttggtcaattaactgatcgagaagagagacacggacatactcacaagattcatttccataaccggctgttccaagggcaacaccatttccaaaccaaagtcgtccatcaggaaggatgatgaactgtcccatggatcgaccagtatcgagcgggtcgtcatactcccactctacggatacgtcgggcgatatcttgacacacgtcttgtcggcaggatatctgtcaaagatgagagacgtggatattagaatattgcatctccgcgcgatcttaaagagagttcatggcgacagagagacaaacccagcgatgttccagttggtagtccactgatcagctttcaggtcggtacctccacagaacatcagggtggccgtccagttgttggcaggagtgagcggaagcatcgcaacagctccggaagcagggtaagttcgaacagcagaaggaacatcatccaaaagatctataaaaccgaacagtgggagtttagatatcgaatgtaccgcgtttctagtaaagactgaacatacattcggtattctttttgtagtcaaacacctcagtgccccagttggtttgaataaacaaatttcctgatatttcacagcgccagccgacaacgaaggattaagaaaccttctcgaaagattcaaagagagcgaaatgaaagttgaaaagaaaatgatatcaacgaaccactgggcaagagccaaacgaaactgaacaggttggcaggcaaggtggtggtcaaaatgttgagcgttaccggggagccacgggaagggaaaaactcgtaggttggattgttttgcgcttcggtattgacatagcctccccatgagcatcctccgacctagaagatatacgcatgacgtctcaatgaaccgatcaaaaaaacagtattcacagatagactgaagaagagaatactgacaatgatgatccttccgtcttcaagggtttctaaggtgggataccatcttcgagtggtcatgtacaggctttggtcgtcgttccactcgcaagccgtactgttatcacatggatccaacagactaatacacagttgatcgagatatatcagcaatccaggcgaagatgaagagtataatagagaaggcagcaacaactgtaccggatagcttttcctccatcgaaatcatcgtaaggctgcccacctgtttgagatgcagcggtcaaaccaccccaggtgatagcttggttcccaccgactatggaacagaatgagaaacaacagacatgagcaaaacgtatttaacacgcttgtctgggatcggcatggagtgatatgtaccgttcaaccaagtcccgttaccgagcacgtttcctccagcactaagttgatgaacaaggtcacaagggcataaatgtcagacgtaagatatccgaagagattgctcagagaaaacattaacggaccagaaggagttcgaaacgacgtccatggccctgaattcgttggtccgaagatcatattcagacccccaggcagctatatatacgatgcgtaacatcaccagggggagatcagaagggaaaacacaacaaccgggaagcagaccgatgtcacgtaccatgctctactcctgaagaagaagtgactcttaacggattgttttccgtcttatcaacgaagtatatcttattaggggaacccaagaaaagctgacacgaagatgtagtcggttgttttagagtcagcatgcatgagaaagaggatcaacagaaaggaacggtcagccaaaagatgttttagaacgaaggtttggcgggcagggctgcataggctacacgactgggacaagggaagaagagatgatatggtgtgtgtgtccgttgtgtattcgcccaagactctgtccgactagaatccttgacttttaacattttcttcttggcgcaacccaggcagaccagatccaaggtcgagcacgcgggtgtttggagaaagacacacaaagaaagcaaaagtagaatgacaaacctgttgtgcgctcacaccggagttaccgacgatttggaaagtgttagccatacttgcggctttcgccaatgatgcaccagctaggccgagaacgaccgattgaaacaagaccttggccaaggatgtcgatgtggagtgagaacaggaacgggagtaagattgagatgacggcccgacggactgccgtgactgtgaaaggaatgaagtggacatggagacgtgtcttttgtttgttttggtgttatgatgcccaggattaggagtgatcagggatatcgagagaaaaaaggaacgcccgctcggaagagtggtgtttatattcaacccgagaggtcgaaaagagagggggacacagaggagaagggtccagagaagcacaaggaagagtgtcccgactgaaaggccaaaggagacaggagggcgaagcgaaagtggaagtgaagggagggaaagagcgaagaaagagctagggtagaaaaggtgaagagtctgtaggaattcggtcaagataaaaacgaacgaggaaggcgtaagaagttggggttccccgaacattaaaacacacgatcgagacgaaccacacctttggtacacaccaaacggatacagatgatcttctcttttccgctctgatgaacctaatcagaacagacaaggaaggaggatgagatagaagagagaaggaaatataagaccgggaagatttgatggacgtcggatgagtagagacagccgacctgacagaacacacacaagaaagccaagagagaggtcgatggatgggtacgtatacttagatagtcgtaatataat

SEQ ID NO: 2480 - DNA, 9168 bp, Xanthophyllomyces dendrorhous
atcatatattattcacttaacacaacaaaccatcctcgaatagaaagctgttcgttttagaacgatcaccggtgacagacctcggcaggtacgttccttatatggacacacgtgatcgggaagaataggccacacgctgcatcacttgtcacccactcgatgcgtttgtcatgctagagcggaccccattcagataaagacattggtataacatgtttttttttctttctatctcagtcgaaagaaaaccataaagatgagagatggaaaaaaggaaagaggaaggaaaaagaaaagaaaagaaacaggagtaattctatgcgagtcttggctccttctatatctctttttatttgtttttaaggggagggaaatgtctatggtatgtatatatgcaggtttttccttcttctttgatctccttctgattcattcacactttacctcccttcgtctcatgagattggtctactcggttttagaatcgagagatatctcgaccggtgatcaagttcattccccagctgtagcagaaaagaagtgtttgtttgagtcaatcagaccggggtcaatacgtatgttcaggagggaagaggctactcactagacactcatcaacagcctgttcctccacgaactcatgctccagtaagcagatcgccagaggaaccaagcagacaacccggtgacctctcccttcggcccagacacgttggtggccgttcgatcaatgatagctcgccacgagccaaggtaaacctaagcacgacccggagaaaaacaaaagtcaatatcgatgagaacagcagataaatccttagggaagttcatatagacccaccatgcttcctttgttcctgaggatgaactcagtatcaggtttttcggttccagcgttgttcaagttggcggccaagttgagcgccttctggttagcaactgtgagaagaaaaaagatgtttcagaagatcagacgggtgttctaatccgattgaagggcaaaactgagaggtattgaccctgagcagtggcaggcaacttgggtccatccttgatcatcgagttgtctccgatagcgtatacgttcttcatcggctcaccggtctccttgtccaaaactcggaggaagttgtcggtaaagagcctaatcacgtcacatgccaatggtcatttcacccacagtcaacaaatgcgaaaaagattcaggatcagaaagaataagttgaggtggagtcgaagaaaaggaagtgaaacaatgataagaagactcacgactgcgatcgggggtccttatcagcctggctgatggacttgatcaacgggttgggctccaaaccggtactccacaccaaaagtccgaaaggcactttgcataaggaaacaagagggtcatgcgtcagctaggaaggaacaaagtgtagggagagaagaaatattaagtctgaaaactcacctttgccttcgccctcaatctccatccatccaggaccaacctcgaggactctggagttgggtcgaacgataacgttatccctggagaatcgcctcatagcgtactctcgaagggacctggtttcaagacaaaaagggaatcgatcatatattagtttgagtatgtacattgagatggccacagacacacaaacaacaaaacttactcctcgaatgagagaagaattccaggggcgacatcgtaaagcgaaatggtagagaatccaaccaactagttttattttttgtaacagtgcgctgtcagtaaaaaaaatcaattcgaaaagatgatgaaaagaaccagatacacacatcggggtaaattcgcttcatatcactggtgatgagatcgtgcaactcggccgcgaactcgatacctgtcggtccaccaccgacaattcggaaagccaaaagagcccggatctcagcctccttgatgaatggctgagaagctcgctcgaagcagtcaagaattcgctttcgaatagctcgagcatctcgaatgtccttgaggaaatgggcgtgctcgtacacctggagaaaatgtggccaaataaaattatggttagtaaccccggagaaacgagagccatagtgaaacacgtgcaactgagataacacccgctctaatctcgagatagtaaaggaaaaagaactcactccaggggttccaaaagtggcactgaaagcgccgacagagatgaccagcttgtcgtacccaacgacaaatcgctcatcctgatgctctgtaagacaagagaatttttaaataaataaaaaacgttgtcggttagatgactacaacacaggtacgatgttcaagatgtcagactaatgtacgcactctcaggagcgatggtcatggccttgttgtgcgctcgaggagggagcgaatgagatgacgatgtagcgggcgaaggaacggcagaattcaaagttacggtctgagtcttgaagtctattatcattgttcagtgaaaaaaggccgtagaaagaccgtgagaatgacggagttcatggattggttcttccaatgcgttggggaacaattcggatgcataagaacgaatcatacacaccgatcgactcagctcgagccatgctcaagttaacgttcttcaacctccttacaggctccaaagcggttcggaactcaagggttccaactgatgtactcgccaacagaggagtgaaggtgaagtatcccgtgggcgacacaacggtcactatcagagggtttgtaatggacggttacgaaacaatcaaaagttagtatacgaagcgtcttgagagaaaaaatgatgacctcctgtgcggacgatcatggaggagctcccagcctagaactctcactctccagaagagcatccctgagggaggagctgaagtcaggatatgaaataactcaccatcgtaaagcttgggatcaaggttctttgcctgtaggcatggaagaggaaaaagaaatggaaaaagtcccggtcaaccaatcaaatgtgttccgtcagctcgtctgttttgatcccatgcatcattctctatacgagattatgatcttgactgatgggaaaagaaggaagagcatagcacatacgacagtgaatcctccccaaccacttcctagaacgacgactcgctccctcttggtcgaagtcttcgggttgcagaccttcatgccgtggtcgaccgggacagcggtagcgaccttggtgaccgagacagatcgggcaagggcgagctgggaagagttgattccgaatcgagtggatcgttgaaggaacgacatggcctatctattcgagtgagaagaacaaggatgaagtgggtaaatgtggtatgcaaaccagacggtgatcactggagaggcaaggacaaagacaaggaggaaaaaacgaaagggtagaaaaagaaaagggagtgctgttgttggtcgcttttttttccttttccccaaattcttctggggtagtaaatgaaatgatttaaaaaaatgtggtcatcagcggagttccgccttggtgactaaccggctggatgcggcaaaagatctttcaagtattgtatgctcagttgaataaggtaggacaaacttacttaaccttagtttaaacatgtaagtatcaagatataccttctccgctcatctatcagctcggtttgatgagaacgtcgatcttttgagccaagacaaaacttccttcttattgaacaaatgctcacgatgcggatatactgatgaagagattactgatcccctcatttatgtgtgaagtaaccaactatctaaccgatcagaatgatcccgctacacaaaagtatcagattattatcctggcccccacatactcacacactttatgagccaagcgaacaaattgaatgattcagccttaccgcttgtcttgtcccacttgtggattagtttctggtgtagaagcaatgtcttcctacacaacctcctcttgacgagggtgtcataagaaaccccattcgacggtcattggctgagaagtcgtatcagtcgatttgttctgcatatttctcatccatcttgattttttcaatcggattacactcaaagggctgatcttattcatagcctcaagagtcgaggctgataaaaggcggagtaggaagcaattaaaaggaagaaagatcagatcgatctagtgtattttcattctttgtcaactcacactcaagctgctctctcaatatccggcacattcgataaacatgtctttcagtgagaaagaccctcaactggccaaacctgttcagtcggcagcagagagcagccagataggaatggatgggaacaagaacatatccaataacgagcttgaccaacacatcagctttattatatctcaactctacgacgaagcacgatgtcgaacatcaaagtgaagaagaagcgagagtgtctccttacctgaagatcgcatggaggtacaaatggtatgccttatcattattttcggaaacagcgaggctttctgtcctttttcttccttcgcctctctcgaacctgatgaacttcttgactcgatcgcaaagattgccttgctttataccgcttgctttcccatgggccagaactggacagactcatccatgggtcctttaaaaagtttgtcgtttgtcttgttcagcgcggtttggttacatgttgatatatgaatcctcaaaacagaatacactctgaaatcaacttggaatcaacagtaagactcgttggttatgataaccattcagtcactgaccgagctcataatgatgtttcatacttctttgtttagatactcagtttggaggcaagtagttttttcacaagtctttattttcgttcacgatttcacaacaatctttatgtcttcttgcctctcatagtcatcggaagtgctgggtccgtggccaacagtacatggccgatcatcggtggggtcgcgctcgactggtcagttgattttttagatactgtacgactctcgatacctcgctcgatggttttcttcttatcatcattgtcaccccaggtgcggacctgacatcacgactctggtatgcacaacgggtatcctcatcggcgccgtcgtttcttctgtaggagtaacagtcgaaatctggagaatccttgttgccggtaacattatcgtatgtctcactgtcgtgcgagctatgtaagaaagtaagctaaagtccttcctcgacgcctgcccggggatagatgggacttggaacggctatcttagattctgctcaggtttgtctggttatataaggatattcaatatatgatacacatgttcttacgaccgctctttcaaccgctgtctagcacaaactcttttaccattggttcgaagcaagtgggctcgcatttgctttcgggtgggtctatacgcttgttggattgactcttttattctagatacgtctactaatctcaatcttctcatttccctctacaggcttgagtctgcagtagccaagacggtctctcttgtcgccgggatgatagcagttcccattaaaggtggaactggatggtatgggtgagtactttgattatctgtgatattctttcgacgattcaagtgtgaacatatcggcatgcccatgatctaatgcaactttctaccgatcctatagatggagtttctagattccagttggtccatccttttgatatctagagttccttgggttccatgaactacacaaactgaaacttcgaattgcacaacctgtagtatttcgcgtattctctctctcgatcaacattgcctacgtcgttttcgagcgtaaagccgtccccactgagtttcgacttacttcggtccgggttgccgctatgaacgaactcaatccgaagaagtctggagtctctctcaaggccttatgactaatgccttaggtgcgtcttgacctgccatctcatcttatgtcataaggactcaacactgtccttcagacttctttgtgccgtcaatatctcctagcgttaccagtgcttttggatgctgcctatgactcagctcattcaatccggagcagctgggggatttggtcaaggatcggctgatctaatcacaatgaaaggttatactgtgagaactttctggttccgatgcttctctcatgctccttgaacgtctgacgcctgaaagtgctgttttccttcgtctgggccatgttatacaggaagctgtggttggtttcacgtccagcgcggaggatagtccgtatctgttccttgtctatacgatattcaaagactttcttagtctgctctcgatatggtgttgaaattttcttttgtttgatgtgcatatacatgtgttgtcaaatagttctacctatcgttctcacaccctgcatcggcttcatcgtcgacaggttcggacataggtttcacctcactgctatcgctcctttttctggatcatcgcatgcttgacaattggttttagctctatccatcctctcgtgcccgtcgtgatcgtcaatctggcaggaacgatcaacgctttcccagtcagtatctatgagcttcgtctcaatcgaatatgctcaatactaagatagttctatcatcttgttcttccacccattcagtttcaagtcactattccgctgcttgttgccgatcaagacaaactgggaatcgcatttgggtgagtttgatgaatttcgtttagatgcttcttgctgatcgccacgctgagactcacattctgtctatggtactcttggtactttgaatttacagtatctggagagcattcaacaacagtggctctactattatggtaagtatatatcccatgtcgagtctagctgcgttcgtatctcaatcaagaccatctctaactcaatacttcgacatcacaatcttcctgcgtaacatacaaataggatatcgcgtttggaatactgcaagatgggacagaaaatatgggatatgacaaagttttgtatctcgcgatctctctcaagacttgggcttttgttctttgtttttgttatatatttatcgactacaagtttttgagaagaggaatgacgttttctgagaaagagagaatcagaagagaagagcttattgagtatcggaatggtaagtgtctctttgccgtgctccaatctgaatatccatgatgatgcaagcgcagaagttggatagatgttctagcgatggttttgacttgttcattctacttcaatagcggatcctttgactgctcgaccagtcaacatgtgcgtaacgaagactgctcttggtcttctgttcccgatagtagttaccgcatgggtgggtttcctttattgctgtctattcgaatccaatttgatcttcaaattgataaaggtttgacttgtcccaccttttcgatcatgaactgcaggtcattttttttaagtatcttatcgaatgaatatcggctggcacaagttcgcgaagctcctcatctatttgtagtcatccgcaacaagtatttgttcctgaaattatacgacgttcttagtatgaccatcatgtctgaatgcatgtatcactttttttgtcaaagactaggaaagaaagatgttgtgtagggaaaaatatggttagggttggtgactgtgctacgtcatgagtaacacagcaagacgttcgccaactaatgaacaaacccgatcaaatcatcagaatcaaccaaccaaacattcaaggttactcagcattcatgcctcccgatccatctgctgcaaaactagcctcattgaaccgattgaaagctaaacagtccatccgagcatcggctttggctgcacaaaaaaacaaaccaccttcaccgaagaagacatctggaggaccaactactcagccgaaggatagtagggatgcaacaaagggattgaaacctgctgaactgccgaaactgacgaaagaccctagattagtgaggatcatcttttcgaaaatgttgaacttatgacttgttaaattttggactatttgaggttcaacgttgtatcctgttcttgctttctttgttggtgtggaatggttaggggaactactttgagtatgatctttctaaagtgagtacacttgaagctttcaatgccttaggtctgaatatgaagaaagtagaactcagcgttcgccgcatgtcatagatggtcaattctaggggaggtttcctggtcgaagatgatgagggtaattctgagaaggcgattcttgagaggcgtcgccgtgaagaacgagagcaggctcaaaaggctggtgcttgggagccaggtctgttttccctcttcctgtttttttctcatatcttggttgcatgcaagactgaccagttcggtgttttgtatcaaaggtcttgatccggaggcaagtcctcgttgtatgaaatgcgggacaatagagatcgaacgtcgatttatggatgtgtttggcgtggcggtttgtaatacgtgcaagaaggccgatccggacaagttttcgttgttgacgaaaacggagtgtaaggaggattatctgctgactgatggtgcgtcttcttcttttgcgaaacgagactgtctattcattggagaaaagagcgtcgtctgaccgtctctctttgtaaatttagacgagcttaacgacggatccatcctgcagcatatgcttcgtccgaacccccacggaggcgcgttcagtaacatgatgttattccttcgaacacaggtcgaatcgtttgcttttcagaaatggggtgggcccgatgagctggatgcagaatatgaacgtagggagcgggaaaagagagaaagaagagataaaaagtttcagaaaggactacgagagtgagtgatcatttcaaaagagtcatgtatgcgctttgaatacaactgctgatcgctatcctccatcttgctctgttttgaattaggcttcgttcgagaacaaaaaacaatccgtatcaacaacgtcgggatgcagaacatgttcatgaattcaccatgcgtcctgaagccagctgcaaacggtgcgaggactgtgggtttgagattcaaatcgagttgatctaaacatcgatcaagaaaatttgtcgttagagaatatagaagcagatcctataagtcctgttgtttaaatcatattgtaaacttctttttctatcatgtatcatataatat

SEQ ID NO: 2481 - DNA, 5570 bp, Xanthophyllomyces dendrorhous
atctatatttttcctacaagacgaggaacaaagagtaaatacaactattgggtatactgatagacaattacaacaatgtgaagcgctcctttgagtagtcaaatcagattcccatctttttcgctgcgttctcccagtaggctccttcgagttcacgcatgtccagcgaactgcaattcgaaacagatcgtcgctcccgcttgagcgccttttccttgacatctgtttgagatgattcgaccgatttagaatattgagaagacgaagtcttcgttggcttagcggatgaaacatccttgaaggaggcttttgtcatcttgatacggcgaaaaaacgggacgggaaggggctcgtcccgggctggccgaactggcattggggcgaaaggcgtgaagatgatgtgtgaaggagtattgaatagtgcgttcatgttcgtgtttctttcgatagtataggcagaagaagaagaaacaattattatcagaggcttgatttgatacgagacacaagagctgaacagacaggatttacaattgacaggtatctccaatcaagagaagattatagccagaagaaatcaggcaactgtgtttatgaggggaaaggacgcataaacaatctttctgtcatcttatatagcagaaccggaagactagtctacgagatattgaaacatgtcggtcatcatgttaatcctgacagatagtagcagcaaagaacgggtcaagagtcaaaggtcgagagctcaagtcggagttgtagttgactgttgagagcaagagtgagcgtgttctggagatttatcagcgaatccgatcaaaggggtaatcagatcaaagggagatcatccatgtggctttttacaggggttatgagatttttccgaagctttcaaccctcagcatactctaaacaaggatacatactgtcgaaataatcgttcagagcgcaatcaatattgaaagaacaagtatacatgaaaagaagcaagcaaagcgagaagcagtcaccgcgagttatggcattcaacaggtgtcattcatcaatctcgtgtgtatttctagacaaccatccttctgcaacccaaacatagaatcacttgatgtcgccacaagctcagggttagaggaagacgagcgtgtagagttctttccagaatatagcatgcttagcagaagtggccaggaaggcaaacgaacaggtatcatatacatttaatcccaccgtcctatcctgctacttgatcgccttgcaccatttactggtatgtactgacaaaccccatataacaacagatcaggttggcagacaagctcagttcgaatggtttctaatacaacaccgagttgaatttcctagcggagaaatctagcaacgaccaccagccaggtcgggcgaggtgagagaatgcttacgtaaaggttgcacggaattatcatacctgttcctagtgtctgtacccacttgttcctcgaatagcgatccgaccatcatcgtcgtcaccaccactacctacaccgtcttcactcattcgaagatgtcggcgaatccaggctataatgtaccatcaattcctcaggacactgttcatctggcgatccacttgccagcaccaacagcctcctcgcttccgcttgccactgcacttgcttctcagatcgctggctttgtcaagcagcttctcccttcgagttggatttggcatcgagatgctctcgaactcaacgtagttgaagataacaaactgcagacaagaacaaaccatgacggaagaagctcagaggaccactctgaaaaaaggttcaggctaggagcgactgtcagagtcggagattcgatagaggatgaatgggttgctgtctggcttctcagagagatcacgactagatgggatgatttggtggcttcgtaagtttcgtttcacataagtttcttactggattcatcctttgatagcgcgaggattcaagacaaaatacacctcttgtcgagcgtatccatatcacttctgatcagatgaatagaggataggtaactcgtgaagtctcacctctttcgtttatacttacttcttcctcaatctagaatatatgactccgacggagattttctcttaatcgaggctgctcatgttctccccaattgggtgacaccctctaattctgaaaatagggtgcgttcttccagcaactgttacacgctgtatactgaaagccaatcgttttgctcaatttttatgacgaccacttttcctgatgttaattcgatgaatttcaggtgtggatttccaatggatcacttcacttgattcccctcagtgtgttctctccgatctcgacaagaccgccaaaacgggaccggcgtttgacaaacgctgattccgacgatgaagacgagaacgacggaggaccaacggccgatgagcgagcagtcgggtggatcgagctgaataaggcgatagaggagataagggcaggtcggtggagggaccgaaaggtcgaacgggccgtttgggagcggatttctaggtatgtgttttggtcaaaaaaaaagactggtcttgtcaaaaatccttgttctgattattcaatgcacgcgctttatggcatatcatgatgatagctatcccgatgcgctcagagatcatcaacatcgtgctacaatgtatctacctacacccatcgctcttgccctcgctcgtcagccgtcactaatccagaaggctgtcgaaacgttctacactcgagatccaacccaacttcgcaaagctgcacgaatgactcatttccctccagcggactcgacattgacccaggtaacgatgacccgcactgcatatgctcagttaaagggacaagagttctttccgagcaaagcatttggtccagagtggatggacgcactcaccggggatgtctcaactcctgatcgagctgcagagaaagaacacagagatcgaggagtcaaggtggctgttggattcgagattctatgtggggaatcgaaggcaaaaacgaagacgtacccggggttagatgtctcggaagaagcaggccaagtcagactggatgcgctcaagcgccaagaagattttaaaacgtatctccatacgcttgagaaggctggttggtttggtgatggggagatcgagggcagtgagcggtggaaatcaagagaaagagacgcagcggcgggatggcttaagctaggaaagcctgtcgaggatgagtcagtgacattcaacgactgccttcgtattttactgatcatatagagtatacttaaagtgttgctgttcggttcatgttcatgcttccagctcttcgcgaccaacttttgccactctcttctcatccgcgcttttactgcccggtccttcagatgcttccgagcttatgccctctgagccggatgactccgaaaattggctggaggtggatccagctcagcttgatacccttatgcaagaacggtcgtccggccgtgcacctggcacagaaggcgagggacatgtcagagaagaaggggatgtggatatggaatttttgggcgatggatccgaggcggaaggtgtcaaaaagttggaagagttagcgagaaaggtgggaagtttcgtggatggacaaggtcagttggaaggagcaatctttgatgagtgagtgactattcgcctttgtcccacagaacagatgacagaatgtatctgacgcattctgtccactttctcttcctttcaagtgagatgctctcagaagatgaaggcggagctgattctgatgcagacgatgcccagctcgaaagagatatggctgccgatcttgatgatctgtcttcttccgatgaagaagataagattcctactctgactccagctcaacgagtcactcgaatggcaaatctcgtaaaaccccttgatccatctgaatggggattccaaaaccaaaatcctccagctctgtcttccgagcaaccgaccgccaccatgacctcgtcttctgccgcgcctgtctccaatgctgagagctcgattcctatttcagctgagagccgtacattggaggacgtcgatcgacagcgaaaacttcgagagatccgagacgagcaagcaaggaagctgccaccggtcaagatgcgacgaccgatcttaccaaaagactcgtatgatggggtggattcggatgatgaatctgacgatcaagacgggatcaacgaaatacccggcgggaacgcagggatcagtgctggattgaaagaggctatgaagaatgatgcagctgctgatggcgtcatggatgagatagacgaggaagaagatgaggatctaccgcaagttctaggcgaaatggaagtggatatgggagaggaggaagaagactttttgaaatttgctagagatgccttggggttggatgaacgaatgtgggcgaacatcttgaaggatcgtgaacagcgaggaggtgagtgttacaatgctgcatttcaccgcttcagatatcaccctccaactgacatatgggctgttcttgactttttccgccttggaagtttttgtaccgacatccaaaccttccaaaacagaacttcccaagaaaacttctactgaactcaaatctgcttcactctcctccaaaccggcttcgttatctaaatcagcttccaaaaagacaactacacagtcatcttccaccttcacctccacctcaaaggctgtccgatttgaggacgtacttcccgatgaaccaccggcacattcgacgaaaccagcgtcgtcaaccgatatgcctcttcgcgaacgtcgggatggaccgaaaccagaggccccaccaggcgccatccctgacccttctctgaattcgttcgaggctgtgatgcaaaagatggatgaagaactcgagaggcgaaagtctggcaagggcaatccttcgtcatcggcgacggccgctaccccttcgagtaaacctaaagtggagccgaagaataaaccgaaaccaattaattcatcaacaaacaagaaacaaccgtcatctccgtccgcatcgacagcttccaccaaacctagtggaaagggagcgccctcgttcgatttcttgaccgcgtctgacaaaccaccaaagaacacacccgtgatggacagtgattctgatagagatatggatgacggcgaatctgatttcgatcctgacgatcccatgctcgctatggacgccgagcttcgggctgctttgctcgctgcaggtgacctcggatcggacgatgaagcagaaggacttgaaggggacgataagatagactacaatctcatcaaacactttttagagagttataaaagtcagggagggatggctggtccagtggggaacttgttgggcagactaaagcagtaggctccgttaatgtataacaaaacaaaaaagattagagcatgttctcttttgtagctttcatcggatttgattagatgaatcaaccgcatcatcagataaattattgcgaatgtgatgacatatgtaataagaccaagatattgagaaaaggttccaagattataattgatttttttagagtagatg

SEQ ID NO: 2482 - DNA, 5035 bp, Xanthophyllomyces dendrorhous
atgtaaaagaaaaccgcaagcgagatttgcatttgaagccacgaaagagttatgaggtcgaagttgtttgcatttaaaatgaaccaaaaaaaaaggtgctatggggagagaaacagtgaaaagaaggtgtgattagttggtttggtctggcgcttttttttatgtttgtccagaaacaaccaaaaagggaagagagagatcgggccgacgtaccagatgaaatcgaagaagaagtaagtgctgaagaatgtcctacccagattcacccaccagatctttcagcgaataatgttttggcgaagcgctcaaacccttccctacacccatcccaaagtccgaccaagtcctctcgtgtaaacgagacacgggtcttttgttgggtgatctaccagaccaaccttgtccgaattcgcttcttgtccttgtatggttctttccaggtgacctcctctgtgttccatccatttgttctctcgaccaagcgccaatcggtgatgtcaatgatgttggtgatgaggataccgaagacttgaacagagagggagtctctttggtaggagaaggaggaacgagcgatggaattggtaaaaacgtcaaccgaccagatgtcgtgctgaatgtcgaaggtgagagcgacagggtgagtgacagcgtgttattcgtagaaggcgagattgcttcggtaggatgaagcggagaaacagaatgcaagtcattcattgttgttcgtttcgttggagtctgaccgggtgtgattattccagcgcttgagccaaaggttttggatgagttagatgccatagtggtcgaggtgacggtagtgttggtgctcgaattgaggcttgatcctaaattgttcttcctctcgtattctcgacggggtgtctgatcagcatataaattggtgttcaacggctgaatcggccgtttcttcttgataacaaccttccagatgatctcttcttcctcctcctcctcgtcatcatctactccgcttccattaggttttccagagtcttctgaggaagacacactagagtatccatgtttgacacaactcacgcagacgtagaggccaccccctagatcgttccaagctgtcgactcgtctttttgaaccgacacaggatcgtcctttgcatcagacttcaaagcttcagtgccgtctttgtctttcgctgccacatcgtccaagacgggcgatttgatctcgatctcatgtttggattctgtggattcagtttcaaactgtctggttgtcaagtccccttcgacgacgatcggcgtcgacatcggcgtcagagcctctcctttatttgatcgtgatcggatgaacgatggatggttgggcggagcagggaacaaatcgctaaatctcaagaagcgcgctgtcgaatagttagagttgggttgatggccgtttgaatccttgaccgacaacgaagtcgttgaggaattggtcgagattgaagaatatctagagcgagaagagcttcttgagctgtttcggcctaaaattggtaacttcgtagtcgagatttcttcggtgcgatcgtgaacggatgacgatttcgacatttcgaacgaactgtttgatcggatcgaaccgggtcgatgtcttgatctggctagaaccgtcggatttatcatcgaaggtagcaatgtagagtttcttctacttccgttctggctgtcgctgtggttgttggttgtaaattcgggaatggcttcagaagccgccaaagcagccgccgaagaggatgaagagacggacgaagctgttgattgataggaaagagatcgatggtgcatcggtcttgagtagttcgttctaggaatcccgttcaagaatatgggtataggcatacccgctccgttcgctcgacttccaaacgtggccgatatcctcggagcctttgatgatgatgatgattgtgatgctgataaaatagctgttgtcgctgtcgtcactggcactgtcggcgcgctcgttgccgaatcgaaatccgtcatcccaacatttgccgcgctctcatggtttccagcccacacggggaagtcttggtctggagccagaggcaagggtgagggtgaaggcgaagcaatatggatggggtgtttgaccgaaggcagaacaagtccattcgatacgatctttcgggtagctgtcgggagatctgtactccaactcctggacatcccttttgtctccccctcacattctgctccatctccatctttatgatctcttgtgaggccgccgggtttgaatcggtccacagttgatcgacttcgaaggacggaaaccgggctagaatccggctcctgacccggattgacagccggactgaccttattgggacctttcagaccggagttcaaggatgccttggccgatatccttgtcctgcttgttgaagtgatcgaccctgacggcgattttaaaacaggagtcgtcgaagttttaaattgatctcgatctcgagtcctagatgcaccatccttgacctttgaaggagatcgtaacctccagagtagattcgtcttgttcttgttcggctttgagaatgagtttgatctctgagcaacacccgaggattctgatatctgtcggtccgcaacttggggcgcgtgcttgccagagttcgactttgattcttcggacgattgaagatgagtttgggtagagggagaagaaccgatagatcgttcgatgttcttcggctttcctaccgtctgcgtcgtgttttttgtagacgatgataacggaatttctgtcaaagatcttgtctgcgttgagttggtcctgggagatcctcctcccccattaatagatttcgttcgggatgtacgtcctatcgatccgtttgtgcgtaaactatttctttctctgatggaatcaggcccgatacctgtaccggtgctggtactgttgccagtcgaaattctaaaaggacagagaccacaaactcagagcgttaatgacgcgttccttccaaccttgatctgaagacacagtccacggctatcactacagacctggacttactattgacttacctcgatttgatagttctaggcagagaagagttcgaagatatggatcgtcgaccttttgtcgcttgggcttgattgatacgaccctgagatgggactggctgagaagtcggatggagactatatgtagtagtaatggtaggagttgggatcgcattctgatcggaagggacttgtgatttctgggatgtcccggaggagttggatgaagatgcgaatccgaacggcatggttttctctctaatggctttccttccgagaaacccaactaaacaggagacagtgtgtgtgtgtgtgtatgtatgtatgtgagtatgtatatatgtgtagaaggaaagaacgaaagatgtgagtgatgaacaaaagagcttggtttgtcgacttatctttccgtctttctcatcacttcaggagctgaaacaaaacagacaaaaaaaaacaagcgcgtggttacaatacactggatcctttgcgccatcactcatgccatgctctctccgggtcttttgatttgagccccaatcagagtcactgagcggtacatgtcaagaatagtcaacgatggttgttcttctgtaattcttcctgtattgtatctggtcatccggaatgacgactgtatcgaagcaacggaatttaacaccactgtgtgccacgctcgtaaacgccgatcgactgaaggagaataaacttttctttatctacagaacatgcgtgtttgcgatctaatcagtgtacaaacggaggagactgtttgtgatgacaggcgatacagaacgccaagaatgcgacagggaattggaaaaagagtgacaagaggtgaggcgagagaaaggaaactttgagaacagattgtagaaaagagagcgaagcaagaacaaatcccagataaggaaccaaaagatgaagagagcgacaacccaaactaaagaataaaagtaagaagaacaaggaaaaacaagggaatagccatcctaacggatgtcttagttggccttggtcccgtcttcagggtcctcgagctcaatggcggaatcgctaacggatcccttttcggagtgagggaaagttttggcaagaccgtgcctgttcttgtaaaacatgtagtcggctccgtcctcgacgaattggcattcttggaaattcttccagagcgaaacaaacacgttctcggtactgtacacgtagtgctctccgaggaagaccttgagggcctccgtagcctcccaggcgttgtctgtaatagataagagatgacaaacaaatatgagttatggtatatgaagtcataaagaaaaggaacttacagtgagggatcttggaagagacatggtggcagatgtgggtctcagaaataccgtgctgcaagtaagctccaacaaagccgagaacgtttcgatcgacggtggccaaggcacctcgggagaagttccaggtctcgttactgtagtgagctgtaaaaaggaaggaaggaattgaataaaatcatcaggaaatctgtaagaggacgagagggcgttgctcacgaataaggggatcggtgtgttgcaagaaggtgatcaaaaccaaccagctgaaaggcaaaagttttgagggtgatatttagtcagtcctctcataggctgacaggacaggaacaataatgaaagatgattgtactcactggttgacccacatgtagggaacaagccagaaagtggccatctcctgccaagatcgcatcttgctccagtagaccatgataccgataacagtggcgattccgacgtcggaccagatgatgtcccagaagtctcgcgatttgaagatcttggaggagggcaaaaagtggttgacggaccagccgtagtgcttctgtccagaagcgttgatgataaggtagaggggaagtccaaagatctggtgtccgattagtcgagcgagcacaacgatgggagcatcggaaaaggcctcggtgatggcagagtgagtctcgtgc

SEQ ID NO: 2483 - DNA, 1377 bp, Xanthophyllomyces dendrorhous
acataatgctagagatgaggaggcagaaaagaaagagagatgagggatggagagaagaggaagagaggaggacagctgcaaaccaagggcgttaagggaaaaaaagaaaaaaggaggtcaaagcggctcaccgcgtaatcgatcgtaaccattaaatggtatggttactaccaacttttaaggtccgtgcccgaataaagccgaggcaatcaggcgatgtatcgagggataccgagggctggagcatattcgatcagatctcattaatgaacgtcctcttgtatacttctctcatttgctctagcgaaaggtaacgcgatggaagaactaggaaaggcagaaaacttgtctctcagaccgtctcttgtagggagattctcaaccacaaacgtggaacaaagtctcggaaacccaggaactcagaaacgaacgttgacagaatcgacagaaaggaacgggagcgagagtctgacagctactcaaccatcgaaaggagttctcagtgttagcatcgtcagtagccaaatcgacaaaccatttttttatgtctaactaggttggccaagagccctccttattccagccaatatctgtcaaagacagtttgtttgggttgatctcaatctccaagcgcttcgacaagggatctccaggcagagtgttgacaaagctcaatctttttcacattgatcgtgcccacatccttgttttcttatctctgacctgagcttcctgcctgacgaatatcgcggttcctagttccgttgtttctttgtcacatcgtaattgagctcgtatttgatgttgtggcttcatctgataatcttctggctgttagccaactaggaacagaaatccgttcatgaggacatatgagcagacagtttagcatattcgcactcatctttactgatggaaaaatcgccatgaatatgaacgtgatgagagcgactgataacaggcagcttgttaagagccaacagatgtgagatcgaatgtgccagatatggggttgatgacaagccgggactttaagattcttctaatgattgagacaccaaagacggtcatgttagggttatcgttggccctaggaacgaaatttgtgcaaaaccggccctgagctgtttgatatcattcacttaaatgttttgagcaaattcctcttctaccctttcctttttttctcttcattgcgatccgacgatgacgaccgtccaatctctgattaatcaaaggacaaacttgtctctcacagatgtctctctcttttcaagagcagaacgtctgggcaacgttcgctagaattgtggtcgccttgagtccaaatcggttcaatcttacttttacgggatggaattaggtagacctacattc

SEQ ID NO: 2484 - DNA, 1688 bp, Xanthophyllomyces dendrorhous
gacctacattctgttcgtcttgctcccgggtttcggttccgttgacgttctcttgacgtttcgaccgaaccagcccggtgagggttcattctatttctactttatctttctcattcttttcctctttcttctcttcctttgaaggcttatcgagaaagagattcaaaacgtgagtttgtcttcttcgtcagcacaaagaaacgggtcttgaatgatgatactttattgcaaagtgggaatctctcctaaatcaattgaggacaaccttttttacttttgctctctgacctcgacccgtcttcgctcatttctttctccaatttctttctgtgcttgggctgactgttattgctttatcgctttcttgctctgaaaaagtattcttcctgttcctaaaggtggaattaaccacgaagatatgaaaactataggtcagcatttctgtttatgaaaagttcaattcccttctcaacttccctacatcaatctcgtcacccacacacccttctatcttaaatgattacaactttttcatgcaccacgcttactttcctttcgaggagatggtgaaaacgactacaccaaaacttttagtcacccctatgattctctccttcctatatcctcgtcttatctgctctctgtctgttaagaacccggaaattgactaagtttcctcttggttattgattaacgacagatagtgagttttgggttgtataatatgatgtattttcgatatttagaaagccaaacttagaaacacacgaatagatagaacaacatggtgtacaacacatgttcgcaacatcataaacatatttgcacaacctatcgacagattacaagagtgatctctcgaacgcttgacaatcaccgagtagattagatctcgttttggttaggctttgctgctcaatcctttcacaacaacatactctgtccctcgactacctaaccaactctcaggtcctgttctgttgatcgcccggaccccgaaaagccttctatggaaccaggctttcgtgctgttcattccagaaagagtttccaaaataatcatcagtattctattcctagaaaccggaagaccgacaggaaagatatgaccagatggaaggtcagaaaaggaggaacgacgaacgttgtaccaggctcaggtttcgtccccattgttttttcagcctctttaattaattcgctcagctctgagagaggtttcagaattgtcgtatactcaggtacacttctcataatcaagccatacatacgtcagctcatacgcaaacagataggtgggtgaagcacgaaaagggaagacctacaggaaaaagatccccgaccatcgggtacataccctctgcgcaccaggtggcggtaggaccctatgtaagtttgaccgactatcgttttgtttccattccaagatggataaataaaaacaaaaacattcctgtcaggacgggatttctgaatcaatggcaaacaaccataacaaagaaggtaggaagctcacagaattccaccgctgagaacaaccaaggcatccgcaatattacaaacgatatgtccctccaatggctagagcatctcgatttcagcttactcctgtctttgttcttatctgatcaaatggagaacgatgacggctagaagaacatacctgaacaaattgccactcgtccgtt

SEQ ID NO: 2485 - DNA, 424 bp, Xanthophyllomyces dendrorhous
gtcatattgttatttaaaagtgtctacaacgtgtggacgtgttgaggaagtagacaagaatcagatctagatgagtcagatgaaagcaaaactggatgcatacaatggttccaaagtcggtgtgactctgttgttcaagacacaaaccataaaggagagttagaagcacaaaactcgattagtcgaggcgcgcatgtgaggctgaggcaacaggactgagacccactcccaaagcgagccggtcaacctcctggggagggtttctgataactctagccttggttggcgagctgtacccttccccttccttatgaaacgcctcaagcgtgcctggagggagttgtagatggatctcaagttttgaaagaatcgatctgcgtatacaattatgtgagcaaacggatttggtttgttgcaagagcga

SEQ ID NO: 2486 - DNA, 4952 bp, Xanthophyllomyces dendrorhous
agcgacagaacactaaggagaggacaaacaaggccacattccgagcagaggtggtgaactcgcgacagacatcgatattgtcggtcaccggctggaggcatcaatggaaaacacgtggagttgagcaacgtgatatggaaacaaggcgcaatgagttgcacacacgcactttgggataacatatggacggatggtcaggaaacgatagcatatcatctcgtgaaatgtctgtgtatgaatcaggcgcaattatcaacgaaaagcgtcgtacaaatgactgatggaagaatcaactgactgaactgctcgttggtactgtggcgccgaacgatatgtttgagaaatagttaagatggttgatacaatatagatcgatccccacaaggctaaatcactcactccaccgaaccgttctcatccacgttgtcatatccaattgctttgtagctgtagagaaggcgagcgaagaggaagatgcgatgagtcggccggatcgtcgtcctatactgaacataatcagagtaagacttgcccgaaactgctgtcagtcagaccaacgtcagacttggccttctcttcaccatccaacgcaaatatttgttcacatatatccatcagaggctcatagttgatcccatggttgccgagatagaaaaatccaagggatgtgcaagcgcggaacagtttatcagattcgacagatgcaaccttggaatcggaggaagtaagtcgagcgtgatcgatgatagggagatcatgcgtgttcgttgagctcgctgggaagggaacctcaggcaatcggtttgctgtaggcataaaagtaatgtgaaaactaggatagaacagtacagaataggatgtgatttagaagatgagggtggaggaaaagactgtttcggatgaaatctgggaagaatctgatatctggcagcgtggaacaaatcactgcacagacagatcgcgatcaacgacgccattcagatcgagcgctcgggttctgtatcgtatactgtgggttgtagatgagtaatcaagtctgtgaacaaacatgatagttctgatatgatatcctgtttctaaacaccatcaatggtccttcatctctatagtgatccaaaccaaacgatctgatcgagtaggcagcgcagacgtagatggacacagattgatgagaaaagatggtggaaaagtctccccatgtagcaaatagaaggagacagtgtatatatccaaaagttgttgtcgatatgatccatgtgcacacacactgcctctccatctctatcctagccaccttcaggctagacatcttggctcgatcgatggtagcatgatgagagaaaccgtaacaggaatctgttgtgagatcgattgaattcggctgagacggtcgattacttaatcgattccaactaccacccatcttgaattcctcatcatctcatcagatacccgcaacatattcagacgaccatcgcacattcggacacacatcgggcattcacacgggtacacatcatgtccaacccatcaggaacctcctcatccatacctaccagcttttccaatacaaccacgaataattgttctccagcaataatcgctgcagcctcgacttcaacaaccaagaaacccatggcccctgccgaatggtctcgccggttggcagaggtcgagtttgacagaacagacttgaatagactagtgatggattatctgattgtcgagggttatagagatgctgccgaggaatttgcgaaagaacttcggtcgaactctgatcggtctcaaacgaggcctaggtccttgtctggacagcagtcaggggcagaggatccggatgggatgcagttggatccaactgatgacggtcaagacgccttcaacctggagggtattgaagtacgtttcgccttgtgttgtttccctttctctctcttctcagctcaaaccgttccttctgatttcttcctctgtcaggaacgtatgttgattagggaagcagtcgaggcaggccgaattgacgaagcgatatgtagagtgaacgaactcgatcctgaggtggggttcttgtatctatcgtacatctcttgcttcactggacttgcatgtttattgtcatctctttccctggtcagattctcgacactcactcaacactctacttccatcttcaacttcaacggctcatcgagttgttgcggactagcacaaactccaattcatcatcctcgccaactcaagcactcctgtttgcctctcaaacgctcgctccactcgccgcttcccatccgtctcatctggtagaattagaactggtgcttactctgctagccttccctcctccaggtccgtatccatcgacagacatcgcccaactggtctcccaagatcaaaggcggaaagtttcaaaagagttaaatgcggcgattttggagagcgcaggcagaggggtggagagtaggttgatgggagctctccgactgctcgcctggggagagggagtcttaaaatcaaaggaacggccaattcctgaggttgaggggatctggaagacagaacacggagtatccgtgtaggctgctcctgatcatctgttatcactcgttcatcagtgtcgatcccttttccacagttcaaggaaatatctataagtttttactttctttcttgtctctcgtcttgggttgttgtatccatccgcattctctgtacttctgctcctacatgcctctcgcgatcttgatgatatctccataggcaaagccttttcatatcaaaacctgacatctcttggttggactatgaacttccgaccattctccctcaccgaagctttattgacatctttcgccagcgccttcctcatgtctgtttaaattcatacacatattcaaacaatttggttagttctcaagacgcaatttcaagcaccagggtaagaaagagcgacaaaccaaatgcatcttccccatccttgcctccgcccattcccgagtaataaccctgcacccttctatatacactataacccagcttttcgtacattcctatcgctattacgttgttacaacggacaaaaagatcgacgaagtatccatcatgtgtaggtgaagacgaggctcgctcaaggagagtcataaaagatgatgctaaggatagtcgacggaattcgggcgcgacctggtacggaaagagaaaggaaggatcagcaagaaccgcagaaagaaatatgtagaattgagatacgtacggtaacagctgagagatgtccatgatggtcggtgccccttccttcagacttcccaatcactatttgtagtgcaaccggatcacacaagcatatctaaatgagtaactagtcggttgggttgaaagacagccagggagatcaacgaactgtaacccatgatactaccagaaggcgtcgtttgaatcgcgcataggtctggccatttcgctaggtacgataagtagaactgattcgaatactagatccgatatttttgatcatttcaatcgacaccattttgatagaacagaacggcaagagacaacgatgggaagattatttctgtcagcctcgtcgttcgggatggacagataaatgattaaggacagacggtttcggtgaacagatcaacgttcctatttcctcccaatagcacatatagaatgactgttcattgattagtagaccattatctgcagaatcgttaaagagagaatctagacagacacgttgttgaatttaaagagatccatagctcgaagtggtctaagaatgctcattttgagagattgatttgatgttagagaaggtttattgcccaaagttgatgatggcttgaatgaagattccgttcgtcgtttttgtcaactcaaccaccaccaaccaccttcccaacgaggataattcttgtggttcattcaagtcaaacactcaattctccctctctgctatctgcttgtacaaccgttgatcgactcgtctcaacatgggtgtcttggaaaaggtctgtctcatgtctccttatcgattcagatttagccatggctgatactcacactcatcaatatgaactttgaatcattctctttatctagatggaggccgtgaagtgtgcgtaaacgatcttctcagctcagagaactaacggaagacttaccgcgtacaattctgtcgtcaatactgtatcgaccggtaacagtggagatgtcgaggacgcagaagaacaaggcgaccgagtatcatgtaagctacaaatcgaccaccttcgactgtgctatttataatcttaagatcctctgcgtattgggataggcttcggaattctaactctcttgtttgtgtgtttttatttggggggaaatgtagttgggaacgttgaaagccaaattggcaaaataccgagcgatgctcctcgagccagacaagaagtctggaaagagtggagaaggtcagccttcgctcatttgcctggagttcagactaagacctacatagctgggcttcaccagaaggtctaggagctcactggattatctcttgaattatggttcataggattcgatgtgatgaagtctggtgatgctcgggttgctttgattgtacgtaggcttctccagaatgtgtactcaatcgccccgtagtcccaacggctgatatctctcttttgggtctataataggggtttccttcgtatgtagcgcttcaacacatacctatcaactgtttgtttcctaagactaatgatctgcggacttttttctgtgctaccccacgtagcgtcggaaagtctactcttctatccaagacgacgaagacggcatctgaggttgcttcttatgagttcaccacgttgactgtacgttcgacttccttgctctctcatctctcttgaactttctagatgatcgcgcgcttattgaacttcctcacgtttgtaggc

SEQ ID NO: 2487 - DNA, 9065 bp, Xanthophyllomyces dendrorhous
tttgtaggctatccctggagtcatcgagtatgagggtgcgaatatccaattgttggatctaccaggtatcgttgagggagccgcctccggtcgaggtcgaggtagacaagtcgtagctggtaaggtcttgtttcaatgagcggacgcctgctctgtcatgttaattctgaatttgacttgtcttttatgcgatggcctacaaagtcgccaaaacggccgatctagtaagtcctcaatcttcccaaaaattgtattctacgttgtctcctcacaatcaacatttcgctgaaatcttcctataaacagattatcatgcttttggatgctacaaagatcatcgagcagcgtgcactccttgagctggagctcgaggcagttggaatcaggctcaataagaagaaaccggatatcgtgttcaagaacaagacggctggtggaatcacagtacgtgtcttggctgtataaatgtttcggctgttatctgcctcttaaataaacaataaagactacactaaactctgaactctttctccacactagatcaacgcgacttgcaagatgacaaaaatcgatgacaagatgattcgaacgattttgcagtcctacaagagttagtggcttttcttccttccaacaacgactgtattgttctgaactattgttactttttgtttcaaagttcataactgcgacgtgatgatccgagacgatgtcgatacggatgaggtcagtatatccattctgtgtcatgacattcaacacgagtcgttacttactcttctattctataatcaccaatttctctctccttatagttcatcgatgtcctccttggcaatcggaaatatgtacaatgcctctacgtgtgtatcattttctcacaacctctctgttagcagaatgttgtcaatccacgtaaagttgctaaacaagtccatcggtcttacgatcctcgctaaattaggtctacaacaagattgattctatccctttggaagaggtagatcggttgtcgagacaggctatgtcgttggctatctcttgcgagatgtcactcaagttagtttttcctccttcctgatatatactgatgcccataggtcaaacattgatctattgctcatattcccttgcgtcggcttgaagcttggactaccttcttgaaagaatttgggacgagcttgcactcgtcaaggtatatacgaagaagcgaggagatcatcctgatctgtcagatccagtttgtcttagacgaggagcgaccatcgaggtacgtcaccaagagatagcttctggtttcaatttctgaccgctgaaggctaaaacgttctcgttccgtattgtccatctcctcagcatgtttgtcatcatattcacagatccattgccagccatttcaggtatgccctcgtctggggaaagagttccaagttcaacccacaaccgcaaaaggttggtttaacacatcagctgatggatgaggatgtgtgagttcttcatctttatcttctgaattaaatttatcaattctagtgaattagcctatttgtaatcttctttctcatgcttatcgctgatctttggagcacttttggtcgttgttttgatgtacctcaataacagtgtgagcatctttacgaaataaatattttacgcgaaattataatgcatatccccaaattaaactcttgccgagccggctctccgactattcgagttagattgctcgtccctttcatcacgtttgacactgatccttctgatgtcaggcactgaccactgatttccaggcactggtttactaacaaaagccgatcgactggaaccgaggttgatccttgatttcacaaaccattcattttgaaaggcactcaccgatatcctttctgtacacgaaaagtggcctaggacagcaatgcttgtggtcgttttctgacggttgtatgccgaacgctctcaccagtcatgtttcttgatctcttgatggaacaaaccatcacagttctcgagcagaaagtggttcgtttacagaaaggtactatttctctgtcagtcctgtggttgcagtcgagaacgtgtatcaggaggttcgacggatattctaggatgttccttgttgaccttcaagcgaatacaagggcttcaggttccttggcgtcgttgtcaatctatcacagtgcgtgcttagggccacttacctatttgctgtagatctatacctgttacaggaacgcgactcctcgtccacgcacacgttgatctcagggtctcccaaggggttgatcaaagaaattctgaatgagaatgacggaggccattgaaggaacaccggatgtggctctccggatcgtcataggtcttgattgctcaacacatgttgtgataaagaacactggaatcagaggtttataatttaaagatggaattcattcatcgattcttttcctcttttgtcttttctctctatccatcctcgttttcttttccctctcttcttgtttgcgttggtctgtttggaacctggtctactctggctatcttgaccgtcatttgccatctagttctcccattcatcaaccacaaaccttcacctcacctcgcctcgccattctccagtttaccctaggtcgatctttcgccacaatcgtctccttttcttcgcgaccctttgcctttctccattacctttcttcgtccgatgctttctctctcgattctctcagggcagatccctaatatcactcctctcacccctgtcagtatttgcacttcttccgaatatggaacgccctcgttttctccgttgttgccctgcaagtctcttcctatcgctatttcgcccgatccgcaatctcttctatggactccgccggtttctccggttgcctcgccagacgtaatttatagtttggcgaatggagaacaagagagacctttggatgtgaacgacaggacaaaaatggcttggctgatggatttgcggacctcagagtcggacacaagttagtcttccgcctctgccttcttttagagaattatcccaagggcagctttcttattcaatctcttatttaatcgatcgtgtgcggatagtaaaagtagctgagatcgttctcgagttgttccctccggccgatatgcactcatctgaggtgtcggctggagcgtacacaactgaccttgctgaggctctcagatactggacgtcgttgacaccgcatcctgtacgtctcgttcagttctcgtcatggcgatgtctcaggtcaagagcctacctgtccttacttaatgatctcgatttgtgctcctcggatttccttgatagtactgcattctaatcttgaccgtctgcttactcgagcgttttaaagctgcccacccctctctgattgcttctggacgtgagtttgatcattttaatttccttacgtgcgtcaggcgcatactctgttcatcggctcatcttccttcgatacgatcctcataggaatctcggatacaacacttcgagttgtgtttgctgctttcttgttgacgaccaaacatgtgtcggaagactcgttccacaataccgcgtttgtcagccgaactccatggacatgtggagaaatcaactcaatcgaaaaggagttgtttgctcggctggactacaacctctatttctcggctgatgagtacgttggaaattccttgactggattctacattctgttcgtaaagcaagaattgctcataacgccttgaacgtgttcacttcatttcaaacaggttcctgaaccgtgtggtatccttcgactctcagccctgaaatccctgaaatgattgataagacccgatacatgtctgcaacaccgttatttattgtacgtttgcgctgatcttcctcacatagcatccccatcctgatccatcttgtaccttgtacaaacaggagttatatgtatttttagtccaatttcgtgaatcgacctgcgtcctctatccaggtgtcccattcttgttttataacgctctattcacctgcgtatcgtcttgtatgctgtttcctagtccatgtgtttctatcttgtacgagttgtatctcctcttcctccctctctctcttttttccttttcaatggtcaaccttgacggattggctaatctgtgctgtatccttgtgagcgctatctgtgtttctcttttgctgtatccgatttatcatctctttcattcgcattctattttcattctcggccgtgcctgccctcctctccattcgcttttgatcatctttcatatctttgataaattcccctctgtctgcacctctccgtatcttattgttccctctctcgattagtttgtgtatgtgtgtgtgcgtgtgttttttttcttctttttttttttctcttctccttaagagcgcaatatattgtactgtatcatatatgaaactctttctgatcgatgcagtagatggttgagggagatgcctgaaataaactttgcgcagccacaatctctgacgcaagtagaaatgtattgttatttatccaccgacaccgtcgtatcatagtatcttcttctctgtcactcctccttcaattctcttgcttctcttagttccaacagtggcttcgatggacacccctactttagaggtcagtctgttcatcaaacctaatgcttggctccttttcgttttctcacaacttggttatgtttcctaacgggaaattcacaccataaggagctccaaagaactcggacagaactcgattcaagagtcaattctttgcaactcgcaatggataatttaaggaacgaaatgaacttgttggaccaagatgatggtgacgagggagtagatgatattcaacaacaagttgggagtcaaaactatcagcaatcggcagatacacgagtgactgatgagggtcgacagagtgtggatacggtgttgccaagcgtatgtcttcttattttgcatgtctcctttgcttgcaaactccaccctgtgctggtgttttgtggaaatacatgagtggtcagaagttgacattgtccaacggctatttataacgccaatatgtctcacaggtggttgaatctgatacatcagcggaactacctgtcttgagttcggccctgcttagggatccacggcctttcgacccagttcgccttcgtcgtggacaagtctctcttttggatttacctcctacttcatcagctgttgagctacttcctacaaccgagcttcgaccacctccctcggctgatgaacttgatcgatcatatagaaacttcgttcaagacagattgactctatcctcactgtctggactaaacggcgcaaccgatgaaggaactcttctctcttcttctccctcatcgcctgttaccccatttccattgaacggatcaaatattactagaagccaaccccatccttcacatcttcaacctcgtagagtccttcgatcctattctgtgactgggtttgactcgaattcggagtatattcggccaaatccgagtttgcgactctcatcatcaacatcagctccaacatcagcatctacgacccgaaggatcttggccgaccggcgttcaaccagggatcctcatctggcaacacaatctgccgaggagatgttagaaagggtggacgaaacagcaatggatctgatggacgttcgaacttcacttcaagaacggtctcaatcaatacgggatctggacggcgctcctcgagtgggcatcttgaatgaaaccttacgaaacggcgtagatctgatcgatcagcttgagggaagacttggcgtggtgcggaaccgtctggtaagattaaattcgagcaggaacagagaatcaacgtcgtctgtacatgtggacgtgttgccgaatccacctcgatcgttttcgatcaggccgccacagttgagaaggggagagtttccaagattggaactttctcctccttctttcgtgaacaatgcatccaaccggacgaatgcaaggcaaaacgaagacgaggtccttttgtctgcctcacctgatcctattcatcctgttcctccgatactcacgtctcgatccgacacattctccgactgggtaacttcgagaggcatgcctgcttcagcttcaacggccatctatgcctattctcccttcacttccaccgatctcatcaacacctccgctactccttctggcgttgctaccactgagatttctaccagtagccctctgtctagtcccgcatctctctcaggcgacttgtcaagcttacctagccgccacaggctcttatttgactccaatatggcatatgcttctccctcttcaactgccgcagcttcagatagattgaggacaatggacccggtcgcccagctgcaagaggtaagagataggaacaactatatgtggcgaggaggagatgacgggatgagttttggagaagagattggaggtttaagaagatctggttgggcggagcgggtcatcggaggactgggcaggcgagcgaggcaagacagaggcggaaggaggaacagaccatgggatttagaaggacacgatgtaaacgagagaggggaagaggactggccagatatgactgaagccgacaaccaagttgggactgatgaatttgtccgtgacttcctattgttcttgttttttccttgaaaatgatagctaattatctaggccttactgcattgcgcatgtcgttctcatttgacggttgttcagagcctacaaagtttctatgatttcgtaagcagatcttcttctcttcctctctgctcgttttcgaagcatcctgttgaatttcgacttgttgatctcatttttcaaggatacaccccaagatctatctcgagcgaacttgtttgctcggtctgccagcgacgatcctgcggtcacggtctctctaccaaaccaaactctccgtcgcgaacttcttctctccggacaggctactctcctttcttcctcacgccaaggagatcaaggatcttctctacagcaccaggcattaccacccctcactctctcctcaacacgagcatcgtataatgcagcctccacctttgatctctcggccatgccctcgactaatcatcctgtccgactgcccacccgtcgatttgaggttcattccttccctgatcgttcctcaatagacccatccaacccactgatagtagcggatcgaatccacgaagacatactcctttgcgaacatcgaagaattgctgcagcggccgaggctcaacgaaagaaggaagaagatgaaaagaaagcaggcgcagatgtcaccgattggatgcggcccgagggagaatatggagaggaattagaagaagagtgggtggtaagacccggtccggttgacttgccggatctatgggcagaatctccatctgctgtgaagcttggacagcagaaactgacgttagtggaaaggggagttaaaaggccaggcgaagagatgagaaaagggggcacgaaagtcatcttgatcgaggcagggatgtttgtcggccgttaatatctacaccacacacataccttctctctctctctctttctactccctgacatttcccgcatttccactcgttgtcctcctcttccaatccaagtgttcaatcaaccgcccgtaggagagagtcatcgttctcgaacgcggaaggcctttcttttttattgccattcttggttattccttgtcttttactttcccctcagccatgctttcatcaagtccttttctttctcaaacccattgttttcatccgatatatcaagcaggcactcttgtcagttacatcatcctgtctaattatgttcttccattgctagcaccttccttcatctttgcctcttctctttctttatctaaatgtatctcgatcatcaagagcaacataatcttcatatgtaacatatcattttatatttgtgtaggtatttgtctatgcttcctttccttacgcgcatctctttccattgagagaacccatttgtatctctggatcgctacgttttaatctatcccatttgtatcggctctatttgacattcttatttcttttcatcattatcatagtaacctatttgttactcataacgaccacaccaaccatgcttatcgtctccagaattgtcagctttctcatgactagttgatcgtatagggcatcatctaacgagacttgttgttgaaacaagaggaacatcttatgaggtggtatgagtagaagatagatgaacaatatagatacagaattctatcaagcgatcaacgctaccgaccgcttcacaaagtctaccctgtccccttctatcggaagaacgcaagagaatagaagatcgctcctatctgaattcaagtagaccggaagtcggatagaggctgtagatccagtgtcggtatcagactcagaaagatttacttccggtttagcttgccatctaaggtaaacgtcggatagtttcgtcgtgccgtcgatcagacgaagagcagagtcatgatatgttgcgccttgaagaacagcatctggtgaattcaacaaacaagatcgattctctcagcttatacgttctgagccatcagaacgtatgagtgaaagaggcttaccagacaattggaatgaaagaccttcttgctttccgatgtcaaggaccaactcaaatctctctaaactctggtttccacttcgagcagcgtattgttgagtagccgacaagtaagctgtaggcgcaaacagaagggagagcgtgatggggtagttgagtccctcccgtgagactttttccagttggttcaacctcatggagaaggacgctataaattgggatgccgaagagcctcggagcatcttgaattttgaccaagatggtggaacagtttctgcagtagatttgggttttcttagtcagatagaggaaatatctagataacgaacttgtgtaatttgtgcaactaacccttggtcagatatgtaatcaaagccctgatgtcattggtttgcttttgggttccctcaataactccgacaagt

SEQ ID NO: 2488 - DNA, 932 bp, Xanthophyllomyces dendrorhous
gactaaccttaggcagagtagacagcgatttcttgcagaacttaagaagattttgcatccaaacgggtcggtctacaatcaccttcgtggaatccggagatgcaacatcgccttcgtctacagagaccatctttcggagattctgaagcaagttgcgacctgaatcgaataagcaataatggcaaccacgtttcacagactagtcagcactatcattttagggactgtagcctatataagacaaaccttgagccgtggctactgtacttgccgctgaacttgtcagtccaagccaagatgtggggttacgatcaggtaagtcattggcccattcaaggtaatttgcaacgttcgttccttcaggcgtagaaagcgctggccccaacgctgattcggcaacgagaggagctccatcgaaggcttctgcggtgaatacagaattgacgtagttctgtaaaatacggaagtcatactacatagattggtttgatacatgcattagatcataacacatgagtatgaacaaaattatatgaaacagatacatacatcgctttccccaatctttccaccatagatggatgtggtcaacaacacccttagcgatgtccacggtagagttgtaggatctacgtttgttcgagtgatgaaagcctcgagcgaagaatcgatagctcggaacgaagctaaaagctcggaatcattgatttcatatgcctacgggagaaagcacatggtcagtcaagaggcagatgaagtgatagtgcgaggagagactatttctactttagtccaccccaaaggctcgtatgtcgaacgctcttgtataacagcatgtaggaagcaagctagcaaatacactgaagaagagatcatgcgtatgagcttgaccgtctgcgcaaaacatcattcaaaaagtatgtacatacgtc

SEQ ID NO: 2489 - DNA, 31209 bp, Xanthophyllomyces dendrorhous
acatacgtctatgcttctctgagggcccttgagacaattgtttgcgagataagctgcgaagtcccatgaggagggtagctttcaatcccctcgaaggctcattcatgactacgcgcgagcttctcaaaatagatgtgggaatctatcgatgcgacgcaaaatgtgttgcggcatgcttagttcagtagctttcaagcagcaaactctctcatatagatcacttacctttgggctcgtctccattgtcaaaaacagacggaagttgggatgcgcgcgaagagtttgaagtctcttttcaagtgttgatgacaaccatccacacaccaggtgagtgtttttgagcaagacaattttcccagtacgagaggcttcggagattgcctgttcagccagacgtagtccttcagaactccccatcgcaactgagaaatgaagcaaaagcatatgtgcacaacaccatgagatattagcatttcagttgatcaatttacactatctcttgataatacttaccagaaatgagccttccagtctcagcgaagagattctcgactcggtaggctgcgtcatgaccaggaatgcttgccaagacgataggtgtcaaggcggtggactggtcagagaacatttgaagatcatcttccgtctctaatgaatgaccaaagacacatttcacaaagatgccagcagccgcctgaatacggtcaagtcgaatggctctcatcaaaagcgtaatgtgacaagcacgtgcaatagctggtttgataaagcttgtcagtagtgtgtttcgaagtcacagagattgagttgagcacataccgctttcctcagaccataaatcagccgggatacgggtttcgggatcactggacgcaaggattgtggtccaaatctcaggattctgctccatgtgggaagaagcctcttggagcgccggtgcccgagtgaataagcgtaactgttctgaactctcgatatccaaaagtggatgctttgtctcgacaatgtggttgagaacaattgcggtctccaagagaagatccaattcgttggccaagacctcctgtgaatcgcgcaagaacagttgcgatagcagcatagcaagaacaagacgatcggtatgaagaagagccgaagacgttcggcgatatacaaccacaaacagatcttgtagaatgatagcaagacgtttagacggatcggagatattttgaaggttcgggttggcttccaaaacatagtcaaagacgtcaaggaatcgagcaagagagaaagaataaaactggttgatatgactcaaattttcaaggacaaagtagattgaactacatgaccttgcgagaggaagatactctgatgtgacctcctcaacggctttcatgacgacatctgtctcctctacctttgtagtcacctcagccgcctcattcttgagtgtctctaaggtatcgatcaccttgtcgtcatcgagaatgttaccagaggattcgttcaaggcagttaagagcgacttctcaagatgtcgaagtcgaagcctaaattcaccttggagtttgatgaggtcagatcgttttcggtcggtatcaggtcgttccaccttgagaaccttgtcaagagattgactttgaagactagctcgggtcatagtgaaattgacgaaagtgactcgactacagatatctggagaaaactcgacagaaggatctcgagtggaaaggaacattgtgaaagccggtgagaagtcgatatcttggttgccaagacgaatgagtactcgacctcctgtccttttgatttccttgttaaggattgcattcaagatcggatctagatgttcgacatcttgaatcaagatagggttaccgaaccggagggcactctcaagattcttcaagaacgcttcgtccaagaaactggtcacagtgatttttcgatccttgtactcgttgaccagataggtggttgcttggccagtggggtcaattatcaatggatatcgattgaatctcttcaacatgatagcgttttcaacagagagggtatctgagggtagagacttcgcctgccagcttatgcggtcatcggctgtcgagagatactctggaagagacagctctggtttaaagtgaatgccggctccggatagatgatcgcaccactccatccacatgagttctcggtactgctgatcgaagaatcctccataagcaaggaaggcagcggagagaagtacatccccaacgatggtgctcatttctgattcgaaggttttgcttccaagctcccacctttccttttctgaggaaagactatctagcaaagtcacactccgatcaactttggtacgaacacgatccatttcgcttcgaattgcctgggtttcgctgatcaagagtgcgtactcgtctttatactgtgcgatactagactctaagccatcgatgagctcaatgattgtcgaggcttggtgtttcgtctgttcagcctgatcttctaaatattgaacttcgtttcggagaggctcgactttatccaagatgtcggaaaagcgaacttgagcgatgacccatttgacgaggggtccacaagccttagaggctcggtctactacttcgaaggtatatccaggacggctaagatactcccgcgccattttgtcccgaagttgtctcgtcatcttagatgtgtcgaaagatgtgatgctgggaatgaaatcctcgcgtcggatgagaccttgcactgttttccagctgtcaaacttgtgaccaagaacagtgcacacagactccatggcaaccttgacggcttcaggtgggttggccatagaacggacttcagtaaggtgttgtttccgtatgttagaaacggcagcctgggcttcaagtacagcaggctctgcctcggcaaggtcagacatgactatggcgcttcgctccttgatttgggcatcttgctttgccagagccgcctggatttcaatagaagctgctttcttttgctctgcctcctgttggtcagtgaccatgcgtttgagcttatcattggcttcagcgtccttcgcctcaagctgagtcttcttgattgcaagacttctacgcagatcctccacctgagtgacagtatctcggagtttgtccaacccgatattgaggtggcgttgttgttcttcaagctcatcacgcttttcgttaaagagtcggacatagtgatcgatgctagagattgtatgaagcaagcggttaaaatgaaattccaatcatccacgtgaaccccgttgaacttacaaatcgaggtagtgtcgaggtgtgacatggttgtagcgcccctgttgccggatgagtcgagcgttgatcgagtatagagattgatggacataaactaatgcgttgacgacagcaagacgatgagtcggaggtaagagaagatctcgataagcgacagggaaatcagaaggagcctcatatgtagctatatctagatcgagagtctgagtgaactcgtatcccacttgatagaatgcttgatctgaccaatctccaaaccagtccagtacacaacgattgaacaaggccggggaggtagcagctcgagaggcgagaccgttctctggaggattcatggtgaaaacgacatgaagattcttggcgacttggtccgtgaaccatcggtagagctcttcgtgagaatcaagcatcagaccgtcacgctgagatccctctttacaggccgtcataagagcagagtaatcatcaccctcaaacaaaccagggacctcggcatttgccaataatgtgttcattctttcaaggaatccagaatctaggacgttcgattcgtccattatgaaacaaatcttctctcccttacagcctgatcgtcgaagcacagttcgaagatcctcgtcaaagtcgtcaccattataatgattggaaactttgatctggaaaatactgagaccgttcatccaggcaacaaatcgagagagtgtcgtctgattgataaaaaatcagaggcaagcaattacccacagagggcgtcgagatgaagagcgacatcagaacaactatcaggctttgagctacacagaatgtaaagagcttacctttccactaccactgactccaattaaaagcatgtgcccttgaacttgacggaacgcacgatcgatacgaagaacgtgatccagtacatcgttgaaaagaaccagttgaacatcaagctcttcctcgtggaaaactcgaagacgagccttggtgtactctcggagttcttcccggtcgaccgccaggtaatttctggaagtccagtttgaaaacaagatagggcgaaccaaagcctcggcgtggttgatagatggaaaatagttctcagcagtggtgtccaatatgtcatccgtccatttcttttcagcctcagtgacaagacgatcctggaatagtcgaagagcttcatgagcccaaatcctcacaagaccttctacggaaagcgactccaagggtcgaatagcctcgtatataccgcgcatccatcttgtcagctctcgaggactgtagatgtagtgcgcttggatatcggctgtgaaccgggcttgagaggcgatgtagaaagagaccatggcttccgtcagaggttcggcataagctcgtaagttgggaataactttgagaagagctcgattgaatgttccgtaaatctggttgagagaaatttctccagggtaatcaaccataatcagaggagcatgccgaaggaatcggtgactgaggggaactcgaccagggtcggtaggagggttgcaagcccctacaaattgaatacgttcaagtttaacccaggccatatcgctcgttctccagaaaccaccactctcgaccaactgacgtatgaaagagatgactctttgagttccgtacttatctatagcaggaaggttgatctcgtcgcaaaagacaactagccatcgaccgatctgagtgggtgccaacaatataccattgggtgtctttcggtactcgcagtattgctcgaaggtcttgagtataagttctggagtggtggcactggagaaattgagaccgacaacttcgagctgaggaagcttccgaagagcactgaaaagagtcatagtctttccagatccaggagggccgcaaagcatgaggggtttatgttcagacaaccaggagtaaatgacttgttcgtgtcggactgtatcaatcgtagggacgacgacgtcggcagaagttaccatatgagtgtcgatgtcgatcacgggaacctttgcctgccaagaagaccactctccagtggaaacagcaacgtcatagtcgataatcgaggtgccagaagaggcaggcggaaggtcaaacccagttttgccgcggaggaactctcccatctcaattcgacgttctagtttcgcgtcgccagagaaagcccagatgatgtcgacgagcattcttttagcgatgtaggattcaattctctcagcagacagaggaaagtcagggtgttggttgttgtactcgaggatgttccatacagacttgttgatgagtgagaacaaggtgtttaacgcccgaatttgggtaaattccatgatgtggtcaatagtttctgcgaattgcagtccggcgttgacgagaccatcgtcagcaaagaaaggatgcagtaaggacaccacagatcgctgggtggagaggttaagagatgagttccttcccataatcgctacttgtcctagttcttcctcatcttcggcgtcaagaggaacagaaccaagcgtgtccaaataattttggtaaaacatgctgggcttgatgatatcttcgctgaaccaaaccattccacatcgactgacagtggcaagagtggcatacttgagatgttcgacttcgaacataattcgtacgtttgaagtaagattcaatcgctctccgttaggaagagtcaaaagtttgttgtcgtcaagaacactatataaagaagaaaagaattaggcaacgatgtctcgagttgatataggtgaacgctcacctattcaagttttcgacccattctggatcgacatctccatcaaagatgatccagtgcctcttagtactctcccctcggacgttgtccacaattttacgtaagatatgagtaaaaagaccatcattccactctcgcgtggtaggatcgagagttccatagagggcgtctttggggatggctttcggatcaataacatgagccacaccttctataccgtctaagcgctctaaggccttgagtaataccttccaagcctcggttttcccacttcctgaaggaccaaccatcataagaccatgttggatcatatgaatctgatatagttgaacaactttctgaacccaaagctctcccataacgaggtgtctttcagcgcaaaccttggagatctcagctttaagggcatcaaggttgatcggaacataattgataccgggaaatacatcggaaagaaggctaaatcaagcgagacagtcagtacagggcaaatgatgaaatcccattatacgcaggagacaaacctcatcagtaaagatacatcatctgcgactagcttggggacgatggtctcgataacactctgtatcaaaatctcctgttcggagattaagtcagacgccttggggtcgatgacctcactatcagtcttgtgagtggagatcaaacgctctctcttgaggagaccggcgctgatgagaactgccttgagagctcttagaccaaagtcgtaatgaggttgaggagaaagctgctcggcacataagttaaagaacggaacgatcttcgatgccagcgtttcagctgtgcggaaaccttgggaaaagagcatgacctgagcgataagctctagatctggttttgtcatggccatactctgttcgattgcaacgtccgcgagagataagaaaggatcagctgcattgacaggcagttgtttgcttcgatgcacgtaccctgaaaagctctggtaccaggtataaaatcaacagtacatatatcaataaagaaaagtcaataatgtgtgagagtaattttacatactcttcaagttatcaggcagattggatcgaccggcgtaaccaggattcattgtgataaagatacctgaacatatacagagagtcaactgagacacgttctaatcaacccatatgtagaaaagtttacgtaccagtgtcggtgttgaccttgagctgttttcccaccaactcgatctccgtgttaggatcatgcacagccaaagcgagaccttgttgaatactttgcacctgttgtgaaactgcactgagaattctttcctcaagtcgattgaactcgtcaaagcatccccatgctcctacttggcaaagaccaacaaagatccggcccatggcttggaaatcaaagttttcatcacagcagaatacaagaacgaatcgaccaagttgaactccgagtgctttgactgattcggttttgcctgtaaataaccataaattagcaatgagatattgttcaggacaccgtcatgagtactcttaccagttcctgcaggtccaaagggtgatcctcctaattgactgtcgagcgcttgagtaagtgtgaggtaacatcgatccgtgagcggagtttggacaagacgatccggaatcccgaggtattcatagccataggcaaacgaagcgttcgccatgtgaattttcagacgctcgagaggattctcatctgaggtgtcgaagtagaatcgcatgtgataaagccattcaaagctcttgttggagacgatcttggcctgtttaagggatcgggtcacatctcgctggtgaacaagctcggtaatcagatgctcgcacttccttctctggattggaggtagttcggtgaggacagtgtcggcaagaagatctagaccctggctgacgactgagagggcattgtccaacggcttcgtctctgatagagcgttttcaacgagacgcgtccaaacgcattggattgccagaacgacgagttgagctggaaactttgcggtccatgccaggaagctatcggaagggaacccatcgggaagtgaataaaatgactcaagctcgcccaccgccttcagtaggagtgtagctaacgagagcttcatttcagactcgattttgagtagccaatcgttgattctagggaagttcttcagttcgattgtgttcacgaatatgatttcctcgccttcacgagaagccatccctaggatagtggtgtgttcttcatcaagaatcaatgctgagagaccagcaaacatctttttcagatgcttcatgattcgaacgatatccttgctgtttccgatgatctcgagcaaatcttcgtctcctacgaagtagaaccgggggaaagttgctcgttctctctctagatactcaccgagagccttctgaatcttggataacagatcggctagtcgttcaagactcttttgtacaccctggatattcaacacgtctagcacgtatggagacttgtacacctttttcatgacggtgaggaactcggtgttaatattggcaaatcgagcactttccactggaagaagatgcttgatatccgcgctgcccgagaagattccctcaaggtatacccattgtcgttggacatcaatccagacatctgattaaggtaccatagcgatgaaacggtcagcaaaaagatgagaaatgattaggaacatctcgtgtcttaccaaacaacacatgaactcggtttaacttttcctcccaagaagaggcctatttatgaatggaaaaaaatgtgattgtcaaaagggcttaacacttcgacgataagctgtactgaaatatacaaacctcatcttcgaaaaccttatagtaaggtgacatcttcatggcctgaagtgagttcagattctctccacattttgtgaatagatcgtcccaacctctgataaacgatcgtgttctatcagtcgctgcttcaaaaaacctcagtgaaaatcgaacaaacctaataagccggcatttgttctgatactgaatcaaatctaatgtatagcttgtccaagtttctcgaacctgaacatgatacgaaaaaccaggtgaggtttcagaactgatataatttagcgttgaaagaaatagattaggtcaactaacctgcttcaagtactcttcaagtgccatctattggatcataggaaaatcacaagacgggcataaaactcagccagtccagtctgcaagcatggaaagtcaagaaacgatgttagacgaacctctccggcggcttgagtaataacttccttgatcaacatctcatttttcttcagattcaaatcgtagacctggcccagggtaagactcgccattccctgagaactcttgagaattttgaagagctgcctccaatgtctttcgcgtaatgcttcagatttgagttcggagatgatagtgttggttttcagatgagtccgaatggtgttctgaacgaattcgaaagcgctgtactggcgcatccgactgggcatctccttggtgaaggtaagaagcccatcgagttgatgccggagtttacgaggctacatagacagaactcagcgaccggtaagtttacgaaggtcatgtccactcgaacgttgtggagagactttacctggatagttgtccagttcatctctcgaatgtcagcaatctgtgcccatacaccagacaacgctgtccagacagccttcaagtctctgagttcctccaggacgactgaaaggcggtcttctcgagtagcatcaagatctagagcctgaatgagtttatcgaaggcaagatgttcagcttgatgttgaagttagaaacaaaacatagacgacttacacccttggctcgatgaacgagatcaaactcttcttccaagcgactaaggcgtccctcaaagacatttacggtattcatagctgtatcagctttgatgtccccttggattggcctatttggacaaaagaggaacaaagttgaatgagtgaatgccaaggcctaggttgattgtgataatccgatgggtggtacgtacttgttcgactcccaatccgagactagctccgtgatcttgttactgataattttgtcctcggcaatgatcttcatttgcaacccagctgcaagcacaaacaatttcatcatgaggaccagattcattcttctgacagaaacaacaaaaatacgaaccaagttgcttctggatagagtcatccttcctcttgagaatctcgttgaacgcactccactctccctggacttgatcgacatagagccactcattagggaattgatacctctgcctctcgagcgtttgctggcctgttacgaagatcgcgatctccggactccatttgacaactttctttttgaggtcttgaacaaacgtgatgaaggtgacagcttgagcggtggagctgccttcgatcgagagatgttcaagatcatgtcgagccttgagaatggcgatgtggacatctcgcatagtggttcctaacatggaaccgtatctactgaggatatctcgttgccaagtatcgtatttggaattgactttgctttggaccatcgcataatcgatcacgcagatcccaaacgatcgttgagtatcggagttgtcaaaagtcgatcgggtctttttgatctcggagagaagctgagcccaattcgagagagagtttccgagacgctataggacaaatgtgacatgtttagccataggcaaaattgggagaggatgaatggaaaactcacgttgtagacctgatcaggaactagatcccaaagagactgaaattgcaaccacttggctacgtaggctcctacttcctggactttcatctctatgagcttgaatggctcctcgagtgtggagtcgttgaattgagtgagctataaaagtcgccgatagatataacaactttcgattagtctagtttctttaagactgagttagaacatatacacaatagctatactaactagcgagatgtaggtcaactcctcctctgtggctttcttcatctgaagcccaatctcatatcgggaactctggattcttttgagtccacaaacgacggctggcagggtgaagatttgatctcagtggttagttatcaaacaaaaaatctagtgagaaacgaaactcaccgagccagccttggagttgctttatccaactagctctagcatgctcaatcgggggatctagatagatgacttgattttggattcgaacttcatgaaccaatgcgacgatttccaccttcttttcggaatcctaagaagatcgtattgtcaagccgcgctcagttcagttccacacgttgaaaaggtcgaacgaatgtaaatgagatatgaaatgattgcacataccttcggcgcgtcccccagaaatccaactctccgcttcgtgtttatctcggcggttccatttcttctgagatcagcatcgtcggtcttagagaactcggtgcaccacactcggatgataagtcggagcctgtttagaaggatctgttcgatctgttgatcgaggtcggaaacccatcgatccagattagcgtagccttctaggttcattcggtcgatctatataattttagccggcgcatatttcaagatcagttctgattcagtatatatgacacgataggcctgaatacgggagtttaaagactgacgatcttttggatattatcaagaacatcagacaacgcttctgagtcataaggtcttgttgaaagttcatcaacaagacgagtgatctcttgatgagtttctatcaaagaatttgttttgtcctgtcagatggtcaagccccgtcaaagaggaaaatatcagaaaaaagatccatccgatctgaaagctgagagcatgcatgagcaagaagcagttgtaaattggaatcatcacctgcaagactgagataacactagcaaactctctgacgaacccaagatgcttgctatcccgatcgtaaatgttgatgaacatttcccagcggagaggcatacctagttgttcgacgaaacaccaaagcatcgtgttaaatttcagatccgaatgaacgatataaagccttcagattcggaacttacctcgcgcaatcatctgctgaacgtcgttacggtaatccgccaaaaggatgacaatcttcggattcacattaatcaaatcggttgtctgtgtgtacgtccggacggtttccatcaagctgaccgcataaggataaaccttctttgcatccttggcaatgacagtgatctgatggggaactgcaaagttcaaccagatcaaattcctgacctctttaaagagggtgatgatctgcggatcaaaattgacggccagtcggaattgattcccgttggacctagaccgagtgacgtcaaacaacctgccgttgatcttgagttcccgggcgatgatgtccatcttccaagcttcgtacagcgggttcgtgtcgagtttcttgcggaacgaagcggattcagattgcagtctttgaccttcagcgtagagttcccatccttttcccagcacatcttccacccgttgcatatacgcggcgagctgacgctcgatttgacgagcccaaatgatggctcctgctacaggagggagatctcgcatctgtgacatatagaacgcctcagaatgccggtagtttgtcgtaaacttctgatgtagccgtttaatatcatctttaacagattcgatcagttgggtctggtactcttggatagcgcctcgaatctgtatgtacgaaagttcgtctcgttagtacagatgcccttgattgatagaacattgataccgtcttgcagagaacagctgatcataccttttgccggacgagaagagaattgaatttggagaagactctgaacatctcattagcattacgagctgttccaagtctatcccgaagtcgagcgatgatctggttctcgactcgagcaactcggtcgttataagctccctctgcgacgagccagatttctgctccggcttttgttttcccgcacggatttcaagacggaatagtagaaggaaatgtgcgaaccattaacaaagctgaagaaattcaacaaaatgtggtagagacttaccagggctgacatcgagaacgtcaagatgcttgactaattcatactaaatcacacgaaaccaagaatatgatcagcaagaatagaaggatatagagatgtctgtgtgttgacatagtggaaacatgatagtcgcactcacagcagctttgacctcttcttccatatcgatatccgtcaacgcatcccccccggtcctcttcaggcccttggtcggaccggtcataacgctcaactgctcatgctgctttctgaacacccggaggtatgaaagcttctcctgaagttttgcatgggcagctaagactctgatctgcatgaatctctctgatcgttttctcgtgactgtctcaagaacccatgagtttacatcaaccaaaatgaaggaaggacgggtcaaacaaacggactatcagaaaactaggagaacctaagagttcagtctgtagaatgagctggggtagaacaaactcacgctctcgagcaataccaatgaattctttcatcatatcgtcccaagtattgaatacggactgacaaacgaccatcaacttctcgaatgtgttgtactccatgtacataagcttctgactggtcagcactttggtcagttgagcatttagatctctagagatggcttccgccagctggagagctctctcgatagggtacggactgcgttcgatagaggcgagagaagtgtggcacgttagaaaatataaacaccactagttttgaggatcatacacgtacgagagtttgagcttgttggagagatgcttgaagatggacaagatactgtcctgcattctctcaagatcggtagcggcgagaaggtcgttcagagggaaatccttcatgagttgattatagctgtggactatcagatcaacgggcaaaagactatcagtgaaatctgtcgttcaaacgtatttatgataaagatgtcatcaaagaaaagccgaatgagaaaacaaatgcgtaccgttcttggttgcctctttgagcccggtatcagcaatgaaggaaacagtggcgtggaacctctttgcatgcttcagaatatccaaagccagtaccactggctcagagcttaattgagcttcgattccttccaacgctcgttccatactcagccaaaagttgatctcttgagaggctgttccggacgctacatccctgttaagctttgtgacggactgaatttccttgatccatttgttgacatccgtctgaagtttgttcagaaaagaagcatctgtcaggagagaggcaggctcgatcgaatccactctgactcgagtcccctcggaatgacaacgttcgacagctcggacgacaacggggtggattgcgagcgtcgtttccgggatctcgacgttctgttgtagatggagtaacgagagctcgagttctgcaaactttttctttgtcatcggaatgcctaacgtcgagcagagagacagagacccatcaacgtgtgagcgcaagagcaaggagcaattgatagaggaagaaggaaagaacgaacccatctttccatcctcggcctttccgttcttgcccagagagtttccgtcttgaccgccatttctgctattgacaaatgcttcgaaccaaggcccgactccccaatgaacgagctgatgcaaactctcataaggcgttcccaccgaatcgttcgctcctcctccgcctggtccggaaccatcgagcccattcccaccgacggtactaccagcggtaccggtcccggaggcgcttccgggcccaaagaggttgaggagactgagctgactggagagagggatcgtttggtctagaagaggagtccgcttgatgagtgccaaagaggctacatgctgaggggcgtaggataaagtcgatgtgagttggtacgagaacgtcggtgtcgaattcgtaggatctgagccaaagccaaagccacacccgcacaaacacaaacgagagcgacgaccacaaggatcagttgatcaatctatgatcgaacgagccgaagaaagatatgactatatgcatctttctgaagaacctgttcaactcaccttcgccctccacgtccgagacgtctctgacttgattgacgtaaacgacaccgacattggctcctccacagaacctctcgaccttctcgaccaattcgtgcttgctgttttcggcgaacaacgatctctcgagatcgtcctccgtcgctcctaaaacgaccggcagaagggtccggaggtatgtctcgaatatcgatggctcgaacgaaggagtgatacgtgcgatggtatcttgatttggaccagacgagaggtctgtgcgtccttcagctggatgaaacccatcttgatcggccatctctcaggaagactctaagggtttcctttggtaaacttcgaaggagcctggaaggagagggtgtatacgtgttcttcttcgtttctcaggggttaatacaaagagagatgccagagaaaagaagagaggccgaaaggaaagaaagagatgagaacggaatgagagttgatggtgtcaaaagtcaaaggggcgatttccgtaatttacaaggcaaaggaaaaagaagccgcgtctgtcttacacgcgtcttgctgatggatggatgattgatcgatcttctcattgatcaagatgtttcacaaacaaatccagagcagaaaatagagtggtataccaggaagagatagaagaaagaactggattgtccatgagcactttactagttagccgagaaagaaaaaaagtatgtctggcagaaaggtaggttgaacaatgggaagggccccaaggaaaaggtctgagacggacgatgattagaagagccagcaaagagagggacgatgaaagagagtacaagcgaaacactcgaattgccgccgatggccaagataaggcaaggagaagagaagaaacaagaaacaggtaggggtatgctaaagatggagaagaaaaattggaacttgccgagacaaaaaatgaaaaagataggcacaggacaagacttgtattgaacgtatgcagaagagagagcaacgaagagaaaagacagagagcaggcaggaaggactactcatcactagggttggtcactttcagaccagtgctctgacctccagccccggcatgtcttccataggtatccaactcgtgcaagctcccatcgctatcgttccccccgtggtcagccgccgcgcccaaggcaggaccgataccagctccggctgctgctccaaggtaaccgtcgttctgtccggatgggaggtatccatggccatacgtagggtcgtacccaccggaaggatcatatccagaaggatcgtacccaccggactggtcatagccggcctggtcgtgggtcggttgaccgtatccgtgatcgggatggtatcccccgttgtcatatcctccgtcgtgttcgcctcctactggaccctggccggaatagtaaccttcggcagctgcagccccatccgtatatccaccctgatggttgctataaacattagggtcgttgtaggcgttggggtcattgtaagcgttcggatcgttgtaagcatcgtacggctgatcggagtagggttcatctccgtaggcaccgtaagattgaccttgaccagctccggcgccgtagtatgcaccggcaccggcggcagcagcaccagcagcaccggccgctccataagcggcaaaattgttgggatggctgtactgagacatggcgggtgcgtcgtgagcagagttgtaggacgttccaccgccgaggtcaatatcgtcgtcctcgaacggttggcgcgaggcggcagcggcagcggcagcagcaaccgaagcatctcgatctggtagaagagagagagaacaagagttcaattgagttagaaggggttcgaaagataagacacagattgagagacataccaagtcgagcggctcgacgtctcctaagaataaagaatccagcggcgaggatcatagccgctcccgctagagtagcagaggacaacgacgacgaaaaggaagagacaggtattcattgagcaaaggacgtagaagaacaagattcggagaaagaagaagaagaaaagaaaggtgtgttcacgcaagacttaccaataccgacgacaacaaagacaccgacgacggctccggtgttgttgaagaacgagctaccagacgaactggatccagggtcgctcagacttcctgggttcttgacgacctgggtgatggtggtcaccaaaccgtccgcctgggtgcttgtggcgaccgaagtgaaagaagcaggcgcagaggtgacggtagatccatgagaatctgtggtggtgatgaagacggtagaagaagcctgaacgttcgaggtcgaactggatgactgtgaaactgtgacggttgaagttggggtgactacgacagtgccactggttgacggggtgagggaggcagtggattgagtagtagtagccgattgagacacgatggcggtcgaggttgacgacgtggctgattgagtagtgattaaagaagaagtcgagctagattcagtcacgacgactgtagtagtttgttgagactgtgatgtcgattgggaggttacggatgtcgatgatggctgtgcagccgaggtcgaggccgaggtctgagaagtagtcgatggtgtggcgatagtagtagacgtggtgacggtggtagaaggctgttgagcggtcgttgacgaggtggtgggtggttgggaggaggtcgtgggcgtggtcggcgtcgccgacgtcgtcgtcgaagggacagtcgtgctctcggcggtagaaataggaaccgaggaggaagcaacgggtgtggtctgggctgccgaggtggatgcggctgtatcagaaacggaagctgatcggattgagtatgaaaggtggatcggtaagagaagtaaacgatatttgtcagtttgttcatctctaaaatttttttcctggtgataaagatgagtataggataatggccccatcgttttcccggatgaacacacacgagagacaccggagctagatctctctttgcggagcgtccaggttcctccgcaccttctctctcacagccatccgcctacgcccattcatctgatcgtgttacaaaaagagaaagaaaaaaaggacaaatctcccgacgacctcgacctcgacctcgacctcgagagaagagaaaagaaaaacaaatgaaaatccgttactcacccatgatgattaagattaagtaacacgagacacggggtgttgtttgttttgtttaattatatagttgattcgttgtcgttttacccgagattatttttgattgagaagaaagacgttgttgagaaagagagcaaaagaaagaggaaggattgaaggccgaggtggatcgataggcagaggaggagagggaagttttagaggatttatccgaccgaacgcgatgaagaatccggagaatgaacgggcaggattacaatgaatgcaaacgcgacggaaggaaaccagacagagacggtagaggcagtgagagggaagagaaaagagagagagagagaaggacagtggttgcgttgttgtttgccgtttaagggatgattggaagaacgaagagagagcgttggtgagaaagagcaaacgaacggacggggaggaggaaggcggggatatgttgaataagggtgggggtaattcaaaaattaattcaaaaacatagtcttggccttcacttagacaacctagagaagctgtcaccgatcggcgccatctttcgagatctgctactatagttaccgccagtggcgccagctgttcagattagatggccttctttatcactttgtggattgcacgtgacgatggagagaatgtcgagacgaaggacaagtagtggtggaggagtagaggagagatggaagaggagaaagaagaaagaaagaaagaaagaaagaaagagaagaaaagcgcacctgaggtaggagtaacagccggggtagactgagccgccgacgttgtctgcgtgttctgagccgaagtggaaactgccgctgtagaagtcgccggcgtcgaagcagcggacgtcgtttcttggttcgcactgacagaagacatttctttctttctttcgtctatgtccttagatctttgctacgttaggcctgacgagaaaagtgcttctttcttcctgtggttcttgggtctgggatgaagactagtgttgaaatgtggacaggaacaggaacagggtcggtttttagcaggtaatcccgacaaacgttttttttaatgttccggtcggcctgataagaatggatcgttccttcttgtttcgaactccaatctattaggtctacggaaagctagtcgaggagagtgcgatgggcagaggtcgctctgtttgataactgactgtcgaaaagaagcggttggaaggatgactggacgaacaaccgaaggaaaagaaagggttgaaagaaaaaaaaggaggctgcgtaaaagtttggggtttttccgattagaaatgtttgaacatttttcaatcgtattatcaacacgtcattgtaagaagatccataacagtaacaattctctattctatagtatagtatagtatagtgtagtatactgcaagtgaaagtctttcttgtacggcacacgtcgttcttgatactctcatcgcataacgaaaagacaagaagagtaaaatgatctccctctgcagacacatcaacgttgagaaatgagataaggagtgagatgaaaggaaaagaaaagagaagagaagaatgcacgaagaaaagaaaaagctcatcccgatctcagcttcacactcagtcgtctctaacctcggccgacccagtcgtggtctcaagaatacccatccgcctggcaacataatcctggccgacgatctcaaccgcctttcccaacacaccgaccagatgctcctcaacccactctccttcgtcatacccgacgttcaaccaaccacccggaacggcctgtgaaacggtggacgaccggagaccgtgtgcctgatcggagagcaggacgatgaacgacagatgatccggattcggcgtcgagataggggtcaccgctggtgggacctcgccctcggccgaaggcccggaaggcgaaggtgagagggagatgatcgaaggttccgcgtagggcagaggagccagcacaggttgaattcgaagaaacactggcgacaccgtcacgggtaaaccgactatgttttattatgttttccagatactcggtcagagaaaactctacaatggataccgggattgagaagacctttgatcagacaaaattggagacttacttgcagttggctggttaggcttgctcacatggccgtcaatcagttctttcaacccggcctaaaagttcccatcaattgaagaacgaacatgtattcagtcctttccttctctttcctatttgaaaagaagaacgtacctcagccactttcgacgcaacggccatgccttggatcgcgttcaaatcgcgctccttgccagagttcgaccgaggcacaggatcagtcttgcccctgttcacgataagctcaccaccctcaacttgctcgagaatctttgattgaattggaatagaacccacgaagattggtcagttaggcaggaaggtttaatcatcaattgtgactctgatattcaccttggataaacttcggtacacaaccccctcaactctgaaacacctcggttaacaaaaagaaaaatcagacacgcttcgttctagtccagacagaagagagaaacgagagcaaagggaagaaactcttcatcagactcacccgtcgtatccaaacatttcgtgggagagccagatctcaatgacctcatgttctgagatgggcggcgcgatcgtcgccaacagagtggagaacccagactgggaggcaaccacaaggtcatgtcctgtgagatagggcatcggaaaaaatcagcaggaggtcagggcaagagcaaagaagagagacacagcacttacgtagtttctctagatcgacctgaccgacacccttgacaagaccactcagcaggctacccccccacttccgaccttcctcgaccgcctgtcctgcccgggctttggcatcacccactccgacttcttgaacgacatcacccatcgcgctttgaacggccttggttccctctctctggagagactctgctgtagttcgagcctgttgaatggcagctgaggctgagccccaaagggaaggtgcagaccagccccagctagaggaagaggtcgaagcttgggttgaggtcgatgttggcacattgggttgtccggaggaactgtcgacgttggttgattgaataggaacaggggcggatgctggtgaaggtgatgatactgaggtagtaactggaatggctgacggcacggctacaggtgaaccaacagctggtggaaccgaagaagacctaggaatggtcgatgatgatcgcttgagagtaagacctggaaaccaaacgcacacagaaggtagtgtaaggcttttttccgagattggacatgaatcagagatgaacatctttacggtggaactcaccattcaaaaagtttaaagcctcatctgcctccttgtcaccaatggtctgttcactttgaattgattggtcgtcctggtggtgttgatcgagcgaactgacggtgcccgatgtctcggtcgcaggtcttggagactggtctccctctgttgggagatccgagcttgaaggaacatcatcaacattaaagtcgagatcgtccaagaactggagggcttcttcctttttagactttgccttggacattagaggagagtgtgacagcgatgaagcaataccaatagggcttgtgatggtttgtgatggcttgcgatgatgatgtcgagtgatgggagagaactatgaacagatggatcacctttgaaaccttcagagtttacggtgtatttatgctccgctctccttgtgtcagaccagcacagatggcgacgagattgatgatgaccgtccagatactgaacacagaccgacagacaacgggtctgcagagcgtatggttctcgatgtgattcatctttctctatctcaagtttcaacctggatgccatcatgtcgggaacgttgagtgtcacactctgtggtcgactcgagagcgccgtctggcttatatatgtatgatcttctggatcttgctgagaaaacaacattctacatgctctcctcttctctccagtatacaagacagcaacatggtgttctccaagcaaccaaggtagcaaaaattacatacccgggatgtatagagacatgtgttctgttgttgcacttccaaggtgaccgaccgggcggtcacgtccatcttgctcacttgttttcttttcttttccttggtctcttctactctttctttcctctcttccatctcatttcctctttctttttctctcctctttgcatacccaaccttcacctctacattctttcaaaaatgatcgctacctctgtcgtcttctccttgctctccgccgcagcttacgctcagtcgaccgtctctgccgttgatattgccgccgaacaggtccgttgctttctccgttctctccaccttcgtcacgtcctttgttgtttttcttcttcttcttcttcttctttctttccttcgttggctcctcaattgccaagctcgtttgctcacttggttcataccttctcttcgccactcgacaggccaactttgagcgtgagtctcttgtttgttggctatgtttcttcttcttttactttctttgcgcaaatgttcaaaacaaacccaaatctttttttttcattttcttttccatattccacagaatccctcatcgtgcccgaccttcttgccgaattcaaccctaccgccgttctcgctgtcacttacgatggcagccaggccacttacggtcagaacttgaccatctcccaggtcgcctcccagcctgttcgtccctgcttttcgtttatatctctttcctgtgccacctttcgctcacactttgaacatcccacatttagaacatcactgttacccctgagagcggagcatctggattcgattctgatgccaccttcaccgtcgctatggtcgacccttcttacgccggagccgatcagtctgctggacaggttcgttcaaatgatatctcccttgcgcaataatatgttccttgactgatcgcctgaactttccttggcacgcatgctgttgggataataaaaaataaaaaagactcgacactggctcaccaacaacgtcaagctcatcggatctgccgctccttacagcttgaactacaccactgaggccatcaccgcctacggaggaccctaccctgcgtatgtcattgatagcttgtgatcgcaagttctcatcgagtcactaacctgttggattgttatgatcgaaacacagttctggagatggtccccaccggttagtgacgcagcacgtttatagaagacactcttgactccgtgtacaatttgaatgtgactgaccttgggcttggcctttcttcccttaaactattacagatacaccatcctcctccttccccagcctgaaaacttcactgcccctgccggcttggatactcccggagtgagtagcttctctgccggctagaattgccttttctctctgagctttagtgatctgatcgctcatcttttttcctcttccttttctgtttcaaacaaatctaggtccagatctcgacctttgactttgccgagtacgtcagctcgtccggtcttgagcagcccgtcgccggattctactaccaggtcgagcagggtgttgccactgtcaccccctctgccacttcggctgttgtgacctcgaccttggctgccgctgtcggagctacttcttcctccgctgccgcttcctctgctgctgcttcaagcgcagccgtttccgggtacgtttcctcactcttacttttcgaagctttaggccttcgatgttaccatcgttgttgttgtcttttcttctctttctcctcctgtccttgcgttctttcttactcatgtttcctggcttgctgaaaacctgtcacagttccagtgcctcccacgccgcctcatccaaggcagcctcctcttcgtcccacgccgcttctgcctctgccgccgctacttcggcggtcaacggtgcatcttcctctttcggtgcttccctccctggtgcgctcgtggcgctcgtcggggctggtgtcggaatcgctttcgctctctaaaagaaacaagaacgggaggggcatgcttcttgatgctaggttctttttgatgatgatgacgacgacgatgacgatgatgatagggaggagaaggatgtttggattgttgcgataacgtatttcattcgttctcttctgctcgttcttgccagtttgtcagtatatactcttctcgtgccagcttgaagagacatgcaatacagacacgtgatggaataacgtgagaacgtttgaaaggaaaaaagaagaacaacattgaaagaaaaagagaaaaacaaaggttcaaaacaatcatgagacgaagaaaggaacgaaacggcaaatgcaaaaagaaatatgagcgaaggaaaaggccaaaccaaggatagatgaatgtatgaacatatgaacaggtggacgacgaagttgaccctcttcgcttccacgtttctttaaaacagttagatagacgaacgaaggaattgtggatgaagaggcaaagaagggaagggaagaaagacaggagtacccaaaaactagagaaagaggaggaaaggacgtcctccgtcttctcgtcaacgctagcctcttccgtcaacgactctcagaatagcctccagctcttctcttccttcatctcctagcgcatcaaacattccatcgaacgaatcaaagctggtttctccgtcgtcttcgtcttcctcctttgcctgtaccgtcggcttggatccctctttgtttccttcggggtgatgatgcggctggttatgagactgacgggtagtcctccgagaacctattggtactttcggaggcgggtacagataggcttttgagttcgcttcgttcggtctcgccatcatcgttgcgcccggtgtggccaccgtcgtcggcgttgtggtcgtgatcatcggtgttagtggggaggcatacgataggggtttggaagattcgttcgtcgttgctgtcggtattggtaaaaggttttgtgtggcttgacgagtcattcttctcgtcgtcgtcgtcgtcgtcgtggcatgagtttgcgcaggaagaggttgaggggaaggtggggatgacggtaagaagagtggttgcttttcttgttgtcgattttgattccgaggctgaggttgaggcaagcacacgggcgctggcgcagaaggaggtctagaaggaccggcgaccagctctgtcgtcagagcgaacgaaggcctctttgaaggactcgtcagctctgatgattttcgcttttggccttgtctatttggcgatagacaggacctcaacggtgagcccccttcagtcgtccccgagtctgtccccaaggtggctaccggtttaggagagaccgttatctgcgaaagcggtcggagaggagagatcgcacgggtgttcctttgatggaactcacgcgagtccgccggcgccggttggagttgggcagaaggctgagggtaaggatgagggtaagggaatgacggcgctgatttcgatttggaagataacgtgtccaatctgggactcatcgacggaacagaattcgtttgcttggctccgttctgtcgattatgcaaactcaacggaagcttgttgccttcacctcgatctcgctcgaacctgtttgatccggctctgttggtttccggacccaatgtcctggctctttcaaccgaccgagtcatccctgcagacaaagaggacgaccgatcgacacttctcactctgttgaacgtcctattcgcgttctctctcgcactctgttcccgctgttttgtccgacgggaatcgacttctgaaagcagtttctggagactccatggttcagactgctgctgctgctgctgctgctgatgatgatgatgttggtcgatcgtgagtgatggagtcgtcgggtccggctgagtatcacttgccgagtttgatcgggagaggactctttcgggaaacaggagcggtgatggtgatcgagtggcctgccgaccgggcgctagcgacgaagcggatgtcggcggcccggcagcggaagccaaagttgtggatgaggaaactgaagagcctgagtcggtcaagattgaggacaacgaatcgttatgtctaggtcgcttggacgaattcgagccaatcggccttagaggtctcctggtgtgtggcccggagggaactgagggaggagatgttggtgcaggctcttgagacggtgtaaagaatgtttttggttctgtagggaaggaggacgtttagaaaaatgacaaagataaaactgttgagcatcctataggtttagggtatgataggcatcggaaaggtaagggaaggagcggagtgtgtgtgtgtgtgtatgtgccgcacatacctcgtctagcggccgccagtatcttttcctttagttcataatttggacttcccacccacgccaggacggaaggcagaggcgtcgacggcggaataggtagggctgaatcctgttgatccatccgtccgagcctttgtgggttgtgcgttcaagcaggtttccaagtgtatgtagggttgaatgatctgtttgatgaacctccaaacttctcccaggcgttctgtgagtctacctgtgtggaaccacttcaaccctgtacggtctggcgtgaaagcagagccaggagaatacgaacgggccgagatgaacggaaacaacacaagagaaagattcgggatagatggttgttccaaatgaatcaagaagtcaagtagaacgaacgcgtccgggtggttgtgtgtctgttagggttaaccattaaaagttggtcttggctctcgctatcaacgttcattcatcattcgttggatctttgtatcattgtgtttactctattgcgctcgaaacggatggacctcaagactcaagccctcctctcccagacgcgcaagcaatcagcccacacacccatagcggtgacgtctccaccggctccgcttccctggacgaggagcggtcgaggcgcagggtaccgggcggtggtgaatgagatgatgttgtcggatccagagagcgaggtggcaaacggatgggtggcggggtacctttaggaggaggcgaagggagaaattggcgtcaggaaaagaaggagaagaaaaaagggagaaaagaaagggaaaggagacaaacttttccaagctgcacttgatctctccagtctgtccatcgataacaccgacgtaacgcagcactttgccctccttctcggcctcctccctaagggaatcgaagaagtcgtcgccctctgccaatcgatcgagatactcagccgcggtgttggcgttctccaaaacggggggaacgagcgactttgtagggaccgaagcatacctggaaaccattgagaaagatgtgagttatacaaagactgacgatataaggacgggagaaggcgacagaaaaagagagagggagagagaatagaggaccatacccgttctccaactttttggccaagctggggatctgcctcgaaaggatggtgactggggaggggattttgaatcagatttcataaagctcatgagatttcgagtcgtcctatctgaaggtatacttggaagaaagaaacatacgctttcgggcgacgtcgacgccggaaagatcatctcttgggtcaggctcggtataaccgagagacttggcggtgtgaatgatggaagagaacgtcggcttgtcctcctggggcttagcgggcgagtagttgttgaagatgtatgacactagataagtgaacaaagagggattcaggtgaggacaatcgaaagagaaggagaccggtaaaacatagagaggagaagataaagagttattctgactcacaagttccggagaggacaccctcgatcttgacgatctcatctccagtctcgacgagatccttaagggtggtcaggatgggaagaccggcaccgacggtgctctcaccgtagctaagagtgtttgcttcgctggctgcgctcaaaacattggtccagagcttgagctctccactccatcccttcttgttgggagtgcagagatggagtccgagcttgagaatggtagggtacagttcggccaagtcggccgaggaagagttatcgaccacgatggtctggcctttgacggcggtgagagactggaaaagagactcaagctccaacggcttggcctccgggtgggcatcgacccatttggagggtgagctggtgatcggctcggacgaggggattccagcagggatgtacacggccgaccgggagtttgcgagcgcaaggagggtgaacttttggttgagcgccggtgatttggcgaggatctgaaggaaggatgttcctactccgccgagtccaagcacacagaggttgatcttgttgatggccatggtgtgagtgagtgagtgagtgagtgagtgagtatgcaagagtgtgagtgttgaggtgttgatcgggtagaggctgaagatggaggaaggaaggaaagaaggaaaagttgggttcgtgagagtgattatgtaagcagatgggttgtaaccaatgtgatcctcacagcgcacgcacagattgatcgggtacaaggcatggaaggaggtatagaagaagaagaagaaggaagaggagagagagggagagaaggataggcgagggaactcgatgggttgaagagacttctgtacgagatgggctcattagtgaagatgaaggaagactgcagcagcagcagcgactagcaaagaacagattctccgagaacttgcgctgaggtaagatgcgttgtgatagtagaaagagcagctacttggggaacacccacggggatctcagccggatagacgataagaagagcaccaaggcaatatcaggacatgaccaaaggggagtactaaaatgttgatggaacagttgctgtgacagatgctatgaccgatgctatgacctatacggcgacatatacaatgatctacactatagcagacgatacaaaaacatgagtggagagacgttgctaggatgttgcaaagatagagagtgactaggaacaactcaggcacgatcgaggcacgatcgaggcacgatcaggaaacgcctagagagacactggaagcgaaggcaccaagagcagaggccctgggagagagagagagagagcactacggagggaatagacgatccaggaacaaggcacgcccttcaggacacacaggcaccaggaacggcggcggcggcagcagcggcggcggaagtagcaacaacagcaacagcagcaacatcagaccagaatatgacgtatcacacacactcacaccagcacccatacttgcacacactctcacaccggactatccacaagagtgccaacatcaccatactcactaccgccagaatcacagctagcgtgcaaccagcgcaaacgagtatcttgtcaatctcttggtggctgattctcgcccaaggacacacacacacacacatatcctcactctgtccattgccgcacgtcccccgacgaaagccgaggaaacccgatgggcgcgaacaaatttcgtcttcttttccttctcccttttcttttttttcctctgctcctttcctctggacagtcatctttgatcaggttgtatatctccgttgtatccccttctccgtctcgctcgctccgtctctctccttccgctcccctgtcccgttcgctctctccaaacgcctaccgatggctgatttaaagaaacccgtgctgacgtatcccttctggtatgtgtatacttacacgcgcgtcaaagagagaaactctcattggacagaccgcccatcgaactcgtgttgacctatatgtattccgttttcttttcttctcctactcactctctgcatgcatgccctttggctatcgttatgctctcggtcggctggctttgatcgcgtcggtcgttctgcgcttcaaatgatctaggtgtggaggttcgtccaacacaagtttctcctattcttgcttctactcgagcatgtaatccgctcacacgaccgcttctctctcttcttttcttctttcttccttgctttctctcgcctcgctctctatcttctctcttctcgaatgcttcgtatcgattctcaggtgccgccgcttccagtcagtgcttcttttctcttcttactttctccagatctccttctccctctgttcgctgtctgcgacgatcggcccgatcatccgaaagagcctcgctcaagaaccaactgtctctgctgtttcaatcaaaccgtacaatgacttaacgatctcatcctcttatccttccaacgcaatcctcagtggccgcatgtgtcactcatccgttagatcttctccgagtgtatgttcctttccatcctatctgtcccttcagacacgagcaaacactaagcgacctctgattcgcccacccttcagtcggatgcagacctctcaaatcaagactggtttcggttcgaccgctgtatccgtcttcaaggccaatggtaggtgacttccgcttattatcatcgcaactactcttggcctgttctcatgctgatttcctatcccacttcctctctcctcctcaggtgtccctgggttctactcgggtctctcggcctctatcatgagacagatgacgtattcggtcactcgattcggagcttacgaacactttaaggatgtctttcgacaaaggaatcgttcgtcttacacctttttgtgatgcctatcttctttctttctttct

SEQ ID NO: 2490 - DNA, 26698 bp, Xanthophyllomyces dendrorhous
atcttctttctttctttctttcttgaaactgatgtctgccttcttcgtcattcgtttgtaccttttcctctccagctggctcgaaacttacgcctatgcagatgatcttggctgcttcgctggccggagtagcaggtggaattgccggaaaccctgccggtccgttctccatcgctcaacaaatcgaccctacctttgttctctgacgaccgctatcttacttcccttctcaatatccaaataatcaatcacagacatcatcctggtgaggatgacggcagatgcctcgaagcctccggccgagagactgaactacaagcactgcttcgacggtgtcttcagagtcatcaaggaggaaggtgtccaacaactcttcagaggtcttggaccgaacttggtgaggactcgtcctgtctttatctctttgaacatagtgcgcgcgcaacgtcaagttcttactctgttttattccctcttatcttgtcgataaccgctcctcttcttccaggttcgagctgtgttgatgaatgtatgctcctgtccatctttccgttaactcaaccgcatatccaacacgactgacgagaaacccttttgaaatctcgcacttaggcctcccaacttgcatcgtatgattggttcaaagagcaacttatcgctcgcctcgacttcaaggacggattgttcttgcattccatggccagtctaggtgctggaacggttgccaccagtacgcttctcctgaccaatcttcctttcgtttttcgtttttcttttcccttccagactaaccctattcatttacatcctgtctttacaaatcggaacggatagcaatctgcgcaccggccgatgttgttcgtagcagagtcatgaactcaaaatctactgaaggaccggtctctgtcctactgaaatcgttaaaatctgagggtcctcaattcttgttcaaaggatggacacccgcttggatcaggctggcccccaacacggtcttgatctttatcttcctcgagcagatcagaaaggtagtggactctactcgaactctcgccagcgcatgatctcctctaggtctctctttatctgttgtctttatcgttcaccatctcgccatcctgccattccattatgcccccttgcttggtatctcttggttgtttctttcctcgtatccacctagatttccatctctttctcagctcacgattagccgaaaaccaatagatttcctcttttcttcctattctttgcgttcatctccaatcgatcttgcaactaccatcccattcttctctaaccccattcaacttagttctcctcgtactcgaggggttttcggatcatgcaccagaagttaggaacatcccaccgtcctgcttctttccatctatttcttttactggctttctggttttccttttcttttcctcccttgatttcctttcccttcgcctcgagttaacttcgattatcctttgctcttttctttttgaatttgcatccctctccccatccgtccatctatcgcctatggtttataactaccgtctactgcttcctttcccaactttccctttcttttctgtcctctttcttcttcttttcgcttctcataaacattcatcatggtaaatggaattcctctttttcttttctctttctcgccttgggcacatagccacgaaacaagaaggatgccgagaaagatatgcatcctgaccatatatcagaccatcgtcattcagatcatcaagtgaaatagagtagagtaagataaagtatagtcacagaacgaaaagatagaagagggtaggggaagtggggtgataaatgacgagtgcttgagaaaccttttgccaccaagaaaagaagaggaagaagaaagaaagaaaaccggaaaagaacacggaagcaggatggaaaggaaggtgaagagagagagagagcaaaaaaagaaacatccagagattatgattttactccatgtattcgcgctcttctcccctccccctccctctatacagccctaaccctaccaaggccctctccttccattctgttgtccgaactgagtcctcactgtgaccggaacggcgttcaacttgctcggactagccaacgaagcgaactgaggttgttgttgttgttgctgctgttgttgttgcgattgttgatgatggtttcgattagttgaatgtcgggattgattcgaattttgggattgagaagaagtattgtccccccctcctgttgatcccgctgagctctgtcgcttggacgccacgtcgaaagacggtcggctgggatcgagccctcctctataggaagatccttgattacccgagaaagtgttgcctgccgattggaacaatttctgagacgatccttgtccttgtccttgctgctgctgctgctgctgctgctgctgctgctgttgggacgtcttctggtgaggtggtggttgtcgaccttggaatccttgactggtcgtgccagttgagaattcggatagattccggaacgaagcctggatgggtacgccctggatcgggtacgtctgagaaggcaccggctggggaagtggactgtacatcccatgtggggagtaatgaatagacggctgaggtgaagtcgatgggaagccaacggcaggatggtagtttgtcccggaccgggtagcaggcattgccacaggtagccacacaccaccttgatgaggaacatgaacgggagggagaaatcccatggatgaattgctaccggtcagcagacctggctgctgctgctgctgctgttgttgttgttgttgttgttgttgttgttgttgttgctgctgatacggttgagcggatggttgttgatgaagggagtggagtgattgttgagagccactccgagtcataaatcggtcggttgagttcgatgaagaatgttggaattgaggtgatgatgagccgtatactccaccaggactactgctctgtaccgagctattctccgggaaagaccgcccagacaaatcattctccgttatcgagccttgtctcaactgagggtggataaagcttgggacggtatgcatgtggcctggagaagggaacgattgatacggattaccgtaccctctgtgtgaacccgagagtgagccagaagaatatcctgagcctgtcgattgaagagaagaccggttttggccgaactgagcggagggtgtaaacgacttgttatttgtaaatccagtactgttcacatcagaccgattcgatcccggtaaggttgtctttggagtgaactgcaagccggacgagaacggagactcggcgattttatctttgccagagggttgagcccaaagatccttgacgtggttttctgaaggtttggtagatgcagccggagacttgctccaagcagagcttgtctcagcgctcggaggcgagagtgtcgaactcaaaacagtaccgagcagccgagaacttgggcttgccttctggttgtttcaccaatacacgtgaaggtatcggaaacagggaatgcatggttagtctacaatctcagaactaaagaaagaagatgaactgtacacacctcctcttgtgataatttcggttcggaactgctcggacgcatgatagagggaaattcgggaagatcctctcccccaggatctgtactatttaagccaagttcgtccgctcggaagtcatcgatttcacttgtgaccatgaacctgaccagcggggcaagctgttcctccgaagccgggttaaccgagttctttcggggttggtagaacccgacgtctgtaccttcaggcattttggctgccgacttactcttggacagtcctgaaggagaagtcgttcgtccgttggcggcagatacctatagtaagttcaggtatgcgacaaggaaccccacatgagattaagagatatgaaccaaatcattaatcacccgtctgagtatgaatgaggagcaaggagaaaacgaaacccacctgaacatcgtttgtcgtccctgtctccgctgctactgattgctcggattcctttgccttcgaactaacctccttcttgacctctgccttctccttctcttcgtcttcgtcttcgtctttctccttgtcattctctttctcttccgactttggagtctgtacggtcttagtagcaccggctgattccggtttgaccttttcgcttacagtcgacggtccagagtcttttctgcgccaagatgtttcttccatcactcgagatcctgccgaggtccatgctggtcgagcaggtgttggtgggatgactgcgagaacaggaggtgtcggggtcgctgcagaaggtttctctgtcgtctgggaaggtgcttgcttcatgtcaacggaagaagaatcggccttgttcgactgtcttgtggagacgtcaggactggcttgttcactcgagacctctttctttctggacagagagactttgaaagatcgcgcaacaaatttcctcggaccggtaggagacgggtttaggagcatctcatctctagaaagcgtcttgggattcagcatgatgtaaagtggaggctcccaagataacgtgttgactgcgcgaagtaagtctggcttgtcgatgaactttgtctgtgaagggttcataggaggtcgtttgatagtcgagctagacggaagcttgacagtgatctcggacggcggaggagaaggtgcacggggatgacgtgtgaaaggagcctcctcgaccaacttgaacatactcgagatcgatggttttctcggtggagcagacgaggccattgacgaagaagcggatggccttcggggaacctcttctgttggtgaaaagccagattttggatcggctcgaacagtcgaagtaggtgatgtgagctcctgagacttgctcatcgctcctttgagtcgaagcatagcgtggtcaattgacgagacgtcaagttctcggtggaatgattttggatggctcgaaagagtaggggaggaagacgcgttctttgacgagtgaccgacaggaggatgagcatgagggtgtggaggaagcgagtctgggtttttaacggccaaagatggagaagattcgactaaagggggagttgaagatacagtaggttgaggagaaacgttagacggttgagtattggcggctgaaaacgaagctttgagagatgctgaagatcttctccaaacattctctactggtggcgcagacgaagctgcagaaggtagttgatgtgtcgttgatcggatggctggtatgcttttgggggcagaatcaaagaaatcagatgcagatggccttttgagtttgttgttagcagtggaagtgctggcgctattagtactgtcgacaagatcagttggagagataggcaaatccttggccgccatgtttgccaagtccgagaaatcgatcacctccacatcaggatccgatgacgagaatgatggttggttatccaaaggagtactcaacgccatcggtcctggtgttatcgtgggttgcgtcgtagaatctggtggcggcggcgacgacgatgatttcttcacttcctgcttggatgccgactcttccgccgctttcagctttagctttttctctagttctttcgcctttgcttttgctcgttccgccgctgctttcctctcttcctcttctgcttcgcgtctcagcctcgccctctcggccgccgaatgcatctcgcctttttgaatcacggtgatattttccggtcgatcaggcttggaagagagcacataagcgttcggagcatggtctagagggttcggatgagtcttcggtggagggacatttcgattgactcctaacgggccccgttcgtccggcgctctggatactggcaaggaagttcttggatcagctgatgcctctgttacaataggcaggccagcaagaggtggaacaccgtgagagtacgaagaagacgcaggaggggagatgatagagcgaggctgagctagatgaggaggaggctgtctaccgacaggatctcttgtagaagtcgtgggagcgctctcccaagcagagcgagaggaatcggtcgaggatccccttggaccgttgaaatgaggtgggccagcttttggaatctcttcctgatgcggcggaggacctcgatccatccagccacccgttgagttgaatgcactaccatgttgttggggaggtagtctgtcactggacagcctccttttctgggacgattggattgaggtgttcgacgggctggttgataaatttggaacgggaggaatagggtgtcgttccggacgattgccgtttcctattgatgaggaggcttccagacggttagaccgctcattgaagagcatccttcctgaagagaacgacgacatgtgatcctctgactttttccaagaggttgaggacgaagatgtttgcggcggaatttgacgaggaggatatgaactctggaaggaggagggtcgtccgcccgaggtagaaagataggacgcactgtccatcgacgatcgagactgtcgagagatcggaataggcgcggatggatgggttgcatgcgtacttgagcccgttcctatgctcatgcctgcacctctgcttccgctgatagaagaccgcttctgaggccagcttcgatcaaactcattcgagcttgggcgttggggtttgttaacggatgagccggttgaagtagtagatgttgtcgggggtaacggagcagagggcaggggtagaggtgtagtcttgaaatcgaacccgtcttcgaattgaacgacttcgtctaaaaaatcatcgttctcatcctcaagctatttatcgcacccagatgaccgccagagtgggataagacataagaacggttggaccatgaatttctctcgaaatgaacgaaacgagaggaaagtatctactgacctcgtcccaatgttgcgcctttggattcagatgcccaccacggaaggaatctaattcttgaaggattgcctgttgatgagccgcctctttctgctttgccaacaatgcgtccgtttgttttttctgtccgtcttctaaactctcggccgtcgttggaaaatcttgtactctccagcttggtccgtttggtcctctagagctttctcctacaggagctcttcccccactcgtaggttgccctccgctctgtccaccatcagccgtcgtcgcaccacttgttctccaaacaggcgatgcttcaccttgtgccccacccaatgccgatgggcgagacgaggatggtaccggagaaggagtagctttgagcccccatgaagacggcggagggccaggaggtggggcagtggggattgggtgaactaactttgtcgtcaacaatcgaggaaccggattcaagatcgcggttggtttcgtcactttaatcgatgatggtcgaccgaaacgatcattcaagagaggcataaaaattagtttttcacataaactagaacggttagatcatatagaccggatatggcacgcgaaaaaaaaacgacttacctgacacagaaccagtagtcgaggcgttcaaggaagccttcggatctttccctacgacgtcccttgaagatcctgcgaatccgacagatggaacgacgaccttctccaagaatctcttgttgacattgatcgagctaaactttttagttgtggccgttgccggagtagattgttgggcggatgccgagctgtggttggagagtgccggagatggattacgggttgatggtccggttggaggttgaggtgatggagccaatctagaagggacagaagcaggagcaggaacagtggtaggagcggaagaatcggcggaaggcgtaaggacatcagatgacggactctccagactgggagtcggtggtgattcagatggtattgcagtccgttgttttctctcgttctctaactcatcttgcttcttcacgatgtcgcccgggacgtcggatggcgagaccgagtctgagttgtcatcagccgaggcaagatcagacgatgtcttgacggcaggtctatcagatgtctctggctcggctgtcactgtctcgggcgattgcgatcgcaatcgcaacggtggtgatgatgttgatttggttgccgtatctgttggaggagaggtcgaactcattccgaccaggtgcctgcccctccgaatgtagatgagatcaagacgaagccgatggaaagcgatagatttcagacagcgaccaaagcagattcacaaggcgtcagcaagtctggacgatgtctgaaacgaaggttttctccaatgtactagaagaagtgattccaatcttgtagatgggaagaaagactactgacatgaaatgtattgataggcgacaagattccttttttctccttggtccttcgggctttcgtcttgtcgttcttctcttgttcttcgtacggccaagacggatgggcaaacgagtgagccaggatgtattgatcgacaggcgagtacgagaacactgcttcaacctaagacgcctacctggggaggaagaacaatcaacagatggtgatgtctcttgtgtcgatggtcacgaaacccgacgagatcataatgagttacaaggctttggctgcgctaggacaaccctaaccgatagtgatcgatacacggctcccttgaactatcgacattcgacatgcaatccacaacaaagcaagggtacaactagaggtttcaacagacaacaaagaaagacgaacaaggtggatagtagaacaagataagaaagtggaagagcaagatgaaatgggaggaagatgaggaggaccgtatagaaggagtaaacgcggaaagatttgttcagagttcttcttcagtactccggttgcctctgtctgtctctgtcagaaagcaagaagattagggagactacttcttggcgggctcttcaggcttaggagcctgaattttgaatgactgtatgaataagaaggaaaaaagaaagtcagcgaccacaaacgagatgagatgcatacaagatggtacacatcgagacatacctcaggcgtagactccacaccgggtccgttctgttcccaaggactggcagactcaaagtttctgaatgcctgagttaactgtagcggttcgtagacgactcgtttcttctcctcgtcgtatcggacctcggtgtacccctgagatcgatcaggggatgactcgtcagctagtgtattaataccgagtaggagatgaagaagaagaaggaatgaatcagaccacatacagtgagggggaaatcctttcgaagagggtgtccctcaaaacctaaaaggcacccaacggtcgagatgatcgggttagcatcggtgaatgacacatggcaggaatgatctctcggctcattctacagctcatctttggagctggcatctaaggacaaccgtaagacgtaccataatccgtcaaaactcttctgagatcgggatgtccgacgaagaagactccaaacatgtcccatacctcccgctcataccaatcggctcctctgaagagagatgtgatcgaaggcactggtgacacttcatccgcccacgtcttgactctgattcgagcttggtgttggatggaaagaaggttgtataccacctgtggatgcaaacaagaaaaaaaaagaggaaggggaaaagaaaagtcaaattaacttctccttgccagactcaggacatagagatgaagggaaaacagccaggaagagaagaaaacaaacctcaaaccggtttgtcctagaaggataatcgacagcagtgatgtccatcacactcttaaagtatgtttgagagtgatctctcaggaagtgtatgacgggcacgatcccgtcaggagcagtgtacaagacgagctcgtccttgtatactgagaactgtgagatgtactttggcatgcacgacaaaaggtactgaaagaatactagcgatcagtcgaagcagcagagaaaaagcggcaaactcaaacacagaagagtacagaagaacaagacatggtgaacggatcaatcaaacacatacttgaccatatacgtgaagcccatcggcggtcgtcttggacttgagagcaggattgactccagccggctcttgaaacggagcaaccgatggctcggctgacaatccagaaacagaagcagagacgaaacaaagacatatgaggatcagtctgcaaggagtggatgaacgattggaatgaatccatcaagaaaagctgatctccttctcatgaatcaagttcttaattctaagaggaaacgcgaagaaactcacccatccgtttgatggcagacacgctcagagccttcctacctacgatcgaagacgacagaggagcagcagaacgaagcgtcctagccagtttcaaggatgcttggagggtagatctggacatttctggactagtggaagaagaaaagagatatggaaggagctcaagaattggctgatgtggagtttaggccaaagatgggcgacaactcaaacggggctcaccccgttggacaaggcgagcgtgttttaaccctagctcgatcaggattaggtaatgatcaatcctccaccttccgatgagatcagacagatcgagagaacatatgccttacgttctactggatctcgaacacttgttatcacacccatctccaccatgtctatgatttacccaacgtccgtcagcctctcaatgatcggaggactcttcaatggtcgatcggcccatttgctcgcgttcgcatactcttttgggctgaatacctggcaaacgtttgccggtggaatcctggcctacaaggcattgcgtgagtataatatatgcttttacacttgagttcgacatattgtttggaactctggagcttacgggggagacgatcggatcgaagctcgaatcaactttagaaacctccagaacaagatcttcccgatctactttttgacaaagtaagttggtgtatcacattcagaagaagcagatgaatgagaagagaagcctgatgggtggtcgacaatgttcaacagctcgatcgcagcggccgtcatgctgggatctcaggtgtaccgacaccctttgaagcagtcaattttcactctctcctctcctgagtctttccaggcggtgtcgcttggactgaatctggcattctacgtcctgaacgcgctctggatcggaccattgaccacaaaggttatgttccagcgggcgaaactcgagaaggaggagggcaagtcgtacagtgatgacggggtcagttgtcgttccgatctcttccttttagtttgtctactgtgagaggaagctgattggagatggtgccgctacaatgttcttccttgtttgatgctatagatatctgaggaaatgaaggtcctgaacagcagtttttccaaacttcatggaggtatgttccagaaatcatgtcagacttgattgtctcgagctgcgtttgttgacagtgtcaacttcttcttttctctctgggtatcggattggtagtatcctctttgctcaatctgggtgcattgatcgtgacgacggtgcatggactatggattgcaaactacggtctttgaagagctattctgtatatcagttttcttgttctatttccttttccttaattggaaaggtcgcatccttggcttttcacacggaacgtgtttgtagcatgaacagaatggataaatgtgcttccttatctgatgtgttggagtgtctgataatctcaaaataagataatcgcgttgcaatgaccgcaatctctactgagttcacacacgtatgcagtattggtaaccataggggtgcaatgttggtcagttgcctcatttatctacagaaacttatttgatctcgcttttgtgttatttcagctcttgccgacagtccggagagaaagagagagtttgagtgcggatgaatgatcgtcaacagcaataggtctccacttgtatgagagcattggaaacaacgatatatgcacgcaaacgcacatgcacatgtacacacacacacacacacacacacgcacgtacacagaccgtacatacaaacatacaaacacggagcatatatacaaatccacaaagcaaaccgagactcgaatgacaaagaaggaaaagcagtgatcaaaacagacggccgaagaaagaacggactgtcaccggatacagagaggacgccgatcgattttccccaagggggaccggcgccgtcaagccttacatatgccaaataactcggatgcggcccgcttggcaaaatgattgtctccttttcgccactcttctgttccttctacatttcgtccgtccgttcgttcgcactggtcgtttaggtttctaccttattctctctaccttccatctctgtagatcagaaaaaaaaaagatcctgtttgttgggacttttgataccttgttcttctgaaacccttcctctctttcaaccatcgaccgaaatctacaaataattaaatgaaaccctactcgacaataacgttgggatcgatcgtggcctcatctctgttgagcgccctgttaggcacgcgtccggtcaacgctcttcctgcgatctctcgggttggaaggtgagtagtcctgttgacctctctccatctttcttttctctcataggcgttgttcgttgctcgtccgaattcagacaaaatcgagtaaccgagttacaacagatgaaacgggcgtaagaccgaaagatcgcttactcgatacttttttccttttcttctcgaatcggtccaaacgcgatccgggtagatatctatatgatgagtctggtacacggttcttcatcaaggttggtctccatccgttctgccacctcttttgtctataagtttcgcgcgttcaacagagacgaaacatctgaccctgtttacgtgtgtatgtgggtgtgtgcgtgtgggtgtgtgtttgcttggacctgacagggagtcgcttaccaagaacaaggcacaatatcggaccaaagcgaagaaggccaagcaaagttagtctcactcgcctcttcaacatcctttctctttctttcttctctcgttttctattcgaagtagagcgcgctcatgctgatcggtggtttccttcgctaaaacgaaagtggcgggtttcctgaaccgtcgtcgtatgtagatccgcttgcagatgcgtcagcctgtcggcgtgacttgccttacctccaacaactaggtgtcaacgcggtcagaatctactctgttaatgccagtctggatcattcagagtgcatgtcgctctttgagggtgagttttgcctcacttgttaacacgacaaacacaaccacagccaagctgacaggctcggatactatgtttgttttgggcgatgatgcaggcgcggggatatatacaatcatcgatctatcgcttcctcagaacgggtctatcaaccgagcgtcccctgcttggacaacaaacctgttggacctctacacgacaacaattgaggttttcaatcaatatgacaacgtcctcgcctacaacatcgggtatgttcctctccccgcgccaactcttgtctctatggcttcgccgggtcggtctgctaactctcagattcgttggatgtatgctgtgtctcggatcgtacagaaacgaagttgtcacactatcaagtaacactgacgtttgttacccttcatactccatttctgcctttcttcttaccataggacgcaatactgatctcatcttttactcaacgcctttcttctcttctaaagacggcgccgttcatcaaagctgctgccagagatacaaaggcattcatcaagtcgatcaactcgactgctcttgtcggctattcatctaccgacggcgacaacgaatggcgaagtaagccgtttctcctctttccccttgtccgacatggttgcatcgtctgacacggcacttttacgatcagatccattggctacctacctctcttgcgcgagtgacgaaacctcgatcgacctgtatggactgaacaactacagatggtgtggaggccagacttacaacagttccggctggtcaacaacaacccagctctaccaaaatttgacgatacctgcttatttctcagaatacgggtaagatcttgctttgtcatctttcttcttcgtggccttttagaactcattgaatgggtgctcttctctgcccataccgggcttttctaggtgcaattctgtaagaccaaggatttgggatgagacgccggcattgtatcaggccccagctaccgatgtatggtcgggaggagtcgcattctcttacttccctgattctcgtaagtcatgtttcttttgtcacctgtgatttcctttccttcaacttctgacagaaggttgatcatcttgatacctccgtccacgtgtagaaaactatgggttgatcacattgtcgaatgataacacttcagttgttgtttctaccgaggtaagctttgactcctacactagtctttcaccgcctcgcattaaatttgattttcttttgggtgttcataacgtagttcaccaacttggccgcccgactcagtaacattaccacttccagtacgcccacccgagcttctgtctccaacgctcaggctcctgcctgcccaactggaatcagcggtttcgacgccagtataaacctgcctaatactccggacgaaagcgtttgcaattgtctcgagcagtcggccttcccttgtgtaagaacggatacggctgctaggttaccaacagtcgtcggcgccttattggactatggatgttcccttcttggatcgacagacccgggtggagcttcttgtgataacattggggctaacggtacctccggatcgtacggggagatttccttctgtagtcctggtgagcgcttcttttgtctattctttttcaagacttctgcttcctggagctgatctatctggatccgtctcttttgtcatgttttcctatagacatcaagttgagttatgtgttcagcgcgtactacgttgcccaaggtttcgatgcccaggcttgttcgtttgctggaaatgcgactcggaacgcaaagtatgtcgactttctattcatctacctctcgttggttgttagcttctttatcaatcgtcctgactcgtcgccgcaaacttgttcgaatacttgacgtacgtagcgcaccgacatctgccaacgccgcctccaacgccgctcagagctgtcttgcccgccgacaatctgacggggttttcacccccaccgttgcctccaccacaactatctcggccactagaagctcgacatcggccgctagcgcaactgcctcgagcagtgggggcggtaggctgaacgaggcaagtcgatttggcatcgtcggttggttgagcgtcggtttgctttcagttcttgcaggtggaacttttgttatttagttgatgttggacaaaaaacgcaaaaggacgcttttgtactttatttccttacggattcgcttaccttcttgagatttagttgactatgcactcttcccccctctcgtcgttccttccttacttctctccccttcctttgtgacatccacccatcctgcttcgtataaatctgtgtagttttatgagcaacaaacaccttaatcgtgcaacctttcctgcttcctatctggactttcttgatcatctttatatttcttgctatttgcatatcagtttctcccattatatatattaaggacttttcaacttgtccacgctatgctctcatcgactgtcttgattacttcgcatcgcacccgctcaggcggatacaactgcaaagaggagcaatacctgtcctcaatctacttgtgctttatctgttgttacaaaaaaggaaaaaaaagagaacccgtgagaaacaaaaaaagttggcaaaaatagcgatggttctcggctttataataactgtgattggcggtgatgtcagcgtgttgaatagttgtccggacttatcgctgaacacttgaaaccatagctcggacttacgcgaccccgacaaacgggaacacaaagatcccacttacatccagaccagtttgaatctagcaaaatcaagggaaaatgggatccattattcaactggctgtatcgctcgtgggtgtgttcgtcttggcgaggttcggttatcagtttaggaggatttatctgcgctcccaggtatgttctcaatcgaccagatcgaacggtggagggtcggaacaatgaatggatgtgggatagttggttcagcgtggtcctcgatccgtccgttcgttcgactgacttctgcttcttggctttaccacacttgtgtcgatgcggaccaacctgctcaattggcgaacgaacgaccggatgactgacatcgcaaccgatcaaacccacctacgattcggtttctcgatcgaacgcggtgactaggttaccacaattccttcgatctttttcctgttcggtacaccattgagatttttcgttccgaacatacccttgatcaatccgatcaaccgaacgcactgggccgtccggttcgaaagtttgtctttgctcttctgcggactgactgtgtcgattgagtgagagcggccgaggttcttaccactcgattctcccattcattggatataggatacagacaaattcagtcatccgtcttcaagacagaaactccttcgaaagaacattcctcgatctggttggctgataagatggcgatcaagacagtcagcaccaacaggaagtcctgggcaaagccgatacagctttatagggttcgtctcatgtttatcgttcttttgtatcattgtggggttttcacgtctcaataccaactccaccaatctgtctgttgattatatttaaatacgtttactggcaaataggtgctagatctctttggaaagaacttggtcacgacagaaggtccagaatggaaagctcatcgacgaatcgttgggccttcattttctgaggcaagtccttcttcttttcgaacccgagtgatatcaccgttagcatacgagcttaccttcaacgcgcttacatgtgtgttgctacatagggtgtttacaagagagtatggaacacgagcctggttgcgttggagcaaatgtttcagacggaagggttggcggatctgaaacctggagaagaaatacaaatagaggatgtgacgcatgttacgatgcgtctggctttggttgttatcggtacgtcttcctccttccctcgacctgaacctaacagtgcgatgagtgatgtaacctcatgatggtatctgatgctactttgaccatccagctcgcgaggcatttagctttgatatggagtatgactcaaagcgggacaccaacgctaaaagtttagccggagatcacacgatgagcgcggccgatgcactcgcggtcgtttctcaaagtacacttgtcaaggtgttgtgtcctaacgtaagcccattttcttttcttctccccgcttgagcttcgatcctcacagttctcacggctgatgtactgtgcgcacatcatcagtggatgtacaagattccgaacattccttacgtctccgaaagactggccaaaataaaagatgcgttcaccaacctagataactacatgttggagatgatggccgaccggcgggcgagcagtcttgcaggggaagaggtccggtcggatttgtttgatagtctgtggagagctgccgatgataatctagataagcaggttgacggagagacgaaatggagtttctcggatcgagaagttgtgggaaatacatgtacgtcactcttctcttcgttgtactttattatgaagtaaggatgaatcctaatttccaacttttgacacctctaacaccgtgatccattcaatatagtcatctttttattgtagatccctttcgcacaaagctttttggtcaccaagatatctactgatcgttattttcttaacatttgatccacagagctgggcatgagacgaacggtcacagtaggtttagcttcttgcctcctaccgtcaaataccccctggttgtttttactgatggtcgtttgtttttccagcaatgtaagcctaagaatgaattgatatttatctagacaatctttaacaggcgccgttctacaggtcatttgtctttgtaatgctagcgctgcatcctgagaaacaagtcgaactcttggagcacatcctcacagttcttcctcgaggtcgacaacctgtgcgtcgtctctttctttatcatttgctgttatgttcgatgttcattgtcagattgtcgattttgttcgttgtttttggatcgtagatatatgaagacttccagaagttaacacataccatggctgtactctacgaaacgttgagacttttcccggccgtcgccgtcattcccaaggtctctagtcagtcttgtcttgtcttattttacctctctatccacttatcatttatacagattcaattcattcatccttcgttttataaaacaactaatctgaccgtcacatatttgtgacattaccattgaatagctgaagacacaacactcaaataccaggacatagggggcgacaacggaatcaagacgatattcgtgcccaaaggaacagatgtcaccattgacacacctgctttgcacactaatcgtacgttctttatcgctttcatacaagtagcgccactaactcttagcacaagataatcatagagactgacttcaacttctgtcgagtgacatagcgctctactggaaggacccgttgagttttaagccagaaaggttcttggaggattatgagaaggatgcgttcattccgtaagtctcgagagaaaggcatctcgtcctcttatataagtctacacaaaaaacttgatcttggaacacggcggctgtattgctaacaagttgcttgcctggtcatcaaaaaaaggttttctgctggtcctcgagcatgtgtcggacgtcggttcgcagaaggttcgttctcgcaattcatgttgtcaacccgacctttcactcatgcctgtcagctttgttcgacatccaacagtgtccaacatggtcttcctctcacttgtcgttcgagactatgaggtcgttgctataccccggccgggtgaaactgaggaagcgatgcgtgataggttggtgagagcgaagccggtgctgacgctgactccttgtggtgccgtcgatctgatgttcaagcgacgagcatgatgttctctaagtatgttgaaatctggactttgcataacaccagatggaaattggctggatgttgtttgagcctccctctctcgcgcgcttcccttcgcgtattttctccttctgtaccctacttggattgtacactcgtcactttagtgtttcctcacctcattaatctactcatctgtttatcatatgtatttctcctctacgggtgtaatcgtctgtatcgaatatgtatcgtctcaacttctaatcttgttcctttatttactatgatgatctttcctttgagaccctcaactctcgagaacagaactaacatagaagcatcagacgaaccacattttgtatttttatagaacgagaaagatacagaagacaatatccagttctgtgaactttttttccccatttcgtgcgatacgacgtaaaaaatagacaaactcaggagaggtagacgaagagagagggagagaaagagagagagaaaggtaacagatatagcaggacagattcagacaaagggtctcctcattagtatacctgagaatctgattcttctctggctgaagggcgcgtttaaagatcctttccctcagggacgtgaccctcagccaacatcctctcaaggctcctgacctcctcggtactctccgccttcaagatcgcctgcttgaccttttctctatcctcctcactcatcaaccttcctttttgaccattctgcacacctgccggtccagatttcgttaccggtgctgatgccgacgaggaggcagccttggaagaagtgaggagggaagtggcaagcgagttaggttgagaatgaggaggaggggtgaggaagagctctttggcagtcgttcgttcttgatctttgattcgggtgtaatcaaggacatgaagctgaccggcagccacctgaacgagaaaaaggaaaatacacagagccatgcgtcaatgattgtcatcgaagatatcagaagcgcgtaggataagaagacaacacgcgtcaaatggaggacgaagggagacatgacggccgtctgtctgcttctttgagagaaagacacaactgtaaggaaggagaaagggtagaaggaccgaccttccagatgcaaaactctctgtagtactgctcattcttgacggggtttcctcccaaatggagatatctaaggcttttgcagttctctagaggaaccaaagcggataagcttgttatcgagtttcctgtcaagtctgtccaattgcgagtcggaggattgaaagaaagagaccaaaacgaaatgaatgatgatgattagcggagaaatggataggtgatcggaggggcagaggaggatagatacgtactgagggttgtcaaattaggaacctatagaccgggaaaagacacgaaccataacaggatgtttaatacccaggacagcacagatacgtaagacgatgggaatatataggtttgcttacagaaacaggtaaagagagtgagatggaggtgattgagttgttggccaggatgatagattgaagacgtgttgcttttctcatcaaacgcgaacgaacaaaatcaagccgtcacaacatatgttcagtctttctggaagagaaaaaaacgcgtccgaaacacaacagactgtcatggagcaaagagcgagagaacatacacagagggatgttggcaactgtggtgagggcgttgtcgctcatgttgagacagtcgtatccaccttggaacgctcctaggttttcgatcgtttggatcgccatacctggatttttgtcgtttttgttggttcggacacgaaacgccaaccgagttgtgtcgaaaatgatacaaagcttcaggttagctacaatgtttaaaggtaatagcctgatgtttggaagacaaagaccacccgagaaagaagaacagagcgagagaaaaaacgagagaagcaaattgaggaaatgaaacgtacctctgaactcaagctctcgctccttcaaaggattgatatgagagggagatcttgatacgagctattttcacagatcagtacccaaggaagatcgtttgaaaagatgaaggcgtgaagaacaaggaaaagagagtcataggaaatcagtttcgacgcaagatctctgagaatggattgatgattgtatgatcccggagtgctcatcccatcctctcctgataacttctatcttcaggggattgatagacaagtagcagagcaacaagcagaagaaccctatgacatacttcaggagtgagtttaaccatggcgaccaagaagagaaagtacagttgatgcggtcgatgcagctgatgcagttgatgggatgaaggcaaaaagaaagtaggaggccgggaataggaaatgacaaatctttttctaatacacagactacaaaagttttgtattgaattccttacaaagtttccctaaagataattttgattcacaagctctccttcacctccaccctcgctcgacctcttccgcccactctcctctttttggaacattctctagggattgtatctctcatcacagacagaaagatggcacgtactcctacagcacccgctaagcccgcaggcaaaaaaattacgtttgataatgacagtagcggagacgagtccgcatcacccaacccaatggacttgaccgaaggagctctagaggtttccgacgacgacgacgagagtcaagatagtagcgaaaacgaggatgatgatgacgacgaggatgatgatgatgctcctgaggaggaaactatggcaagtggaaagaagacagctgaagaacagactcgaatcgaagaagaaatcaaagaacagtacgtgtttcagtcctctctttgtgtggtcgctctataactctccggtcgagtgcttattccggttcttcttcatccgtggcagagctaagcagaaccgccgtctggctgcgtccaagcgacagaaggcatctgtaccgaaagcatcgtcgaaaacggtgacacttccggaagaaccggtagctggtccttcttacctccccgaatcgatttttgccgatgctgccaaggagaaggcggaaagagagcagaaggaggctgaagagttagcacagcaggagaaagagaaagagagagccgatggaagaaagaggagaagaaaggatgacggggagcccaaagccaggaagcgggtcgggttcgttccttctttcgctcactggattgttctaaacgtccttcatcgagcgcctcagcgactccctttcgtatgaactgaccgtacggcttctctctctcttgtctgtagtgacacgtcggttcgattgctgaatgaagccggctcgaacaagacgttgtctcttactcctgcacctgcgccccgtcggataaaggctttcaagaagcaagcttaccagttgggcgaggtggtgtccgatccgctgaggagtaagatggccgtcggtcgatccaacgttggcgaggccagtgggagcaagcagcgaggtggaagggaacagcttgggaggaattgggtgcggaaggaaggtacgttttcgaattgaaagagaaacaattcctttctcagctttgtcctggctattgaaacaagctgttggccagaacgttgacgatttcgctttgaacacgacctatgatcagctcatcttactcaaaaacgatctagcgcaggacctgcagttggtttcttcacaggaagattggcaaaataagagtccagttgtggataattcatatagaaaaaacgcttgctcctgttatgcccatcagaccatgaatagcatgaccattttggtatctcttgtcccttctcctctctctctctctctcgcgattgaactccttgatacgtcgttgatagaacatgatgaaagaaagcgccatgtatcaagtcggcgaacacagactgagaagaaaggatgcgtcccggtaattcccggcccgagcaaccttctcatcctcatcccatctgtttctggagttgctcatctctcctcatccactcatcaaagaacatggatccatcctctgctgcagacagcatccggccaggaggtggctcgttatccctacaggatttctcgacatgcgagatctcggacgcattactcagtttgggtgttgcctctggagggttcttacctggttcgtggctaccagtacagtgtctcgcacagtatctttgagaagtgtcgttcatgtcagagggaaccacactgagacaagagcaaggtcggaaggaagagacactcatcgagttgtctctacgcgatggtgacgagtaaacaggccagtctgctcatctgccatctcatcactcatcattcggtattggatttgttctctccagatctcaaagcttactcgccagcgtcatcggacgtctcttctcatacacgactgtttggaccggcctatactgttcggaccgttccatttgactctgataccaagccctccttcgccggtcactttgttgatttagccccaagtggcagcgttctcgttctgaagtcgccaaaggactctgtcaacgcttcatggggtgggctgatgaccgtgggagctaaagcaaaaggcgtcgagggagtcatcatcttgggcagagtaagagatctagaggaacacaagagggaatctttcccggtttgtctacatctttactcctggtccatgctgaagtgttcccgccacgactcatcttgattgctctcatactatcaacaaaggtctacgcctactcggcctcgaccttacctcagaaaccgttcacccggccttgtgcgattcaagaaccgctcgttctatctgcgcctcatctgcctgagccatcgacgataaccatcaaccctggtgactggatcatagcggatgaaaacggagtagtagtagtcccaaagtcaatggaccgggatgtatcattagaagcagagaagagaaggctgatagatgatgcctgcgagcgggacataagggctgggaaaggtgtagaggctactttcaagagatggaggggatagctgtatgcgacgatatcactctcctacatgctacccagcgcatacattgactggctatgctacatgcttctcacatacacacatacatacatacatacatacatacatacgtacgttccctacgatgaacgacgatcaagatgaacgacgaaagcaacacgttcacacaaacagcagagaatcccgacgataccaagtccgatgagctgaccctagagaagtcgcttgaagtgtgttggtgagagcgacgctcgattttttggcttttttctttcccttacgttcacaattctctacgtctagtaagtgtctggcatgtgttgcgttctgcttggctatctggaagagagagaaccatcagggtcacatcaggcagtagagcagaccgtatagatcagaacatggaggtcggacgagagtggcaaacaagagaccgctcaatctttccatctttcttgttgacttgcctgacatttggtttttctgccttctccttctagttctcgttctcaaccgttcaagcgtttgacaagctcacaaccactcgcatactatcgcatctctctctcataagccatcttgaaaagaaagaagaaaatgtccacgacaccttcaactgaaatccattttggaccctcctggatgctcaattccaaccgaaagtcgactctcaagtcccagcctccaacccctgcaatggatgatcatcctcagctcccttcggtcccgtcctactcgtccatcatccgagagcctgtgtctacttccgcctcacacacctcccagtctcagcaacagcagcaacaacaggctgcgtccgcttccgaggtctctctccatcacgtcgaggatcctgctcgacccttccgatacaccagagatttcattcttggtctttgggatggacccaaagtccaggaagccaacctaccaattgaattcgaacggtacgacgtcgtcttccaggaggaagctgtccgtccgatcgctttcgccgaaacgaccgacaaggagcgaaagctattttcccttcccttcaacccggacaggcgaccccaggcaactccccaaagttcgtcgaacgacatccaaaaatctgaactctccaacaggcgaagccggcctggagagtccaggctgacgtctaatgcagcatcggcttttgcgcccggctcaggttcactaaactcacctggacgagaaagattcagcgggattcagggaggtgttcttggagggctcggcgcatctggtgccattggaggagtcggcctcggcgcgactgatggtcgtctcggtgccatcggaagaggagagcgagtccgaaggaacgtctcgggaggatctaccgagcctggttcgtgaaaaaaaaaatcccctctgtgtatcggttcatccgcaagaatgaagaagagagtgcatgtagttgacctttgtttaatcttcttgtctcgcaaagccgtccttcctccctcttctcagaactcctggcggcctactcgacagatgtcgtccaacctacttcctcaggccgatgagcttcctactgactctaccgcgggccagtcgaccccgggcagaaagtggcgaacgacaactgctccatccggaacgcccaccgtgtctggagctgctgaagacgaggatgctaacttagctcctggttcaggcgaacgaggtggtgggtttggagcagctgccaggcctggaggttggagggagagagaaagaatcaagaaagccgagggtgagctttctagcggggccggatggaacactgttggaaaggagggtgattccaaggtaatttcgtcgttccggtgtatcctccttaggttgtttagacagcatcttatatgttctcgatctactgtcttttcgtgtaattcagagagatcctaattctacccctctcgaaggatcccctaccgcaaccaactttgaatcaaacaccaccaacaacagcaacgcctacgctgcccttcaacaagatggcgatgccagtttcattgatcctgaacaggtcgccgacgctcaagagtcacagccttccattgctgacctggagaaagaggccatggccaaggtcatgtggacatacaaagatcctaccggagctgtccaaggtgagtttgcgtttaattgtatctaattcttttgcaagccaacagttgttcatctctacgacctgcatatccccataggacctttctctgctcaacatatgcaagaatggcacgctcaaggatacttcccgccttctcttctcgtcaaaagggagacggacaatgtctacgagactgtcgccaccttgactcttctcgcccccgacgaggcatctatcttcttccagagagctccagtcccccccgctcctc

SEQ ID NO: 2491 - DNA, 13794 bp, Xanthophyllomyces dendrorhous
tcctggcttactccccacccccgggtttagtcctactcctctcgtttccccgatccatcaccacgcatacaacgttcaggatcccattgctgccgccaacttgtctgccggcgttcagcctgctcatcttgagatgaggtcaatcgactcggatccgttggagcagttccttgctcagcgttccgctatgagcggcaacgttgatcaggaaggccgatggggtgctaaggatgttccttcccgacaccagttggcccctcatcttgctcaacagttcgctcctggccccggaggatctggcttccagcaggttctctcccctggaggagggttcgaacaaggaggaccccttggatacggtcaccgatcgaccgctcctcgacacctcgctttcaacgatctcggggttttccaacaatccccttacgcttctccaatcgctcaacacgctcaaccttccccctggaaccagcatgctcaacccagatactttggacctggagaccagggaccggccggcggcgtaggcgcaggtgctggtttcggttaccagccgatcaaccagttggctcctggagccggatggggaagtccgaatgagtggcgaggatccccaattcagtcccccgcgttgcccatggctcacctacaagctcaacagcagcagcagcagcagcagattcatcagcaacaccaacaggcttacgctcaagatcagttgaacgctgctcttcaggctcaagctcaggctcaggcccatgcccaagctcagcagcagcaggctcctcgagcttggggttcacccgctccccaggctgctcaacctgttgcgctacaacagcaggtctcaaaccaggcctctgcccaggcttctcctgtctctcaatgggctaaacctctttcccaattatctatttcgtcccccgcgcctgctgcatctgaggtcgagcctacccctatagaggcagtcgagtctgtgaatactcctactcccgctgtcgctgccgtcgagaacgaggccgaggttgtctcaaagactcctgtacctgctaagaagacagtgcctactccggctgaacagacggagaccaaagaagaagctactcctgtcgctccctctacgcctgccaacaaaaaggcttccaaagctgctgccaaagctgaaaaggccgctgccgctgccgccgctgctgctgctgctgcttcggagaacactcctgctcctgttgagaaggtaacacctactccctcggcgcctgctactcctgcatctgttaccgctgcttctgtcactgctgaacggtcttctggtacggcttcgcccgttcccaaggttgctccctgggctcgaatcgatgatgactctgcctcggccctcaagcctgcttcccccggtccatctcttcgagagattcaagaatccgaggctcgacgagcggctgctgccaaggccgctcgaccggcttcgactgttgccacaactctgtccgccccttcctcgaccgctacctctgtaggtattccctcgtccggaacgcctcctcctgtcgcaagtggtgggccggtttggcagacggctggtgcacagacgggcgcgacacccgcaccggctagaactttgaagcagattcaagaagaggagcagaagcaaaagcagaaggctgctgctgctaggcaggccatggctatggctatgggaggtagtgctgctgccaaggccgcttacgcaggggctctcgcccatgccggatcggctgccaactcggtttgtccttttctgttccttccaaaaggatttttttttgttatgtagaatactgaatgtccgatgtgtttcattcctcaacagaacgctagtggagcctggtcgaccgtcggtaccaacggaaaagctgtgcccggagcgtccaagcctgtatctctcccttcttccgttccccctcgacctcctacccagtctaccaccaagtctgtcatccaatcaagttctggtcccatctcgggtgtttcctccgcttccgctggtggctctgctgcttcggttgctgccaaagccggtcgatccacccccgcctcgttggaggacatcgctccttctaccgagttcttgacttgggccaagaccgctttgaagagcgtgaccggtgtaaacattgacgagttcctccagatgttgctcgctttcccccttaaccccgattcagccgttctcgagatcatctctgactctgtatacgcccattcatccaccttggacggacgacggttcgccaccgagttcgtcaacaagcgaaaagctgatgcaaaggctcagaaggccggcacaatccctcccgctgggcgaggaagctctttggctgatagtcagttattcttttcttgtcttctgtttttttttctcttttctctctcggtacgtcaatacgaaactgatgatatgtttgacgtctcctcttgaataaaacagttgtgaaagctcagcccaagtctgttgataccggattcggagctttcaaggttgtcaagaagaagggaaagaagaactaagttctcttccctttcattcgacattgtgggataggaaaagagaaaagaatcgactgaggacaaacagaaaagaaagtggatggtacagaagattgaatgaactgttggtctcgatctttcatcagtacataagagctattctggcagacaggttcatacaaacaagtagagataaagcaagtaggttgacgtcaaagatacacatgtagatatatactgtcccaagtaagtgttcaaaaaaacacaaaaaaagcagagcacatggcggaatgaagagataataatgaacatctctcaacctgagcggaatccttttatcaaaccgactgcgccaaggatcaagcaagctgcaaacaaaccaaatacgttccccgttccttctggaagatcgctttgggggttagtttttgaaagcgctttctggattggtaagaatagaacgccaacaagaaggttagagagtgtgttgagaagaagagccgttgaagagagggcggctcttgccttaattcagaagaacagtttttttaacgtaagttagtggtttctcgactgaagcatggggtctgaagagcattgtcgaggactcactcgaacaggaacgagctctccgactaggacgtatgggactggcccaagtcccaacgactgacaacccacaaatccaaagacacctatggctgcgatgtcacctctttgctcattcagaccccatccgagtagactggctgagagtgccatgcctaaagcagatccgactagaagtgtctttcggccaagcgagtcaatgagaataatggatgggaatgtgagcaagacgttgaaggcggtgatatatacagccagcaggttggctgacgagggaaagagtggggctagaattgaggttgagtagaacatcactatacaaatatgtaaatcagtcaatctgcaaagctctgtgtcttctcaactccgtcgagagagtaaaagcaaaacaaagacacaccggcattgattccactcaattgctgaagtgacattgcacttatcacgaccaccacacctcttcgaatctctttctcttttaacatttcccatacctccattctatcctcttccacttccacctgttcgacttcgtcctctgttccgtgttcgactcgttccgaagcagacaacaatccttcttcctcttcagacaaagaagcatctgccgaaggggttgtgttcttctctccaagctgcaacgaggtgggatcaggaaggaatactgaactaaagatctgaaagactgaaacaataatggagacataaaggattgctttccgagaaccgtgatagtaaaggcctaggctttgcgcaaatagcttttccccatacgagtatagtatagaaaccccaagaatgaaaacgaacaaataaaatgtgatcaacatcctgagatgcgtcatgaacgatttatcaagaaagaacacgtacgatccctagaacgatacccaactggtgcaatactccgactttgcctcctgcgccctgtacggacaacgaagccaacgctggcgggacacacgcgattccacccatcgcccctattcctatgacagcccggccgacagccatgactttccactgggtcgtgtatatttgtatcagttctcccgatagagtgacaagcgaccagccgaggagaggccgaatgattagtttggagttagtctttgggagaaaaggcacgagaatcagcccgaagagaccgcctagggtgtatgctgaggtcaggtacccaaactgtatggtactgatacaagcagacgatggacgtggagaatcttgagagctttcagggccatcacatatcatggtagattgggaggcattcagagcctgtcgatgacaacaggaaagagccagtgtcagcaagacatatgagatgagatagcatcttcacaaactcatcagcctacagagatgtgaaaactgtgtgttcaccatccgaaagatgaatcagactgaatgagtgctcttggtctttctcaggcaccaaacatgatgctgataacatgaactgacccaaatatgagactggtgatgcacacccaggcaatcaaactcttcactctaagtttagacgatgaagctgacatgaagagctggatgggatgggatgggatgatgggtattggagttagatgatcaagtgtaccgtgaataagaagggcaacggggagattgcaagggaagcagagctcttcggttcggacttggccggtccggatctttttcgctctcatttctactgtattcagtattatcgtccatggagtttcagcaccaaagaaagatcacataggcaatatgtgcaaatcagaatagatatagaaaacaacagatcacacagacagatatgtctgcctacagccacatgaagaagggaggaagtgaagcaacgaagaagaagagaggaaaatacacatcaaaggcaactactgcctagcatcatgcttctgagtagcagctgacagcaactcatcaaacttgccactcttctcgcacatcatccggaagatcgcatcctcaccttgaggctttgtcagcagttcataaggtgatgcgctttttagcgaggaggaaacaatattgaacgcgatgtcagtacagcacagagacgcttgagatagcggacatggatacacacaactctttcagtcgaccatgatcaagcaccagcctaccataataagttcaacatgatatattaccgatcagtaaaaccttgtcgtagtttcttgaaagaaatacagatgcaaaacagcgtggtatacgtacaatcggtcatagtcgattatcgaggttagtcggtgcgcaatctgatcacagcaatggtacgtgtggcagtgaacaggcatcaagttgaccagaacgatgaagccgtaagcatcaatgtgatagcgtccgaggtcaaaagctattcactaacagtgataaggcatgaatccttgaactcttcccggatcgtcttctgaagaatgttatctgtctcaaagtcgacgctgatttggaagaaatgagaagtatcagtgaggagtcacgacaattgtttagacaaatcggaagtggcttcacctagcagtagcttcatccatgatgataattgatgagttgcgtaaaagagcctgaagggaagacgaatatatgagcagggtgcaaaacaacatcggacccgactagatttcgatatagcaaagatatatacacacccgacacattgctaagagctgcctctggccttgagaaaagtttgcgccacccgtgctagatcgtgatagaaaagattgaatagtcagtgcaaagtctcattaaacagtttgacacagatatcaggtctaagcgcgaacctgacttcagtatcaagcgtgatatttgctcggatggcattcgactcttcactgtttgccttcaacgcgccatccttcatgctctgttcgatacccaccaaatttgagttggatgacacctgactagatgcaaaggatctagtctttccgagctgtactcgctcgagtgcttctagcagagtggcgtcgtcgtgctccttgaacggatccaagttgtcccggatagtacctgtatacggccatgataccagtcgagtaccataagcaagtggaagttagccgcctttttttttcgtgtcgctcctttgatgtgatggttcgtagaagaacgatcagcattcgaagccataacgaaagatatcacctacctgaaaacaacacggcgtcttgtggaatgattgtgatttttgaccgaagatcctccaggccaattgaggtaatatcgataccatcaatcaactttacaggagcacgagacagcacagcttagtataaatcggtaatctgaccatgacgtacgagatatactcagtccaacttacgattttcccactgattacccccaataagttcgagatttatgtgataacatgagaaagtcaagattagtactgacatattcggtcaggtgtctatccagagaaacacatgccatgataaacgcgcaccttataggatctgagaatcgcaacagtgacatccctagcgtcgatttgccagaccctgtccttccgataagcccgattttttcacgcggtcgaatgtcgaacgagatgccatgaacgacgggaggcagctctggagagtctatttagtaaaatatcaaaaaccaaagattgttataattcgatttgatagagggaacgatatgagatgaagatgagatatgccatgcttacaagaaactaccaggtcctctacatggatcagtgtctcagatgagtggcttggccagtacgcaggaggtcggtgtccttcgataatattgggaggttcttgagggatgttcagataatcgttcactcgctcgacggaattcatttgcatttccagctcactataaattccagtcagttttactggcgcagctaactatttagagagtcaaataaagaatttttggacaaacctccagtaacgacataaccagtatacagccatgacaaatccttgggaactcaagatggccatctgaatcgcatgagcagcgcaatgagtatgtgagttcagctgaaccagagcatgattgacaggcaggattgtagactcactccaccccatccgcccgagacaccactctgcaaagtaagtatagatgtagcgaagatggctatcccaccaagacaatcaaatctgaggaaaagccatcggtttaacatccaaatgcttatatatataaagtcgatgataacgtcaaagttagttcatgatcattcacttcatacacagtgcggcacgtattatgcgctcgatcaaacaggagaagaaaaagggtacaaacaagtagaagcatgctgaagccttgtcaatttgagtctgaagattttccatgaacctcttctcgctcgagaatgctcgaatcgtcactacaccctcgagtgtctctgaaaagccgctaaaaatgggagattgggcggtggcctccattctcttcaggtctcgaccacatcggatgtaatcaacactaaatcgccagtagcagtatccaaggactgaacaaaggagaggagaggggacaagagggagaccaaggatatgctattaagaattgatgcgcgttcatttgagggaaaaaaatgacctccgaactcacccgttgctggtacaaggaaccagggtacaatgcttccaatcaacgcgactgctccgagaagtgcgaaggcaaaatctacgacgacttccaaagaatctgagacctctctgtcgattgtgccttgatctcgagaaaatcgattcacgattcctagaagagaaaaggagagaagtctgtgagcaaatatccgggagactgttcgttagatattgatggaatgatacacgtacttccagaaggggtaacatcaaaccctgatcgaaagccaaaagacgaattatgtacaggttggcattagatcctaagttttgagagctgggactttaacaaagaacatttacgcacatcgagtagtggcccggatgacactggatagcatttgcgcgtgaagagtcttcgacgccctgtatgagccccaaaacccaataacccctctaacgacgaccagtacggcaaagcccaggctgattgccgcatagattccaaggtaatacagcgggtgctcattagccgatggccgcgacatctttgtgagtgtaccatactcgaccggctgtgatacagttgtgttcatcccagctggtagatagaacgacgactgagatgattgatcggggatagataggtagtcggtaggaatgtaggcacgaggctgttgaacggactcagagtatgcgttggtccctgttgatacataaagaaggcgtttagtaacagcattgtatctcacaaacaaaggtggtgagatgactggctttacattctttgatccaccatcgttcgacgagatccgtgttggcagagagaaacaagagtacaacgttgattgcccagagccaccaagacctagctctaaaatacgtgctatatgttgaccacttttttttcccgttcagagatcgaaagaaaccctggttagttactctgtgctcaaaactcgatagtgaagcagaagaggctaaccccgatgtttccaacctctcgttcttcatcctccaccatctttcgagctttgttcttcggctcggctagctcgtcagctgtgtcctcgccttcaacggcagctatctcctcagcagtgcttccatccttgggcatgacagaagactcatccggcacttccttctgctcggtagccacaatctctgctaggtgacccgctgcccgaagttctgcgatcgtaccttgggcctcgactctaccctctacaagacggataagacatgttgcagtcggaagaagcaactaattgtgatagatgaatagacaaagcttggtcagatgaacagagcaaactcaaacaggcatcagagaccaaattactcgatgaacaaacctcaacatgatgagaaacaatgatgaccgttctgttcgcacagaacggtcctgcaagacagtctgcaactagcgcagcagccgtatgggaatccacagcagcaaacggatcatcaagcaggatatgctttgccctagagtatatcgcacgcgcaagcgcaactcgagctttctgtccacccgaaaggcttacacctttcgctccgatctcagtatcatcaccatcctcgagcatctttagatcaggtcctagacaacatgccttgagaacatcggtgtagcgcttcttatctagcggcgaactaaagagaatattttccttgatggacatattctgtagccacgctttctggccggcatagctgatcgaatttgtgaggccgtgtttgtcaacgaccgtggtgttctttggcagaagaatgtttcctttgatcgtctccatttcgcctagaagcgcatacagcagcgcgctttttcctgcgccggtatgtccggtgacgatggtcagttttccagtcgggaacacgaatgacaggtctgtcaattcgaatcgaacagtcggagtagtggagctctcggtaacatctgaggtaggcgaggagatagtagctggggcggaagggctatcacgcttatcggtagaggagacaccggtagtccatctgaaagtacctccaacaaaaccgatcgtatcgtccgtaggatctcgtaacgcggggtttacaacctccttgagtgacgacacaaagtcggggacttcatcttcgttgaggaaatcatcgacacctggtgagtcaggaagaatatagatacgactgtacgaatgtcagctgcaagaatcttatacatggcaatatcaagagtacgtacgtttgacagcgacatgactgatcaaataagggacaacatgtgcgatgtaaatattcaaaagagaatttctttatgcaaaaaactacagagctcactcacgctttgaacaacgacacgatagtcatgggaactctaatttcaagagaataatgagacgattagattccgatgctgtgatttagacttcccaaatagctgtatatcttgaaaggacccacatattcaatggtagacctgtatgtcattcatgatcagaatatcatggagaagttggtcaataaacattcagagcgctcttgaacggatgagaggatacttaagaagcatcgagaacaaggaaatagcggtgaaagcgactccgacggtcaattctccgtgttcaagtatgatgaaagacactataagccataatcacgccagcatgattagcgcttagctatttctcctgtaagggtgaacgaaaaggacatacggaatgacacaattgtaactctacaggtcggaattcatatgtaaagagtcaattttgaacaacttgttcaagacagtatcgtgcgtgaagtactcacagcataggtgtcaggctccacaatatctggaacaaagtcgcgttgatgcgcgcacgaatcatgacattcagttctacctgcctagcgtcggtaactcgtttgttccattgccgttcccaggcaaagaatttgataaacttgatcgcgtcgaccagttcgctaaaatcaccatttccagaatccagagtataaggatctctgatcaactttttacgtcatggggaagagaacatgaagtggtcgttcgtgacaaactttgtgatatttattcgcttgtctttcgcatcgagcatttccttttcgatctatgaaagggtaaatcatcatcgtaagccttgttaaacagaaaatgtcaggccgaaagtagtagggaaagcaaactgactttgacttctgatcgagacacaacagtgtttagcggcatcaccgctatcaagatcaacagtccggcgaacgcagaccaagaaagaatgctaagcgattagagcgatgatctcggatagttaggcccaaaactctttttttatactttttaaggagaagaactccaagcagaggagtaactcacgtgtataggaaggtgcagcaaacaatgatctcgaacggagcttcatgaaaagagagaaaaaaggaagagacggagaaagccagtcgaaatgttgaacttctgaaattccctgataacagaaccagaggaagactcgatgaacctacctccgtacaacctgttgatgatggtgaccatataggcgacctcagtggcgtccccagacattaagttgacgattttgcctgttccagcagatccatcactctcgaacactccagatttgtcctttcgctttagcgcctgtgtgtgttcattttcgatcaaatacgttaacaaattcacgagcaaaccctcagaaacacgtcaactcacatgagaaagaaaacaaaatcacatactttttcataaattgcactacccaattgacttttgattcgcacgcaagctcttcttgatagccaaagatgattgagatcggcctgtgccttgaggaagctgacgaggagcgctaaacctgcgtagaggtatgccgatgagattttttctggggttgaatccgcaagggcctcgatgatttgtttgatgagataaggagcagtactaagcgcagaagtcaggacgaaactgatcaatgagcaagaatcgtttgtcttacagagagcaaaggggcaagctagaggtgacgacgaaactcactactgaagcataacagcaacaaatgtcaacacgcaagtcatcgaaagatcaaacccatgcgccatacacagacgacgaagaagccccaatctagccgtttctttgaacttttgatagagaggtttcgagcgttgagtaggggaaagagtgtagacgtctgaatctttcatgtatccagaggatcctacgtatcgtacacagtaattgagacgtcagatgtatgaaacacgagtcgagaatgtatcgagattgagaaaaggaacgcgagcacgcaaacaaacaaagagaacaaacaaacctttcgaaatcaaaggtttcacccagttgaatgatatccaaccccacaagctgcatccatcctctggacttggtcccatgtgattttttccctctatctcaacctgtttctctcgttcgtatgatgccggaagagtttctacaggtgatgagagcgagacaatgatgagcgcggccgaaaccaccgctgatagtatggacagcacgatttcggattgtctgagggtcgggtcgtgaggtatgaaaacggggagagagagtgaaggcttaagaaataaggctatcagagtaaggcatctgttggtccaatacagaagggagaaacatagcgagcactatacgttagcttccatctacatggtccagcagtctttcacacaaggatacgtacgataagacgaattgaaggatatgaaacacgaatacaatcagataaagcgtttgcttcggataaagagtcggatagatggccgtgtatagctagatgaatatggggaagaccagcgaaggcgccgcaccaagatgaatttctaatttgaagggaccacgcgctcaactctggcacttacccagcaaattcctaatgcagcatcggctccggcgatctgtctatgtgcagatatgttactccagaaagcccaacaggctctcgctccataacataatgtcagccctaaacctcctaaggtcagaacggtcactttccaaacgggcagaccccgggcagaggtattcctatcagggtaaagatctttgagagttaaatctcgaccgaggtacttcaggggtatatcgaagagataataagatagtttgcttgggactacccgaggaatcgtcagcaaagacggtatgacatataggacaatgaacgagacgccgggattgatgtagctcaatttagagtcatgaccatagccatggctggacaacatggctgatagatatacggtggaagaaatgccagccttgagcaatgagagagttgtgacggataagttaggaaggatggatggaaggcaaacgcaagatatctatcaaaacagaggtattgatctttatatatttctgttattctcggtcagatacgaaggacacaagaacagaagagccgaaaagataatcaatggacgagagaacaatcccgcatgggaatcttattgacgccggacggtctattggcggcttggacgacccggaagaaggttactaagcgtgaaatgagcaaaacaaaggagacaaacagcaagcgacaacccatatgggtctcatcccttgctcatactcctcatcgtattactagtttcctttatggagttactcgggctctatccgcctagtctcctcggggtattttttgctctgtgtttcggctccggaactgttgtctctttggttgtaacaaattcgttcagagtcatagttgatctctgcagaaaggtaacctcgttcaatgaaaccaacttcggtcaagagatagagcgatcaaggctccgctctatcgaaatgtgctgacgcgtatgaggaaattagatgacaggcctagagatttgaatctggtcttagcgcatcctcaatatattgtaacaaaaacgctaactaaatcgcaacatcgcatacgtaggagaaggaagatatcgaaaacagagaacaggaaagaagagaaagaaatgggagaagagcgaacacacacacacacacacacacacacacacacacacacacacacacacacacaca

SEQ ID NO: 2492 - DNA, 29786 bp, Xanthophyllomyces dendrorhous
cacacatatatatatagagatagaaatagaagagaaggagaattgaaagtgcgctgtgtgtgtgtgtgtgccagggagacctgccggaagcggcccgacgcacgtgttctgctaatccggtcgcccgttaccatggagaccgcgactaggatatccgatcgccctatctgcctgcttgtagcgctttcgtactctcttgctcgtccgcccatctctttcgaaactttttcgattctcacttttctctgtttgtcttttccactcactcactcactctctcactcagtatagctctccgtgtattctcaagatggacctatttggacctaccgaaccaatcaagaccagagggagacactttgtcgactctaaaggtcgtgtcctctggctccgaggagcgaacgtgggaggagcgtctaaagtcccttcaccatcatctatggaccttcctctggacagacaccgtgaggtctcttatatcaaccgcccttttcctctgagcgaagcagacgatcatcttgctcgactcgcctcatggggtttcaacattttgagaatcaccgtgacttgggaggcaatcgaacatgctggcagaggtcaatacgatcacgactatcttcagtacctcacgaagctcttggcccttcttcctagatactctcttcgcgcgttcgttgtatttcatcaagacgtttggtctagactctctggtggatcaggcgcgccaggttggacgcttgaagcggtcgggtttgacttgagtaacgacggaaagattcttgaggaggtcggcggagcatagtcagtcttcgttcttcctcgtcaagtgtagctcgcgaagtatttacagattttctaacttcttctccctttaatcagcctaggaggggtccgacatggtggagaacggttcgaggaccggggtagatggcctacaggctaccaaaaactcgtatgcgcaaccatgaagtgagtctcctagcgttcatcctccggagctgtcgtcggaacactgaaaacctatctgtgtgtgtcccttatggcgtgcagcacgtgtttctgggccggtgacttgtttgcgtccaaactcaagatttctaggcccaagtctgatggcaagggggccgaggaagtagggattcaagcatacctgcaagaagcgttcctcgatgcttatgctgttctcgtcaaagcggtcggccatctcgattcagtcgtcggattcgaggtaagaagaaattctccttcttaaaatcatgaaagactattccatgtcatcgatagtaatgttaagttgtccgtgtctctttgttcctctgacctctactctagatgctgaacgagccgcaccacggatacattggtcttccttcacttcattccttcaactacaacaccgacctccacttgtcagactgtccgtcggctttgcagtcgtttgctcttggtgcaggtcatccgcagactgtaccccactatactcgatcttgggtttgtttagtcgtttctctatttgacaaagtagctcttcctcatcgcatcctgcctgaccacttaatctctttttatgccctttcaatagcccttcccaacgcgcaagacgaagaatgttatgttgaatccgaagggaaaatctgtttggcgcaaagacggtcctacaggtggaaaatgtctctgggaatggatgggagtttggggatgggacgattcgacaggacaggctactgtcttgagggaatcgttctttcagaaaccggaaaacttggagactgaaaaagttgatttctaccaggatgcttatctgcccttcgtgagtctgtttctccttatttttttcctttctgttcatctcctcctattctgagactgacgctgttgatcatgggcgtggttggagctagattcgagattgggtcgacactgtcagagaagcgctgggagagaagaaggacgacaagtatctttggatcgaatgcgttcctaacgaggatgttcctgtttggcctgaggatatgctgacagagcagctacttctcgcgcctcattggtgagttttggtctctttcccgattcttctcctctcgctctcctgtaattcttataggattctgttaatactttcgatatgtcggtgcaatgaacaggtacgatctgaacgcgttatttagtaagacgtttgggtgagctttatcatgtcctctttgaatttgaaagaaggacaatagaaaatacatacagattgctaacgagtcgtggtcgtaaatttgggaacgcaggttcatgaccatcaacgtccagggtttagccaaggtaacatcgatcatcatctcgcaatcttttgacaatgagctgaacacggctcgtcatactctgtgttgatacagggcaagttcctaccgtcgtgtctctactttggacgaggagcggctagaaggaattatacacttcaaatcaagaacgtcctacaaagtggatatgattcatttggagaacgacctcagatcatgggcgagcttggggttccaatggacatgaagtaagtatcttcgttctttttcttccactcgcacgaaaggttgcgcgaaacgtctaaatgtactcttcttatctatgtagcgacaagctcgctttccaaacgaccgacttccattaccaggagcgaatgatggacgcccttatggccgcccttgaaacaaacttggctgggttcactttgtggaactacaatccttccaacaccgatgagatgggtgacgaatggaacggcgaaaacttcagttggttctccaacaagagggccattgaggagcgaaaggatggactgaaaaggaaaattctgaaagagggatcggtggagtggtatgagaaaggagcaaggctgttggatgctatcgtcgtatgccgactcatcctcttgtactatctttcgaatgagccgagagctcaaatcgtttatttcttttttcgtcgattcagcgtccttatccgataacactggcaggtgttccaatctcgtcaacctatgactcaaaaactggcagctacaaacttgtttggggaattcctccgttgagctacttgcctgccgactcgctctcttctacgactaccgagatcttcttccctctaaggacatacggtacaaagtattcgactgtggatatcatccttgattgttcagagggagacgttcgttgggacaagaagaaccaagtgctttatcacaaatgtgatgagcgagatccgttagagtggaggaaaggagagatcactgtgttcatacagggtgtgcagctcgagaggatatggaagcacagaaagatagcgttcgcaatactgaacgtagtggtagtcacgatagcagtcagccctaaattgagagggctggtgtggggcttgttgctttggttgtttgcactgctcaaggcgtatttcacttcgaggcttgagatgcttgctgggggaatataaatgttgttttcggagaagtctttctcaaaccatgtgcgcgcaactgagaacgatataggattattggattatcatgcccaactttctggttcctctcttcatctcatgctcatcggacttactctgctcacttactgaacgaacgaaccaagttgtaccaaccgatcccgttcaccatcaaagctgtactgaccataaatcacgtgatgctcataaactgactaaaaacggcagcccgctctccaacttttctctagctcttttttctctcaacacaaacccatcccatcgtctgtaatggaccactgcctctcttcatgttccgagggcggtacccatggcgtttccttcaagggaacggaaagaggtcttccctaagggggttttctcttttggtggttagagtagatgggattcaaatcttctgtagactgttgatataagccgggtaactcttagtgaacttcttcctttgggagagattctgctttgtcgattgagagattgacggagacaggggagtatgctgacttcggggtcatacatcacctttctttcttttcaccattccgttcatttctttccttgtctttccttttcgatgttgattcgattttgattcgattttgattgtggtttatatgaatgtgcttctgctttttctatttctccatctttttcacatgcaaatgccgatgatataacgtcccctactgttgattcatcctaaactcttttctctcgatcgaacccaactctccttcccaaccgcctttctgaggatcttctgaatgcctcaacaactgacatacctccttctaccgacggagtcgatatcccctcaattgtcacccgttctagcggccacgcttaacagagtcactatcttcaggactttggatccagaacacggggaggtacgaaactcctttctttctcactcttgggttctttcttggtattcttgttcaagcagctcctccgactctgctggattcatcgagtccgtgttatgtcgaagaggtttgctatttgctgttgatggatatctcacttcactggtctcaaggaccagaagaaagatgtgtccaacagcaaatactgatgcgtaacgaatctaatcaattctttcgtttctgtgcggtttggttcgatcgtgagcgagaatagccgtttgtatctggctcgcttttgttgctctctcaatcgatccctccatctgaactgttgacgagatggagaatccagtcacctctgggttatagtaagtcagctattttgagtctgttcggtcgtgggtttgaatatctatcacatgaactccactctcatatgaacaaaacccatacacagacattcatctttccggcttaaacccgtttccggacttctggattcccttgaagactgcacgtcaaatcgccaaagatttaggtcttctgagagatttaggaaatctattagattggagtacgagaaggatgagcagttggtttgaaggtgttggaccagatggcgtcggcgtcatggcgcacaagttcgtatcagatcgtttcttaggagaagcgcaagttggttgcatcgcttgaactgtcatgtgggcgttcgaacccttttttgctgtcgttagttggaagttgccgacaggattagtcggcgccgaagtctattcacatgagatgatgacgaggacaccttttacttctgatgttgttttccttccggatcatcaacctgtatgttgcccacccttatctgctactttcaacatcctgtactctttctatgaacagctgagacgttttgatctttaccattgggaattttctcagttgaggacctatctttccgcatccacattagcagacctccaaacgatctcgaatggatctctcctcccatcaaatgttctaccaatctggcattcgctcattctcctcacctcccagatattcgaatcttttttcgacaatcgcgagtcaataagctcttctgaggatccagaatcggccgaagcgagcgaatggtcaggcgctgttgcggtagtatggctaggccgagtcttgagcccgttcatagagaaagacggatcgcgtgatgtgggaagaggtgatgtggagctggtgatgggtgatttgttaagaggactgaggttgaggaagaggagatcaaagccagaagaaagagaatcaagaggagatccggtgaagattgaggaggaaaaaagagagcacgaggatcttgaggaaccgaatggagcagaacaccaaggcgcacaggacggcaaggagaaggaggagatagaagaaaggaggaagactagagagaggacatctgttagatggaaagtcgcctctcaaatcatcgagacgttgggtgtaattgtgtccggttggattcggtatgagctatctgccaacgatctgaatccaaacaatgaactccgctccttccttccaccttccacctcccctttcactccttctacttcctcttcaccagcatatagtctcaacctagatgacctggcggctctcatcgaacaaactgagaagacgttgacgaatagatttgacgagcagtctttggctctcaatacctttcattcaaatctaaaatcctccggtcttcaatctctccatgcgacatccgttccacactttcaccgcgcgcagaaagagagaagtaatgaaaccgaacgagaggttaaaatacaacttacaattcttgcgctcatatgttcaaacctcttgctggcagcctccgtctgctatctactgcatatatcatcctcaattggaaccggagttcaacaagaacaacagcttgggttttctgtaggtgaattaggagaagcagcgaaacgaaaacggcaaagagatggtcaacggtggtcgacaggaacgttgttctgggctttgcttcggtggctatggaaagtcatcgtcgcgttttgagttctccttgtctgttctatctatctctttctttcctctatatttaatagcccaaatcaggcagatttgatatcagaagaggaactgaagatgacgacaagaggggcaaatcgcacataagaatgaggaagtagagtaaggattaagaggaacttcagacgggatagaaggtgaagcaaagtatggggccgtacataagagttgagagtgtacgagaacaaaaagtgatggtggtacaagaaccaaaaatagttaggctatgtattgatttgtaaaatcaattaatgaatgaaaaacaatcagacaggcaacagaagatagcgaggatgaacaaaatgatgaaaacacagattgattgagaagacagtagtaaaggatagaaggaagatagatacacatccggagtaggtgaagaaagaagaaagaaaaagaaagaggagaaaaaaatggaacaaaaggaggaaaaaagaggagggcagatatagagttcagaagcagggcaaccagcgcagatggaagtctgtggacggaaaagtgattgaacggcgcaacttatttggcggacgctactcgagtcctgtctaaaatatatcctactgtagagggcgagagaaggtgatgatttgagttcttgaatgtttctttcaaaacaaagagagcaaacgtaccttctcgtgctctgtatcgtaatgttcgttctcatccagaggagaaacgccatcgccatcgacgatttcttgcccctcgtatccttcgtatccttcgtaaccctcgtcatccactggcgtatgccggagactagagtcagcctcagaataaacataacttccgctacttgaatcaaccgaggattcgttgatgtagctcgtatttgccagttcatctgctatcacctcaggatcacctagcgtatcgcggaactcgatccacctgcgagcaaacatgagcgaaacaaatcagaaaaaaaaatgatcgggacaaggttttagggaaatcagaaacttacgaagtcatccaagggtgttgtgtcaagagctcggcggcggtaggtcgttcctcggcgttcatacataagcagcagagaataaagtctagtcctagttccgaaatctggtctgcatccggcatgggcggtaattcacctgcaccgattctattgataagacaaaaacgatacacaaagccgttgagcactcaacacatcgactttgcgagaaaatcagagaaaaagagagcaagcaacatacttgtacatgatcgcccactcgttctctgcggattgccacggtttctttccggtcgcgaactccaagatcatgcaaccgactgaccagatgtccattgcacctagtcggcctcccggagtattcttgatgacttcgggcgacatgtacattggagttccttggagagaattcattcctgggttcctggtacgattgatcgttcgttgacctcgagcaataatctttgcagctccgaagtcgacgagtttgatgatacctgcatcgctcgtcaaaagcacatctaaaaaaaaagcaaatcattagagattcgaatagcgatgattttcacaatgtatcacagtagaaagaacaaaagtaattgtagcggacacatggggacttactatcgggcttgatgtctcgatggacaattcctttgccatgaaggtactcgagaccttctagtatctgacaggcgtagttcatgatgacctcctcttgctcaattcgaccatattccaacagattcttcaaactaccaccatcgcagtattcttggaaaatgtagactttatcccggtgaacctcgatcccgtagtattctacgatgttgatatgattgagcatctgcatgacggatgactcgtcccgaatctccttgtataccgtcgggaggttggaaacatccgagaaccgaatttctttgacggccatgacagtgttttggtccatgttgtgggcagtgtagactttcccatacgctccggcaccgatgaatcgaccctgttgccaatgaatggatatgttggacgaggaggcagcgagagcaaggagcgagcgatcctccggccgatgcgtatcgaccacccgaccgataacgtgcatatcccagtcaagcgtccctcggttgtcttcgagggattggataagccgcgatcgagcctcatgggtaagacgcacgctcttatcaacaacagactcgccattccactcgccaaccaatcgacgtaaggcagcatcgttcgagggtcctgagtttaggtaactatagtgtataccgtcctcgtcatgcacagcctccaagctagctgtcaccttccggagttcagctagcctatcctgctcctttttggcttcgtagctagacctagcaccaaggatatcgaagtgtccaatgagaagtgccatacaactcgccactttctcttgcaggagcgcaaattcgctccggtctagatgaaggatgttatgaccccgagtcatgagcatggcgaactcgagcgcattgacagtccatctgaatgttttgtggtctgttgggtcacaatcctcacagataaaggcgacccaatcgatagcgaggatcatcaagggccgactgaatctagaccaagtaggttggtccatatagttcgctacccgttgttcgtggtcggatgagaaagcgaaccaattctcaatcaattcctgagaccccggaatcccacgtagggacaatcggatatgggagaccgactcgacgatagcttccgagaggagaatagtggccaaaccgatccttcggagttctctctgaacagacggaagatgagcctgctgctcgatcacgcaaggcggttcttcacccttctgtcctgtttccgggttggccaaggattccaagaaccgatctttgcaggtagccaaacgggcgactggaccatctgcgatcagcctggctcgagacgcatgtagatctaactcgacccagggtagaggaaagtgccaaatcgaacctggccagaaaaacttctctgtaggagccagaacaaggatgtacgtcgcgagatcaagatcaccagcaggctcgccagcatcctctccgctacttccaataggatcccagtcttgaggaagaggattaccgtctcggccgaggcgtacgggtcgactgccaccatagttgggataggcttttgtaagaaggtcggccagtcgctcaggttgatctcgaagacaaccatcagcgatgacgaagagaccttcggtctcgaaggatcctgtgtagatcaagatgtgaccagaacctgcaagcgaggcaaggaagttggtaagatcaatcgagtccagagagtactcggccgaattgtcaaaccggttcgtaagtcgcctgagaacagaccaaaactaagatcaataaagtactttgctattattgaaaagaaacagagattcattgaggagcagcgtaccttgtgaaacgttgcagttttcgatacctcattctaaccgcttctaaaactttgctcaaccaggcgactttctcctctggtgtcatgattttctccgcaactgtcgttgtgacggaaacttttccatcagccaccgttttagactctatcgcaatgatttcttcgtcgaaggcattccggagggctttaggtggcttgcagctttttttggaggattgggcttgcccgtcggccaagttgggtgcaacagtagaaactggaggagagccaggcttaggtacaggtgcggaagaaggcaccctcacttgagtctcaaagtagttgatcacacgctgcatcaatttctttgtcagagagcttaagaagaggcaaaacaaaatgttatgaaccaagtcagcattgatatcttggtaaacactgaacgagattatactggatgggaaaattggaatacgggataaaatactcaccagaattgctcagccacaatcaaatctccacctttgatagcctctgcgctctcattcaggaactcccactcgtcctccaaaatctctgtctcccggaagtaaacagccttacttccactcttaagtttccagtgaagcaacctgaagaaaaatcgtaaggcttccaacaagacctcgtcgtaggtttccgacatacaaggcggtagaagccattttcgattctcatccggctcgatcactgctccgtattgcttcttcattgtacacgccaatgcaacacccaatcgaaaatcgtccaacagctgatcgatcaccatcactgtcggattttcgatcttcatcgcgtacgccagtcggacccggagggattcttcgaccaactgggtagggaaggatattaacttggtgatctctgcctggtaaggcgggaggttgagctcggtaaagatttctgaatgctgtaagtaagtcgccttggcggaagagataagagtgtatacatctgacaaagtctttttctcaaacgttctttggagagaatcctcctttagaacccgttcgacgaaagtcggaggtcggagcggtttgtcttcctctcctactcgttctcctccatggtggttgccagtcgaatgatgtgccccagtttgaccgccaggaacaatagatcctcccggacctcgaatcggctcttccgtgttggccattttgacatccaaatcttgagatcctgtccatgcttgaagaatagagatttgagttcggagagacttgataacgttactccaactgaccagtgcttcgatcttccgttgaaatttgggcgaggcatagaatggtttgtcgtgaccaatcgcttgaatatgtggatagagggattcggcatgggagagttgtgcaaggatgccgaggacctggtcgtaggccgagatcggagtgagtgtgtctgattcgactgtgctagatggaacgtcggccggttgtccaggaggtgaagaaggacgggaggatggcaaatcggcaacatctggttcggcaggggtagacacgagtttctcggcgtcaggtaaagtaaccttaaagttggccacctcctgcaaaatgatgtctactgtccgctctctcctttgcgatacccgtttggtctcctcttgaacggttctccctcggagttgagccctaattccccaccagaggttgattcctaattcgtttcggatcacatcataactgtttctctctccacctatccgtgtcttctccgatcgaaggacgtcccctgacaaaactgacgacagcattgcttgccactctaaacgttcccttccctcgggattagccgccaattctaacatcgatttcgaggtcgatgcatcttgaccagccataaagtgtttcgatccagctaccaccgccgcctgggcaagattatcacctgggccagacagaaacccgctttgcctatcacgaacatcttcctcagacgacaaacttctaggcgtgacctgttcagaagatccaatcaagcccaatccttgacctctatgacctgtcgatcccaaggtggtattggcgaaattcttcatgtaacctggcatgaacccctcacccgctttggcctcttcgtcggagtcgttggcgtcgagaagttgaccgagccccgtctggaaatagtttcggtctgggtcatcgtaatcgcccgatctgccgagtggtccggcaaacgatttggacagttcgcctgcccggctacgatatcgtttttggaaaagtgtgaaaggttcggaacgctgcgtcggtgttagattggatgctgtcggcgtggtcggagaaggaggcactcgggcttgtcttgaagaagacagttgacaaggtgaacgcgataatcgatcagagacctcttctgaggagatccggctttttgtgttggaactataaggtccgttgcggctaaagttaaggtgtttagaaccaaacacacaaacctcaggattcagtctcgatgaaatgtagacaagcaaacagaccaaagaaagaggaaacaagcaacatacctatgccgtttttctgaagagtcagtctcatggtttctgtgtccgttaccagaatttccggcagaatgtctggacgtatgcctcggaacggtgttgtcgtcctcctcgtcatctgacaggttggctagaattcgaccgtgttttcagatgtcacaagtttatcccaacgagaccaagacggagaagagagaagccgagaagagagacaacgataaaataagaaggtgtgagttacttgaacgcctttctatactttctccagatctaacatcttgtctgtataaatgtttgaccaggcatatccttcccgttctcgtatgtgcgagctatctactgaatgcgtcctgccaacatccagaaccgatcggaactccttcacttcccttcatcctttaggaagatctacaatgtatcgatcgctctctgcctctagaggagtactcgcgagtgataacgatggacgaaggatggatcgatgggcgagataaaagaaggacagaactaaccaaaacgaagagtcgccggcatgatccttcctctttcgtacttctgcccgctgattagctcggtctatcgatcggttgatatgcttgataaatcactgggcgtattgtcactattccaccaatagagagagacaacaaagagggtgacgaggagaaagtgaggactcggaatagagaagaaagggtgaaatcccaggttgggccggacatctcccctgttctcttttcaactacagcttacataatcacatcttaaatcgagagcagataatgacatcgcatacttgtacataaagaaaaaattacagtatacctagaaacgagtagacgacaaacagggaagatgaataagagagagaatcattgagccagagaactccggcttagatcttgttgtgccacattgtgttcatagtacttttgccctcacagccctcgcttttgattcctggatagacccaaaattagcgaaccgccgaaacaaatcaagtttagtcccaagtccaaacgctatcgataaactcaatcttgccgctgcacccaaaggagcagtccttggccagagtccactgccgcccctgagaaccggtgtcaacgaccaagtatggatacggctcacgtcgagcctctgcctggaaggcataaaccggtcgcctagggtagagggcaaggcatgcgagaagggagtagaaggacgaaccgcaagttgtcttgtccgttttgtgcccacggacttcgggattgaggccatcgttttcgaaggaggagacgatagtggcgagctagagtactctcgtttcgacgcgatcggcacctgcgggttagtcgacctcgtagaaaagtgccgagaggttcgtatgggttggtcaggagaggcaggctctgtctttgccttcttggactttggttgtggtttcgattcagtctcatcgtcgaatccgctttttgaatcctttgccttggatttcttggggggcttgttgacttcagaatcgttaaacttgacgtctaaagtgatcggtttgcttttagaagccgctttagctttcttcggtccaggcgaattaggaggaaggatttgaagtgtcggtacgaaagcggccgttcttcctccaatagtcaagaactcgataggtgcccgagtaccatcctcctgttacaacagagaacaggttaacagagaatgaattgaaggtattgccatctagtcttttgatatgaaatggaaaacagggcacataccaagactactctagggcctttcgattgattctcttcttctgaatcgtctgctttactcttgagctttttagactttcccttcccccatctattgagaaacagccagtcgcttgggaagatcgaactctctgatcgacactgaaccgcaaaacgacagatatcgcacatctttagtcggatccgagcgagctcatcatccgatagagatttcgcttgctggagcggatgtattcgagcctgatacaagatctcatctgatataaaattggacagatcagcggccatgacaggaaggagacgaggaagaaaaaaaaataaggacgaaccggcgacccagttccctacaccagcggcgacactttgatccaaaagtacgctcttgattggcgcagcccgtttaccgattaacgccttaaactcttcatctgttgggggcgacaatacaggatcggggcctagcagggagattggaggctcattctccgggtcctgaagaagctttatgcgggcaagtcgacgagggtcgatgaatgcgatctggacgggagcgctgccctcttcatctgtttctagagtaccaagcgtaaggatgaactgaagcaagtatatatgagtcaggatatgtaaacttattctttacgagctagagagagcctaccttcatgtactgtattatttttgcagtgttccgtgaagacgatctctgtcagtagtcggaacatgctagtcaaaggctaagaagcgattacatactttgggcggccagtcatcgacgctctttggtccttccacatatttgagagactcctcacccttgattctgagagcgccagtcatcccaaagtgcaacacagggagtttgccttccttggagaggaccatccagaaactgcaccaccgtttgagacgaggatcagtttctcctatcaaatagtcgagtctaggtatgatttaagtaggactaacacctttcctttgcgcttgacatccaagacagttcgaccctgaagagtcgaatcctattaattcaattcacatggcgatgagctgcatgtgtttgtaatataggatcgtcgattctttcaagggtaagctggatgtactcacaaattctccatcttctacattgacaaagacgatattatcctccggagcccattctacgtgatcaatccgacgacctttcgccgctctctctagatccgatcttgctctttcgacctctgtacaaacatgatgagatgacgattagttaatatcatgacatatatgaacgcctctcatcgagatcggatgtacctggaagctcaggcatgttgtatgagagtcagtagatgatgttagtcgatgatggtggtagtgacgatggtgagaaaggcgggagcacgatcggaaggagcactcgtcatcgaaggttgactaagaaaatgtgtactaaccttgtagtgaatgctgttacatcttctttcttcagctcggctgatttttctatctcagcatccttctcatacgagcacatccatcgtctcgaatcgatgagagttccccttcatacagcaggtctcctcgtcccgaagtcgacaaggctcatctttgtctatactcgcttctcacgtcatgcgtcctcgtcctcgtcctcgtcgacttccccgccgctctctgacgagctttcagcgagacatacccaagatcaaatccggctgaaagaagattcatcaatcgtgttcgagatgccggctccgacaatcaatgatgttccaaccctagctatggaaccaccgtcttcaccggaaaccacagtctctcagaacacctcaagttcagatgttacttcggtcaagacagatccaccacgtccggcggctgccgcgccgacggtttcttctttgctttcagcatctgattcgaaactttcccctctttcttcgtcgtcttcgcctgacctcagttcgtcagcgccaagtgataggtcttcatcgaccgcaagttctatcacaccttctcctcttccgtcaacgacctccccgagtcctaacccagtcggttcaaccacatatcctcacgatctccaatcactactcgcagcccatccggctctggccgctcagtacaacacacttaccacaagagctaccaaggtgtccgctcaatttcaaacaaaggcagacgcgctcaagcaagatacattaaagaacttggcaactttgggaaggaaactcaacgagttcacgggctatgatgaaatcgagcgtctcaaacagggcgtgcgtgataaaggtaagtctctttacatgaggtttgtcctaaccacagtccagatcaactaaatatggtctctttttctgtacgcagagaatcaaatgacacaacttcgatcgaggttactagaactgaaggcgacttaccttggctctgtcactaaccgttcaacctctcaacgagaacttaacgatcttctccagcgaaaacatctttggtcaacggctgatgtcgaaaggttcacctccctcgtcagaggagatcacgagaacatgaggttggaggaagaaagcaagaaatcactggaagacgcagaagttgaggtcgaaagaggtttcacagagatgatgaactccattctcaagtctgtctctttgaactatctcttcgtgtatttttcctctttgcttgcgctcatcatcctatccgctttttcgtctttgccttattacaatctcagccgataccatgaggaacaactctggtccgataaacttcggtccttctccacatacgtctcgttgacaatcatgattgccaacctgatagtcttcataacagctatcatttttgtcgaaccttggaagcgaaagcggatggtagagagctttgagacaaaggtggaagagatgagggttggacttgaaaagaaactcgatgtcgtgggccttggtctcagtacaggagcaggagcagaagcagagcaaagttatgaagtgagggaaggcgaagaaaaaagactccaggatggattagatttgtcgagggaactctgggaagaaatcaagctgcttaaggcagaacgagatcaagcccgacttcaggttcaaccacccataacatctctctctctacccgcttcttcgtctctccttgagttctccctggcctctacaacgccaactccccctaccttttgtcctcctgtcatttcatttcaccaatcgtatccttatgtcaccctctcctatcagtcctttagcaatctccctcaaacggtcatacaatcatcttctcaagccctctcttccactcgttctttcctcctttccggctggaacaatgaagggaccgagagagatttagtgatagtaggggctggagcggctataagtgggggtttgattgtcggaatattgaaggagatgatgaaataaatcctctatagagaaggccgtccataccgatgcacaaacgcggttgggcgagacaattagcaggttttgacatagaacgttaatcatcagcgaaagtcttgcatgaaatgttatcggccagccacacatcgaaactcgaagtaaagccagatcaaagagcaaacgggctacgtgagatgtatagctagaacaagaaaataaaacgagagaggatattcccgattaagaaaacgtagcccttttgaaggaccgaataactttattgatcatccgatgccttgatttgatttggtattgacacacacagaacgcatgaaaattagaaagacaaaagaataaaggaaccgtgtagatgagcgaggtgaaacgtagttggaggacggacaacgaggaatgacagaaatcatgcagaaagaagagttatagaagagaggagaaaaatcatgaacaagtagaaggatgaacagcgaagaatttatagtgggtagagtagaagggttctcaggtttttctcaaggattcgaatagtatgcctgctgggcggtggtctgatcatgagtggcatgcacgttcacatccgctgtggcttgatcgaactgtgcctgggcctgctgttgctgttgctgctgttgttgttgttgttgttgttgttgttgctgctgctgctgctgcatttgttgttgtcggagctggttgtgatgttgctgctgttgctgcatctgggcttgagccatggcctatcataaaacacacaatcgtttcaataaaaaagtgtttggtggaaaagtaagaaatcagatcgtaccatctgctgttgatactgagttggatcgatttgtctggcaggcatggcttgagcttgagaaggatgtcgagcgtagtgctgttgtcacaaaatattcagaactgagttcagatcatttttctttgattcaggagaacggtaagcatggacatgaaggacatggacaaacatgctgagcttcggccgattgagagctagatccagaactactcgacgaggtaaagtatgggtgggcaagcgcctcatgtgccgagcatcgattagccggatcgaactggagaagagactcaaggagggaaattgctgtgttgaattgtttgagaaatgaataagtaagtcagtgaattggaaccaagttgagttggggaacgatctattgaggtcaagcaagtggtttgaaggaaatcttaccgagcggaggagctcttgggattaacgttgtaaaatcttgcttgggatgtttcgggaacggcctcagagtaatttccggctatcgatcatagatggcgttagtgatcgcaaaggaacgacagagagtggaaatcaacgactgcgcttgagaggaaatgacgactcacggagtcattgttgatcttcctgagcgttcgatcgtcaggagtaccaatgattcgcataatctgcgtcagctgatcgttgttatctcgtcctctgaagaggggatatcccaaaatcatctctgccatactgagtatttaccaacgttgaattagaacatcagtcaaattgaccaagaatgcaaagcagataacatcatgaggaagatacgtacatgcatccagcagaccacatgtcgatacttgtactgtatgtcctggaccccagaaggacatcaggagctcggtaccaaagtgtgacgacctatatgttatgaaggatatagagtcatttaagcagaattcataggtatatgcgcgtcgcctttctgaagtcgagggacggttatgtgaccagtgtacaaggtggcaacatacctcattactgaatgtgtttactggcacaccaaaagccctggccaatccaaagtctccaatcttgagttcccctcgcttggtcagaagaaggttctgaggtttcagatcccgatgaagaactcggttgtcatgacagaacgccactccctgaaaaagatgagaagagggatcgatttgagactgcgtatgaagaatcaaaagatagtagaggaaggaagtcgagtcgtacccgaagaagttgatacatgaatgatttgacagtattgagctccaaggcaccccggtcgccctgtgtgtccatgtatttcttaagatcttgatcacaaaactaattaccgtgtaaatatcactcagtcagcctggcatcacggagtttgctcgaatgagccatgacgagaatagattacctcaaagattaaaataagcttcgtctccgtgtgaatgacatctcggagtccaacgatattgggatgcttgagctctatatgttgggaatcgaaacaggaagctttagcgttgtcggaaacaagaaggaaaagttgaagataaacagacctttcatcaagctaatttcacggatggctgtactaggggtaccctcttccggatcaagatgaatttccttaagagcgacaatctcattcgtcgtcctcgagcgaccctgaggtacggttgggcggataggagaggagagcagacgatagtatagatagtatcagacatgagaacaacttgaaacgagcaggactctgtacactctgaatagattgtacgcactttgaagacctacaggatatccgagggaatgaaagaagaataaaagagtaaagaatgtttgagtttacgagcgagagatcggcttggtggcaggcaagaagggaacaaacggaagcataagtcccttctccaagcttctcgagttgaatataattcatgagttagaccgagctggtagagacgaggatatgtatgttgcaaagggtgagaacggccaatggagctaataaggaagacagtcaaggaagacacagagaccgatgacgagagaaagagatgaaagatgagatgatggggctagaaagaatggtgaaaatgttgagagggtggaaagaattagcgttgagcgtaatcattctttctatagactatgaagtaactttggacgggtctttcagcagcactatagatctttctcggaacaccactcctggctgaccacaccttatctccttggcacgcaagtcgccccatatgcgatcctttgacttcagtgcaagaccatacagcctcagcgcaacatagacataagataaccatcgacctcgaaggccgaacgtgttctggactagcatggtatcaatcaaagtagatgccgcgattgaccgatgataccctatcacgtggtcgggtaatatcgtaaccaaaaagaagctgtgtctatgtagcctcctggaagatgatgacctccatcatctaccctgcggcgtcccgatatgaaacttgtcccgctcacactcagagacacctacggacacacacacacacactcgtatactcttcatctacctcgtatctctctcttctccatccttttgtcttgtaatagtagcaagatgaagttcgcttcagggatgttatcatcattggcgcttgtctcgctcgccaatgcctaccaggtcaagatttctagttcggatgaagaacgccaggtcggtcggcatccatatatgatctgtttcaaatctactatctctttcgttctccgctcgggccaggtcgactcacttaaagtgtcaatctcctacctgaatgtatagatatgctctggtatgtgggctggcacgagagcaggtagcaaagagaagacttctattgagcgtaagcagagttaatgattgactcgcgaagaacatatcaagaatccagataccaagactgatgacgcgatctttgttcttggggattattttctgacaaccacagtctcgtttacgaaaggatctggccagttagctttggttgtatacgaatggtcggatgtagactacttgggcaagcctagcccttcgacaatctcatccggtaatgaagaatatgcagaatatctgcccaaaacttatatctgtgcgtgtatcatgagccctttatctgatttgacctctcatccgttttcgccgcctaatccccctcgctgaactctttcggtgcgatgatacaggcacaactttggcctatcgttcaggactctgccagaagagtgacttaggaggtcagtctcatcgtcttctccccccgtcctgccgcatgatggatctcaacacaatccaatctttcccatatcctcacagagtttatcatcaataacgccaaactcatagcggacaaccctggaaagaacgttactcttaacaatacttccatctatacgaccgcgctcaagtttgcatctgctccattcagcgagtcttcttccgttgttcacgtgaaccaccggcggacacctctttctcagtttgacgatgatgacgatgatatctatgatgacacagaagaatccacttcttcttcttctacttctacttcttcctctcactcatcctccttccattcttcctcttcctcctcctcttcatcacgcactatctcctcttccaaaacgacaagaactgcgccgctcgctacatctacactcagacatggccatgccgctggtcaagccaacaagaattcgacgctaaagccgagccataattctacccgaccgagttcgtcgaccggactgaacggaatagatcaattggcatcaggatcttctggagtgagagattatgacggagaggtcttgcattatcaggttaccaaaactggatattactgtgtaagtcaatgtcagaacgttggcgcttgtaacgcgcgctcccattctttcactcttgacctaaagctatcttgttacggaaactgtgcatttagatcggcgctgtgccagtaacgttggtgtctagtggctcaacgtccgtcagctctcgagcgaattcttctacctcagcaaaccatgctgaatacgaaggaacaatcacatttaacaacatctaccaaggacaactccccgctgcagagcaccctaaaatcaacgtatgcacttctgtcctctctcttcctctcacgtatccgcgtctcttctggcctttgatactgaccttggatcggttgggacggcaatgattagttctatctattcttgacgtgtttgtacatcatcacaacccttggttggtgtgggctctgttacaagtatagagccgagctgttgcctatccaggtttgtttctatgaccttggttatgtacaccggtttctcttgtttcttgttttgatctttctcctccttgcgtgttgctttttctcaattttagaactatgtgacaggaacattgatctacctgtgtatcgagatgggtatatactgggtttactaccggtttgtctctttcacctctcttctatatagctccaacaagcttttctttcttgcgttttagagatatttacccatttcttatcttgtatagatacttgaacgctcacggatatggaggcacctccactgcgttcctccttgtcgtttctgccttgaacgcaggcagaaactcgctcagctttttcttgttgcttatcgtctcaatgggtctttcggtggtcacacccacattgggaacgatcatgaatcggatcaaggcactcactgttgctcatttcttcttcggaggtacactcattctacttttcttcttcttcttttctctcgttttcttagtgccagtcagttttttgttcgctaacttcaaggatttctcttcatcaacatgatgtttgatgaatcagtcgtctactctattggaattgttcagatcacattggagacggcctcgttggtgttgctcctcagtttgatcatcgggctttcgttcacgttgacctccttcttgatgtggaccgcagtcagcttgaacgggacgattctgcatcttgaaaaaaggaaacaacatcataaactccagatgttcaagcgactcaacacgattctctgggtggccgtatttcttattgccggattctttgtgatctcttcgatttccatctcggatcgaacgagcgacgactatgcacctcgaagttggaagtacaggtggttcctgttggacgggtcactcagtcttatctacctcggcgtattcgccagtatcgcttggttatggagaccgacaggaaacaacgtcagattcgcaatgtcggaagagattgctcaggacgaagctgaagcagacgccgatgactttgagctctcgaaccgacctggtgggcccgatcaccctggtgaggacgatgacgaggacgatgaagatgacaccaagcggatccagagagccgagaggggtatgatgggacagagatctagtcaagaaagagacaacaggcaggtcgttttcgctcttgacgatgaggaagatcaaaggttcgttggcatcttcttctctcttcactcgtgtttgtctccttttcgtcatggattcttactttggtgctctgtgtgtgctcaattgcaataagcagtgatgacgacttgaaggacacgagcaagagggatcacgacgaattaaaagacggtgaagaagagagacttattgggaaggatcgatagcgttttaccaattttttaatcttcttgttggataccattatttcagtactctcgcctggaattttcaaagaggatgtcgttatttctcgctcctttccagtccatgattgaagcgaggaggcaggcagacaatataagattaatatgccgcgtttagcgcggctacgaagagagattagatctttgaacattctttcgtcgtttaccgcaaatcgtaaatcacgcatattccctctctcccattatcaccttcccctcgactaaacatgtccacctcgacatcggactcaacagcgagctcatcagcacttgattctgcctcttcctctgctctaacaattgcggatagctcggccaaaattagtaagactaaacgcagtcagaagttcaagcggagtcggacgggatggttcgtatgcttttcgtttctgtcttcgggccttcttaatcaacgcgataggaaataaatctcgctcaagatcaaagacaccaccatgagatgacccataggttatgaacaacagcattcgacaaagacctagggctaaccctcatgtcattcttctccccgtcttgggatgacacagcttgcaatgtcgaaaggcgaaacataaatgtgacgagtctgtgtattctgttttctttttccctaacacttttttttgtagagactgactattaggacgccctcctcaaatttcaaacagacagaagccaatatgtattcgttgcaagacgaacagtaaagaatgtgcatggccagtggacgctgtcaccgaattaagaggctatgttatctcctcgtctgcagtgttcccttcggctagctcctcttcagataccgcacaccaaattcctttggggtcgaccgattctcttccgaccacccagtataactttttggcagtctcatcatcgacgacgccaacaatatctgtcaatgcggcctctaatgatttctcggcacttaattcccactctgtatcgtcagtatcagccgattatccatccaacttatcagcttcatcgtggcttggagtctctgcagagccctcttggactgtacggagatcaaatatggatgcaccgactatatctccggagccaagcagtacaactaaacctcaaaagactctagaggaagcgcttgaatattgttttccagaccaagaagaaagggaattggtaagttttatggatatcaggagtttctcgcgtgctgactattgtatcggctctagagactgacagcgtatacctcaacttatgcgcagatgaagcacttcttggaaaatacggcaggtctcagtcaaacaatccctgttccccaccttcctctgttctacctggagccttctcagttgatcgcttccccacgaggtctttctatcccgagtgatgctctcctctttgctctactgagtattgccgccgttcataaatcatctctatacacaattaagatcaaggaggaaaacgctcgtgatacaaacgcggacgattttgctacgttctcaatcgatgacatgactacggcttccctacatcacccctcgacgatcagcagactccagtcgagtcaatcaaagcttctaagtctcgcatcttcacttctccaaacctctcacgctctccttcagtcatcccttgctctgtccaccgcaccatccgatatcctcatcgctacttctgtcacgcttgttctgagctcagtcctgatggcttccaaacagtggcgagtgaattttgaatgtgcaaagatgctgatagcaagaagaggtggaccgagagctatgttggatgaagcgaggagcaagatcgacaggaatgaggacagcccggcatggctgatgaggtgtcggtcaatgctagaacacgtagtaatttttgaggtttttcgtacgttctactttttcttgcggtttttactgctggcgtattggcaggaccctaaacatgaattctttcttcgcttggctgatcttgatcatttgtagacagtattggaacaggagaattccctcagtttctgaatgaaccattttgcccatggtggtcagtctggtttatgtgtattcttcagggagggacacagtctcaaactctcattttaatagaaaaatgaacgattctgattctttttgtttgttcgtaccgttataggtttgatttcgtaggaaacgtcagcagaaccgaagtgttcggtcctgaaacaaacatagcatcacacgtgttggatcatgagcaaggtcaagccgactgggaaactattgaggttcgtagctgatctgtctttgctcgttatattggctatccgcggtactcatctatcacatgtgtgtgtgtgtgtgtgtttagaccaatatcggagtctccagagggatgattgagcttatcgcccgggtaaatgtcttgacatcacaaacactttacgcgcatgaacttcctctatatgccagtccatcgtcctttccccccgctccaagaacacttcgagaacaagtcgaacgggcaaatgagcttttgctcgagctaggtatctggagagaggaaataacgaatagcatgccgtccgccggtacgacgaatgcaaacgacggaagaggtttgggaggaagaggcggtttggaatcgttcagcagagtcgagttcgggaacgcgatctacgcgctcacagtacgactaatctacctccttccctttggacatctctcagttctaccccaagctgacattctatatcttactaccctcttggatccacatctgtgtaaacgcgccagatggagattatcatttctatagacgtgctcgggattcctcacttggatccatcagtccaacgagccgcttacaccgggttagagctgcttgtgaagagtaatgtcacgaacggccaagtcattgcgtatgggtttttttcttctttcaactatcccggctcgcttattcattgatagagctcggtctgatcagtcgctaatcaagaattgcacttgacctttctgggttgtcgttctcttcgctttttattagattaatgtggccaggtaaggatatttcagctcgacactctacgatagaatataagtctattagagacaaacggctcatgatttatgcttcgttctttttctttgcgataatcttatcctcaataagccatcgtttgtggagggatgatgactgataagatgggtcgaacaactacccgtgctgtgatcgagtattatcggaactcatgctgcttcgatgttgatgctgctttggccgtcgtcgaaaacgtaggtagcagacaaacttcctaccggttgtttcccgttcatacgactcactatttatctttttcttccatcctgccgactgaccatcaacgacgacagctttgggccaggaaagacgcaggggaagtaaatgcatcatggagagaataccaacggcaatcaggtttgattttggtttgatttccttccgcatggtgtttcagcattaaggatctatgtagatccttctctacacatttcacaaagtcgggatcaatcgcaactatcatgcaatactctgcctcgctaaaaaggagtagagatagacaagggaggggggactcctatttgggcattcctctacctcttgtcttcttcactcctctgacagattcgtccataccatcctttcgctttgttccaatttgctctctgccaccggttagccctgcaccatgttccatatctccatccaactcccgacgtatcatttctgccaagatgtcatcctgtcctgcaaactcttgtcttcggagagaaatttggtaggccgctatttatgtattgaatgttaatactccaatcaggatcactgcacttccgactgattcgttccaaacgagacgcagtgaactgatatattttgggcagacaaaccgttctcaatcttacgcaggctctgatcagtgatctcctgcttcttgtccaaatatgggatatatgacatcaacggatcaaactctacgaattcacataccaatcgttaaagaaaactcgtcagtgagacatagagaacatagccttggatcaatcgatagaaggatagtgcaaacgtacgagatttcatctcacgaacgaaccctagggtcttgagcgccacctcgtgttgtccttttgctatagctagagaggggagaagaggggcaaaagtcaagccaaataagcacaataaacagataggtagatttccttcatcggctagtgcctagacatgtattcgggacaataagaaaaggaaacgagaaacatcaagaacacaaaccattgagagtgaagcgcatgagctctccagatagatcagataatccaagcacatagtctgctggtgtcacaggcaaaaactgtacttcggccaattcgtatcaaccagctcgagttcgtctacatcaactagcgatgacaggaacagaacaagattagtagaaagaaggtacgttgcttacaggtttgcctgactcgtctttcagcatgttctggacctcatctatagagatcaatgtaccttctttcgtcaagtaatgaagaagagaaatagcttctatatattcttgaagacctcctgttctgtgtgcagtcatgcataaataacgaacgctagacgagttcagccgagaagccgaagctgggtttcatcctttcccattttctagtttttcgaaggctaataagagagtgacaatagagaagggcgatacaaaaacgtacatattctgttgatacctccagaattcaccctcttgtccctgagctctcaaaagctgccgtatttccctttctttgataaaaacctcagcatacttgtcctccgatatggactccccagatgttgtgagggaaactgctagtagtggttcacttggtgatgtagaggtggatgttgttgatgtcgaagcagctaaagtgtgaagaggatcagataaggaaagccgatgaaggaggaagatcatcctggatcgcgatcgagaatccatcagttgagtctcttctctgacattcatggcttataaacaaactttttggagtgtgcggttatatcccgggaaagctataaatgcgtccagccatatacaatcaagatacaagtttgagatcagactgagagaactcgacaacagtttcactcgctgtacatccaacttgttatgaaagctctcgagaagagaaatcaactaaataacaacgacgaaccttgatgatcctttctctcttgtcatacttacgttcaaaaagggagttattccgaacaatgacaacgttaaatctgtcagtaagacgaacaaaccctttccctttgcctttcattcacaaactgcaataggtcgaatggaaagaggagggagataaataacgggcatacatgcgcatcaagagtcatcctgaaggaatcaaacatctgaaggacatgttgtgatgtattttcggtcaacagatctttcgacatggtgagtagagataacccgagggcttgatggtggctgatacattttgatatattaagtgtccgcaccgatgaatgctctggtcaaggctcgcttgcacgtgattcgtgacgacacgttgatgagtgtgatgacgtttgcggctcaaacgagatggtagcaaagacagcggaagacattctatatatgtttcgtcggtcgatcccgacagcaaagaaagaaagaaagaaag

SEQ ID NO: 2493 - DNA, 7849 bp, Xanthophyllomyces dendrorhous
gtagtctatatggtgcgcggcgtttcgtagcgagaaaatccaatagtctattccggtctctttcctagtcgctcccctgatggcctccgtaatgatcccgccgacgccttccttcgcctctgccgtcaccgggtaagaaaaaatccggatgaatttcacattaatcccaaagaattgaacaaatctccgtcgaccaaccaaacatctccatccatccagcttcctcttactcttttttctttctctctgtcttctctctgatcatcatcatcttcttgccttgctctctagcttgctcttcgattctgtctgtttagtcctgtcaaaatcatcctgctggacagtcggtagtcgtgttgcagcaacggaaacaaggtctctcttagagcctctagcccattcattttccttccccactctcttcatcgatgatggtcatccggaatatcagccaagcattgtcagtctactcttgtcttatttcagctcgtctcgtatctcttcctctcttatctgtcagccgttgtccttgctgagcgctagacccgtttctacaatctcttctttcgaccgtttctctctttctctctctccctttttccctctgtaacctcccttgatctattgctctctttttagggcaacaccccgaatcctggtaggctcgctcacgctactcgggctcatatacatcctgacagcctacagctcggccagccgagtagacacactatactccacaacatccacaaagtgcaccccgtaccacacctacggacagttaaccgccaatgcggacatccccgaactcaataggtttcaccctttccaggacgactgcaaggctccacagctcatgagagcccttcgttcgctcgcaggcatagaaccatcccagggtgtcaagcaggacggctggcagggtgaaaatatcaattgggccaagggaaagacggtgctcatgattggagattctgtcgtgcgcaaccaggtgtgtcgatttccatcgtttcaatcgtattccacagcgcaaactcatccatctttgtttctcccatccctccttcttttcgccctagctcgaacatttctgtagtgtgagcgccaatccttcatcgcacaactttcttcgctccttgaccaacattgtatactcacccacgcctctttgtgttctcagttcatgaacgtaaccccccagtatcatcaattcccttcatcgggcaatctgcacaaacgagcgtccaaacaggccagccttccccatacatgttacatccctcagatagactttctcttgatctctgccttccatttcggtgtcgatgaggacaacttttggtaagtctgtcttcccatctctctcaacacgtgtgttgatcccctcttgaatagacgggtttattgtcttttcttcatgcctctcctctcctgtttcatgccttctcgttcatttcacaggcgggaaaaggatcagttcaatcctcccggactgtttgaagatcgcgtagatgtatgtcccaccctctcgaccctcagttcgctcttttcttgtcttgttggcgttgtaacactacgtttacttctccttgataaaacaggcggttttccttcctctcgtgcagtcaatagataccctcgtccctatggccaagccccactcgggtaaaaactcaaggcgatcgatcgatctcatcgaggtatcttcaggcatgtgggatcttgctagattcgccagtcgggatatcgtagaaggtcgatccaccatcaccgatttcgatcggtttgtccaccttttctctagtctcttactctcgttctcagcatgattgacggaaatcaaaataaattctgccgcatcattcagagaccagctgttatggttcaagtcaagaatcggacgaatgatccaaaaagtcgtcgaggcgtttccgtctagcaaagtcgtctggaggggcatccactatccgagtgacaagaacgcgaaggtctgtttctagtctatctttttacttgggcctttaccatccttctgtttcttcgtaagatcctcgaatgccattctgaagcgaacacgaattcgttctcatagattgattggttcatgggctggaactgggatgattcgactaaacaccggttcgttctgcacttctctttttttcatttttttttccaactcactatttcgtatatcttatgtggctaaccgtgttgttgttttaattaaacttgaccaattcagaccattctttcatcgtatgctctccatacatcttccctgagtatctacgtatagtgaacacacacagctaacggcagcccaatcttattttccctcgaatctcacagacaaccgaattcttcagttaggttcgttctcaaccgcttgactctgcttcgcctagattccttttcccaaagctcaactcgattcctcttagatcaagccgcccgatcggctatcgccgacctgaatacttatactttccaatccagaccgatcgagtttagcgagtgggggagcttgcttctcggtcagcatgcggttcgttccttgaactctctgttttctgtacaatcgatcttggcgctcggtttacctgtgtgctaattctatcccgtttctgtgtcctcctccgttcgatttcggacatgtagcatcaacagtacgtggatcttgtcgttgggcagacctttgaagtcgagctttcatccatttctgtatttcgatattctcgttgaacacttcctttctttctttctttttcttttcctttaaacagagaccaacttcatccgggaaaaagtccggccggttggctaggcgctgacatgatgcttttcggttcgtctcttctcttgttatcgtcatatcgcatcttgttctccttgagactgaacgactgactcatgggccggatttcctactccaatcgattgcttttcagaacttcgagaggctgtattcagaaaaccgagaaccaggtcgtatccgccaccgccacctccgccgttacagcatgagtcgcctcatccagattcacatccagctccttctgtttgatattctcgtcgttccttctgtccttttgtatctgtaaaacacggacgacgtaaacacacgcacatggcgacgagtttagatttgtttatttttgttgtttatttctttatgtgcttttcaacgcaaagtcagatatggaaagaagaaaaagaagaagaagaaggaaaaaaccacaagtgaaaacgaagaatgaatgaataaatgaacgcatgagcgaaatggaacacattgagaaatcaagttattgcatatattcttttttcttctcctctctttgtggacttccccctagagagtgcgtgagcgcgcagctcccttaatcatcctcaccaccacccatctccttccagaacgtatagatcttccgtcggttactgtcccgcgtgccctcaccacctgccgcctggaacagagcgctcatgaacgtctttttccactgttctctgagttgctcatccacttgctcgaaagcttccaggtcgaggtcgcttgccgatgatgtcgatggcgatgacgagagggatggatcgagtgagaggacgaaaggatagagaacgttgttcaatgttcggtcgtatgtggttgattgttgtgtgaggagagcaagagagatgaatgggttgagtagcatgggcaagttctccggaggaggagaaaggcttggttcagagatagcggcggtggttgatgctgttgttgacggggaggtggtagtggtagacgatgaagcggcggtcgggatagaacaaggagggggaggagtaagaaggactttgtttaattcgggtaggtaaatatctgacagatggtagggtatcgaagacggaaccctgtggtccttcccactaagcgcgcccgaccatcacgaaaaatattgggtaagcgccgatgtgcatcgaagactccaccccaaagaaagagagaaagagatatggaaagaaaggacgaacgagagaggaccaccgactgccttactcaagatagcattgtaagactcgatagactccttccgccagttatccctctgaagtaacctgaacgtcgcgttgaggaatcttctgatgagcatgtaatacttgtccatcctgtgtatttcgtgcccatcggaatcgattgaatatgtatatagaaacaaaatcatcattcacccttgtccacggaaaaaaaccttgcatagcaaggaagagaaaagagagagaaaggcaaaacgaacctcaatcggtcgatcccgctccattctctgacgatactatcccagaacccgccgacaaattccaacgcagccagcgtcctttcgcccatgttttcgcaccctttcgggtcgatcaagagaatcaagtctgatagctcggttgccaatgcctgttggaccaacggcttgtccgacatccagaagcctacaggacgtttgaaatcaaagagaagaagagcattctcaaaaacccttccgactcaaagtcttctgtgcagagagccaaacgggggacttacagtagaacaaccctttccagagcttcttcatctccaaatcacttccgagtcgaccaccgcctccttcgacatcctccgcatcatttctactcaagaagccggcgagctttcggatggctttgtctcgcacggatttgtctgaattatgtacgaccaggaccagagtagcacagacgagagcgtcagaatacaagacctctctgaaaatcacactgaccaaagaaggaaggagagcagtagcgttcccataaagggttgccaacgacgccagaggatggacgtaccggtcgaagcgaggtatttccctaaaggaggagccgccgacggctcgacgggcctcatcctctcaagctttgcttttgatactttcggcatagtgtcgcgactcttgtctgggctgtccaagggatctatgtctcgtccggagtcgctgttgatgtctggggtttccaaaattgggcagcaagtaagaaagccaaagagcaggaagcaagtaaaatgttcaccttaggtaaaagccaggattgccggttaactaagatatttgaaacatatctgaattgctcacgtgcccgccttcccacgtttaaaaatagatcagttccattttgggacggtcattttctcgtccgcctgctgtttcgcccgtcgtccgttcgatcagctcgcattcattcatccactcgcccgtcgctcgaccgatgtcggtaccatctgatgcgcccacagcgcttgagggaagcaagcactcttcttcatactcttatcctgctgctgctgaaacagatgaaggccggccaggcgacaagactgacacgcagtgcaagaacgatgatgatagccagaacggctcagacggggatgatgacctttctgatgacgagaaatcgaaagcagctcgtgttctccaaaagaactatcgaggccatcaagctcgatctcaggcagtgtatggtttggtttatctttcgtctttttcttgtgccaaacgacagcacatgcggcagaagagaagataagattgccagggttgactggagatctctgttggtttcgtatccgcttatcggaaccggaaacatccgtgtgaacagatcctcgaaagccagatgggatcaactgctctcagactctcaagccgtccatgatgagaaaggcgcccaagatggacaggtatcatcttccttgtttaaattttcttctcttgctttctccataaatccctcttattgatttctcttgttaaatcgctcataaaatggatgtaaatctatccggatgtaatccacagaacgacgctggatcgaggtggcaccgggcgcttcacgcatcatccaagataacaaacggtcatggcaccgaagccaatgatgaaggatccggaggccaggatgaagaggttggcgaagagtatgtctagcccggaaagagactagaccgagccgaccaggagttctatcatttaacacttcattttcccttattgggcgcgacgagaaaagaaagaaggcaaagactttacccatcaaagacaagaacctcgaagagtaacatgtttttttttctattatccggttcagatgtatattcaacgtgttattgaatcaaacacctcatccttcttcttatttgggcagatcctactggctagagatggtcgatggtagacatcgctatggcgcaaatctcaaggtggggattacaggcctttctttcttttcctttttcattattgtcattattttagcaatagtatgtatgactcgttgctgaccagctgaggtatggggatgatacggtcagtactaccatgctaaatgggaagaggccgacacgaccgggagtttcttccgttggctcgaccacggagcaggcaagaaggaggatttacctgaatgcccgagaagccaactcgagaaggaacgcgttcagtatgtctctcttccacatcattttggttgactattcgagatccgttgatcgactttctcgtggtactcctctcggacgaacccatagataccttaacatggaacagcgtctgaactatctatgccgggtcgaccgaaagacaggcaaactatactggcatgtgcgaggagaaccagtggatactaggtccgtttcgttcaagatcagacgattaccaagtcatcgtaacacaattgtcttctctatcctccttcttgacgaaaaactcttttcttttctttttcttcttttcgtaatccctcgattcacctacgtaaactagtccgaacacatgggaagacagaggagacggccaggggatcgtccgtcgggaagagcccgactcggatgctcgaccttcaagcccgtccggatcttcttcttcctcattgttcgaccactcggcatcctcgtcagactcttcgttggaggaaaacgaagcgacccattacgcgggagccgccaacgaggatacaggtgggatcaaaggcagatggaagaaactcacaaacatgttctcgaccaagggcgtgggcgaacggatgttgaggaagaccgtcaagaagaacacttggatctttgtggctgatgtggattatcatcgttcgtccggatgaaattttatttagtttaacttttggtcgcgtttcttgagacaagtacgagctgattctgttttaatatttatctttctctctctctctctatcttttcgtctctttgtcaatctgcttccttgtcaagtgtttgtcgggcttaaaaagacagggacgttccaacattcatctttcttgggcggcggaagagtcacggccgcagggttgatcgtcgtcaagaatggtctgatcaaatcgctcagtccactatcaggtcattacaaaacatcgatcgatgtgagcgactttctctttccctccttcttttttttctcttgacttgttttcgagaactttcgtcgtataaggtggagactgattcacaagataaccggcgcgggtgatgacgatcaacgaatcataaaaatgaatgaaaaaagcactacaagacgttcctaaggcaactcgaagaccaaggggccgacctaagtaaggtcaaagtgacaggcgcagagatggtgcgtttcttctctttgtctttacatttctttgtctcagaaataatgttctaaaagggacgttctgagattgacgattgattctgggaacatcttttcccccttggtggatcatcgatacagactcttctagggtgtgtcgttgtttgttctgaatattgcacgaataaaacacaagactcaatattttatatatatatattttc

SEQ ID NO: 2494 - DNA, 5561 bp, Xanthophyllomyces dendrorhous
atatatattttctttttttttcgtttttcgtcgtttcctttgatctcttctgttctcttttggatctggcacgactccaaccggaacggtagactcgagaaatacggcaagttttcgaagaagcgcaagtcgctcacccacaagatctttcaccctcaggcgcacaaggaggaggctgccgaggaagaatacgagcatgcctcgccttctgaacgagagaaactcgatggtcacgatcggaacccacagtctgatggacaagcaggcgaaggaggaggacgcgatcagggtaagaaaggagcgcagggaggaagggatgagttcatgcgagttttattgatgggtaggaagaagcaggatgaaccgtcggccacgaacggacacgggcacagaccctcaaaggacaccatggaggcggagaacggggacaaagtcgaaacagtacactcggtcaatgacaaggacaaggacgagaaagatcaatcccgtacaaccccaccaacacaggaacagcaacatgcatccgcgcctccttctgagtctaccccgactccgaagaccaccttgacggattcctacccgacgtcaggtctggagaacttgagtttagggacccctatcttgtgaacttgatgtttcccttttcgtcaccctttttttctctcttgcgtgtgtggacgtttttttttttttaatcgagccttcatactattcgaatttttctagtgacgcctcgacgttcttgcactcttcctatgctcatgagttccttttttgcctttccgagatcaacaaacgaaccaacgaacgaacgaaagctccctgttgacccgtttgaattgattcgaggtcaatcaagttggagtgttcacactaagagatgattcatagatctgttttgtgttcaaatttatttttcattgatatgaaaatcaagcgaaaacgagtggaaagagacgcgaaaggaaggcatctcgtttcatgagaccactctcgacgccagacctaacggacgagggagaataaggtctcttttgtgaggttgtagaagaaggatgtaggagaagggcaggagatgtcgtgaaagaaaggacgtataggtcgtgaggaatgaataaataaatagacaaacaacgtgctcggtcgacgagacttttaagggcaagggaggggatgaagaaggctacaaaggttgtattgcatggaacgagagattcgaaaggatgaacaaaaagtaaaataaaaaaataaaaaaaataaaaaaagagaaagaaaaatcatatggaagaagtggagattgcggagagggtagggcatggagtgagcatgaagaggaacagtccatcaaggacaagtccgttcagacgaccagcgtctgcaagtgggggaggaaaccaggtaggagcgaatgtggaggggacggaggcatagagtttatatgcaaaccgtttaagcccaggtccaggtgacgtcgacctcaccctcggactcgatagcgatggcggtgaaggcgccgacggaaagatcgatggagtaggtcgaggtgcacgacgggcagaggtcggcgacgacggcagagaccgaggcaccatcagaagttcggacgatgttgatggtctttccacaggtctgaagagggaatgaaagttagggttagtgttgatgaacactttgagacctggctgaggaatgagagaaatgagtgagaacatacggaggaagcctcgctatcactggttccccagatagcgtagggaacggcgacgatgtagtcgctatcggagtgaacggttccacaggcgccggcgttaccaccctaaggaaaggagaaagagagaaacaaaagagaagtcaaaggtgagcgcgagtccaagacaaacacaagaaaggaatcagagacaaacctgggtgaagtaggtagcgtgtccagagtaggaatccgaggaagaagcggcggtggaagtggcagcggcggcggccgaggtggtggtggaagtggcagcggcggcggccgaggtggtggtggtagcggcagcggaaccagaggcagagctgacggcagacgacacggcctggttgtggttgctccaatcttggtggtgtcgggcaggcgcggcctggacgagggtgaggcaggtagccaagagagcgacgggagcgaaggcaagcataatgggaatgatggagtgggtgagtgagagagtgggtaagtgagtgagtgagagagtgagtggagttgaagatcaagaagcgaagactctaaagagatggacagaaaagactgatgaagaaagaagaaaacccaaaggaacagcgctccctgttgttcttcttatgcgattcgacaagacgacccgatcacgatctccctgtctgtttgggatacggaagaacgtgaaagctctggaagaaaaaagagggtgagtttggaaacgaacaaaaaacccatcgttcgtatttttttaggggagtgttgaacgagcggatgaccaaagaacccaagtggcccctcgttctcgtccgtctggcctgaggcgtgatcacaccgaggttgggcggggaggaggtgaggaagtaaggtttattttgggtgcctgggtgcctgggtgccttgcctatcctgcctgtcctgcccatctgggctcgtctaggctcgtcacctgtccgtccactgggctgacgatggcatcaagatcacctccgcccatcaggaacaaaagcgatgaggaacggggataattaagaaaaaggggttgagcctacgttttggggaacgcctgcggtcggagcagccagacacacagtctaggccccggccttgttcccttgctttcgtgcgcaagccggaggcgactatcaacgaccaccacattttgagccgaggcggtggtcggtatgccggtcaattgccggccggtcaaggaaaaaaagggggggggagagagagtgagtaaccagcaaacggactgcgtcccgctagacacaatccaacttcgcagaagctcggacatgacccgttccagacccttggtctaggcctggccggttctctaggttcacaactcggagagtagactctgttcgggatgttgccatcggtgatcatggtcatgatctccgtgcctgagcacgcttttcggtaacttggtcgccctggctacgctccccactacaccgggcacagtcacggatgcccaggcaaagaccgacaacgatcttatccggatgacatagagaacagaagagcaagctctatgttagatggtcggtccgacacatgggccacacccgtacaccatcagcacactcgcgcccacattggtatacagcgcacacacctacatacactcgctcatcaccgtgtcgctctcagatctccctacacgatgtttctctcggttgggtgtgatgactaggttgatgtcagggatgtaacccggatgaaacatagttcgtaagctggttcttacggacctcccacttccagcgcatcgtacttccagcccatcgtgctacaatgttcatagggtctgaggaacatgtataagacaggtattctcgaccacttgtagataggagatctcaatcttggatcctttgtcactcgtactcctttccttccttgtctccttgtccttttcttgtccccttatcattgtccttgctcccttgtcgttgttctctagtgatttcatcgatccttcttcccagctcaaagagcctgaactttcttgtttggaacctaaaattccttgtgtggttactactttgtagccggtctgttacgaacccagctccaactcccggctcttacggttaaggttttaattcttttttctttctttttttttccaaactttttgcttggaaatctgctgcgcgcctcggtactcgccatcaacaacatcccatcgcgtcccgatagtctgatcgtctcgctcgacaccgatagaccatcagctaggaaggaagtaaaggaaaggaaagggaaggaaaggcaaacatcgactccaatccggctcgcagtagagaaagcgtgcttgatcgtatcatagatctctcctcttagagattctgctctctctccttcctcacacttcaagcttctctttctcctcgttctctccctcttctcggtttggtctccttgggccgtcgcaatgagctcgaaatcatcaatcaaccccaattggccgtcatatgcttgtacggccaccatctgtctcgccgtcctcggcgctctcatgaggtactttgtcatcggtacgtcttacccaacgttctcgtttgtgtgcccgtgctcatgctgaatatcaaagtcatactcgctcactcccttttcgcttcggacgccatcagactacgccgataaggatcattgcaaagctcttctcaacaccggtcgctggatggactctgattttggactctggcagcccgaaggttcgtccattcagtcttcacttgttctgtgttgccgagcgccttcactcacattcttgttctgtcatatccctttatggccctttgaactctgctatgatccttcatgttccgtttcttcttcttacctcattcaatcatcttcaccctcatatccttctccgtctcgttctatggacgaaaacttgtttctccaggttgcatgacagctaattacaacgcacctttgattaaacaatgcgcgcaatcccggcggatcgtctttatcggcgattcggtcactaggcagttgttctacgccatggcaaagtccagtgactccggagtaccggacgaaccaaaagactcagaagaaaagcacaaagacgtctctttacactcacgaccgcacggttcgtttctttaccttttttttcactttcactttctcttccttcacctccgtctcttcgccctgatccttatgctcgacggcccgactaacgatctttttgatatctctgtccctcgacgatctgaaactctacagacataacctttgatttttattgggatccgtgcgcatcttctctctgttttcttctcttcctcgtcgacgccattcctgtatcgtgcagcgcgccacatatacacatatacacacacacacacatagatagaaatctgatcaaacattttcttttctacttcttggcaggttcttaaactcttctcacacccagacgttgctgtctactccccacaccgtcgtcccgacttatacaccttcccatcctcccccgcccgcgctcctcgtgctcggctctggcctctggtacctccgaaacccctcttctggcggcctggccggctgggaatccaggatcgatcaagtgtttggtatgatctcttccagcagagctcatggcccaaactccctgttggcagacgaaattgtgtttttacctgtccagatgccggtcgtctcgaaactatcacctagtcgggcagagaatctgctgccctcggatatcgacacaatgaattctgacctcgctgtcaggctatcgccttcgtccactttcatgtttcatccgacctctcctaaacaccctccgtcttcctcctcctcctcctcc

SEQ ID NO: 2495 - DNA, 23463 bp, Xanthophyllomyces dendrorhous
cctcctcctcctcctcctcctcctcctccacagtcaaagacagagggccccttccaccaatctctcttccacttgccttcaactcgatcctcgctccgtctcagacgaccgacggccttcacttttccccaaaaatcctcaagacccaaatcaacctgctatggaatctgaggtgcaacgacgtcgtctccaaaaagtttcccatggacaagacgtgttgcaaacgatatccatccgtcggttggcttcaggggttgactttgcttctggtcgtcggtgccgtgccgtttttgaaattcctcaaaggtagattaggtcagtccaattttcttgcgccaataccccatccctttagctttgaatgaatgccttttccagtaaccttactaccgcccctgttcatcttgctaggccacaaattcaccatcaatgtcctcccaacaaacgagacgaccgtcctcaccttgacggtcttcgggctctgtgttggcctgtcattcctagcggacagaacgccattgtggaacaaagagaacaaatcgttcagcgcgatcgagttcgcgctcgcctgtctggcaaccgccgtcggtggcgtcctcaccgcacagaggagcgaaggaggaaaagatctcggctttttgaacagagagcaaaccgatgaatggaagggttggatgcagagtttgtcctctttccttactttcttgaccggtcaactttacgaagaacactgaatattgatgatttaatttgaataaaataaaataaaccaccttgttctcaatcgtagtcttgattctgatctatcactacctcggagcttcgaagacctctggaatctacaacccaatcagagttctcgtcgcttgctacttgttcatgactggttgtatgtctctatccttccttcttccttttctcttgtttcttttgattgcaagttatttttttgcctgacaaaccgctaatgattatttcatttcaactctggccattcattctccttcttactcgtgcgcgaatcaaccatccacccaacatagatggtcatttcacctactattacaaaaaggccgagtttggaattgaccggatcgcgatggttatggtccggttgaaccttcttccgatcgtcttggcttatgtgatggacacagattacatctcgtactacttttcggttggtcttcttctctttatgcctgtaccaagcagaaaaggctcagattgactcactctggtttgatgttcgttttttttttcttttttctctaatttcgcatttcagcctctggtgtcgttctggtacttgatcatctacgtcaccatgtatattggaaacaagtacaacaccgtgcccgcgttccttcttccgaagcttgcgctctctgcattcgttatcacgttgttgatgaaatcagatgatgtacttcgcgtaatcttttccttccttgccaccgtgttcaacatccaatggtccccgactgaatgggccttccgagtcaatcttgacatctggatcgtctatatcggcatgctcaccgcctggggttacatcaagttgaaagagctcggaatccctcaaaaggtctggtggcctacggcagtcaaagcatcggtcggcctgagcgtgctctctctcggttggttcttctggttcgaactttcccaaccgacaaagttttcgtacaacctttcccacccgtatgtgtcgatggtcccggtcctaactttcgtcatccttcgaaacgcgacgccgttcctccggtcggtctcgtcctcggcgtactgctttgtcggtcagatctcgcttgagacgttcattctgcagtaccatctctggctagcgggtgacaccaaagggatcctcatggtccttcctggcgggttgaactggcgactgctgaacgtcgcgatcactaccgtcatctttatctttgtctccaataaagtcagcaaagctaccggcgtcctgaccgaggtcctcgtcggcaaaaagaagaagcctagaggattgcctactcctgctaccgctgccaataccatcgaaaatgccgacaatgccgtccccaacggtgctacgtccaacccgacctcgggtcaggccccagcggaagattctatcccgctccttggcatgggatcttctacagatgaacccgagagttctccagcgatggacgacgtagtcggcgctcgtcaaccttcctctttgcccgaacgattgtatcagcgttccggcctgcaacgagtcgtcgacggtcaggcctggagggagaaacttgagaaccactcaggttggaagttggtggctctcatgatggtctgttgggcgttgaacctggccagtccaaggccttgatcggatggggggtttgtatgtaaatttgaacgtgtgatcttcaaagtagagcaaaggggtggaggaggagaggttcttattttgtcgcattgctttctttttctttttctcctttctcttcctatcatctctccaaacccgttttacaacatctacatcatctatatcgtctacaacatctacatcatcatctatctgggtctcttttgattttcttatattttcatccttgtttctcggtctcctctgttagtggtctcccaattttcaaccacgttatctcacacgttgttccctgtgaaacgcgtctatgagtcaacaggcaagatcaagtgtcgatgagataatcgtcggttaatttacatcaggaagttgagcgatcacattctgactcgacgatgaatactatcttccatctctcttctatataaaacaacgagtttcttctcttatcctcttccgctcttatctctctacctcgtacacatcgcttctgaaagtcgagaagaacacgaagccgcaagcaaggatgtacaaaaacacatacacaccaccaatacccgccgagatcccctcggacactcacgcaaagacacctaaggaggaatatgatttcaactatgccctgctcactcagcccatccaagtattggaagggccaggtagagatgtcagacttgagccttttgttgtgcgttctcatatatatgtttcttttctgtgaagaacgaactgtgcgacttgcgtcgaattctgatttgtttcttgggatcttctgtacgaacatttcagccgagcatctacgccgagaaactatacataggagcgaaggatcatccggagctagtcagatatttgcctttcgacctctggcagtctgtagacgatgtaaacatcttcctcgaagagttctttcgacgtgagcaggtaagtccaatctatcccctcccccatgcttccctcgtccgggtccgtcatccatcttgctcaagctttgactgatgatcttcgttgtttcattatatctactttcccggttgctttgggtttccaagtcgaggttgctctacgccatcattgataaaaagacggaaacgttcgcagggatgatcagctggattaactccagcccgatagatctcacgagcgagatcggctttgtctttatgtttgtccttcgttcttcaccttcttctcctttgctctcccatcggaaggttttagtttgtttcactgatcagcctgactcgatcttgatacttacgcgcacgtgcgcatagtcttccccccgcgcagaggacccatgtgttgacacactcagtgtcgttgttactcgaacatggattcaatctgccctccgatggtggactcggtctgagacgaatccaatggcaaggtttgtacccatccttctttttcttttgttcctttcttggtctgcttgttcttggcagaacgtatgttgacttctccttctggacattcctgaagcaaacgagctcaacttaccctccacgaaagccgcgctccgactcggattcgtcctcgaatcacccatccgtatccgacttcaacgaacggtcaagccaggaaaagaaggatcacattccggtcggcagggcgatgggctatacgaggctggtagaatgtcgagaaacacaaacatcctttcgctcacttatatagattggctcgaggacggcaagagagagcacgtgcagagtttggtggagagaaagccaaaggcttagagttctagaatgggaatggccgaagacatagacgaatttggctgtcttgacatacttttctttttccaacaaggattactgcacagtttgatcttcattcacttttgatagacatgattggcttgggatctccttatgccattctctctgtcaaggatcgcgaaggaaagagcgcaggaaacgatggacagagaggctcaagcctgacaacaagagaacagaagaagacgaaagactgaagaaacaaacatatattcgaaagctatccgggcgtcttcccaccaggcgttctctcactaggcgtctttcctccacccggtgtctttcctccaccagacccaccgatcggtgtggctccacctgttcctatactcgtgcccgtctttcgtttcttcctaggttttcccgtactcccgccgccttccatcggacttgtcccgtccccaatcccaccagtgttcccgttcgagttcccggtcaaacttccgaaggacgatcggttggtaggcggcggagtcggtcccatccctccgggcgtgtttgttctggaatttgcccctgttgcaccggagagaggcgatccgttcccgtacatcctcgagttcccacctggtcctccccctccgcctgccgacgaggacggaggttgggatgattgcgatcgtccgagacggaaggaattcgctaacgagccggggtgtcgtgagggatcatactttggaggaacgggcgaggtcgtcgagagggctgtcatctctggaagagagttcagcgtcgtccgaagagctagaaacggtaggtaggatgatcctccggatgttgccgccgttgtggccgtcgtcgagagaggtttcggatcgatcccctgcgctgtttcctgcccattaggtttcgcagactcagataagctttcttcgatcggaggaataggtggtgatgtgatctttgctggaatgataggagcttcaaatcgagggttgaatggcgcggctgacgtcaattcagatcggactgtatccaaggatgtttggattgatcggatggatgagttctagtcaaaggttgaacatagggattgggatttagttgttgatgaaccagcgcgcatacgagagagaaagaacaaatttgaggttccctaggtggagcaaagacaacggagagtgtgcgcagaagaagacttacgagacgggaggatagtaaagaatgtaaggactgagcgagatacaccgcgttattgacgatatagtatgccgccagaagatgagctgttcataacgtatcccccgcacccccgaaacagaggcagaacacaaggcgttaattgttggattctatctatcgtgaatcttcagaagacaaacagactttggtcgggattgagtctctctcgtttatggatgacaaataacgaaggcggtctcgcatgaacgagcgcgaattctatgccggtgaatctcctgatcggttcgagatgaaaacccccaagggagttggaccaagaggtcatttagaatgtcgaacggtcctctacaaaggcaagaaaagaaggcggatgaagcaacactaggaagataggacgtaccgaagttcttcctcctcgttctctacagtctctcctgtatgaagcgtctgcatcttgaggacttgattcgaagattgtctatcgaaaaacggggaatgcgagaaataatccaatctgtgatgaattcccaagacaaagagagccacgcacaatagcgagccaggttccggttagaaccttggtcaggaggcatgaagatggatgaaggcatacacgtttcgctcattcaacggtcctacagcctatcaggcccatcatcaaatccatccgcccaccccagtaccaagcccaacccgagtaccagatgaagataaagaaaaggttatgtcagtttcgatgtatctcccaaatgttcaattttctaccaaataccacgccatccgtctctaccctattctcatcaactcatcaacacatacaacgccttcacgggttgtttctgacagtctgtcaactcgtctatatagagaaaagagagggggcagaagaacgcacctcaatgtattctgggtagacgaataccgttcggttgaggtccggagcatttttggctgaagacgaaggatctaagttcgatggatgttccatcactttggttgtatattttctttctatatgcctttcaaccgtttgcggctttaatataatcctgtcttgaagaaccaaaagacacttaaaacagagtgatggcgtacgaagagggatgaaattcggaaatcgggatggaggcaagggtttggaactgcacggttcagaaacccaacgcgaaagtggaggtcgctcttcgtatggtcgaccgactgatcatcagcccatacttctctcttccttcttcttcttaccgcccaccgggatattgaaaggatgtttgtcttgataggatatctgttacatcaattcaatttaacgttttgatatctggggtaggtacataaactatgagagaaacagccgtccgatgtattctattctttcgtgatataagatgaatagatgaaaaggacaaaggccgaaaagaatgaagatggaagaaaagaagaagtcccaagagataaagaatagagagcaaaggtgtgatggtgatgaaagatgtggatagatggagacaaagaacaaccggatctctgagtgatctagaacggatgcaagcgactaatcacaatgacgaacaagacattcacaactctacttcttctcgctgtccaagggctttcgaacgacgtagaacctgaggtagaacggaatagttcatgaattcgttagtactcgaaaaggatgaagaacaaaagaatagcgacaaagaagcgaggtcgacgtacatcattggagtgaagatcttttgctgaccacccttgaccaaggcggctcctgccattcgaagagtctctccgacctcgaacgttcccttggggacaagtccgaacttctccaaagcccagacagcgttgtgagtgatgacctggccgatcttgctcgttcggaacacggtaaggtaatcgtagactgtctgtgcctttcggaagtctccctcgagggggtagtaccagggaacgatgtcttctcgctcggccagatcttcgtgttggacgactacaggtcaaacgaaatggagattagcgcccgttctgtgtcttcaagtatgttgtacaaaagggcttactctcgaaaccaacagagaggaaagcatcgtgggcagccttggcgggcctcatctctgcgattccgtctccgacctggtgatccacagatgtgtcgacagaatcaaagttattagcgcgccgatcgatcagaagattaagaaaatcttggacgaacctcaatctcgtgctgaatctttctgtgctcaggattagaagggtcccagttttcggtctgaaaggaagaacagtcgaccgattaggacggagatgatgaggaagacaagagaagtatatgacgaagacgtaccatgacccactcgtagattccagcaattcctcctggcttgagaaccttgtagatctcctcgtagataccttcgaatgtaggggcgtggcaggtggcttcgatagcgtacactagatgtagggagaagcgtatgagctatgagcacagaccaaccgtcgagacatcaaaagaagacggaccagcatcgaacgcgttttctccaaactgctcggaaagggacatgaagtcacccttagcgtagtcaaccaagtgagagagaccggccttctgagtgtattttcgagctcgtgcgatttggctatgggagacattttggagtgagaatcagagttaggaagaaagtgtgtaaggcagacgtgaaagataggcgcaaggggtgaggagacgtagaggatactcacaaatcattgttgttcacaccggtgattctggttgtgtgtttgtacataaagaatatcagataagtctccagttcggtcaagagacagagagttcatgttacgaaccgggcatcagaaaatcgagcaatctctcgagcgggtccaccgactccgcaaccgacgtcgaggaccttcattccgggtcggagacccatctgggaggcgaggtagtgctcgtgtcgagcaagctaaaggaatttcaaggttttgaaaggaagagtaagagagaattcaaacagatggttgagatgattcctcgagctgcgacaaaaagatagaggcacatacggaagcttggaaagcttctccggggtagaaccgggaaaagtggaaggattgggcccaaccatactcgtagagctcggtcgctccgtcgtagtactaaacgaagaaggcaagaggagaaaaagaatcagaggcgcgtcagacagaggagaacaagagtcaaggaaggaagattagaacaaagagggacttacaccttgatattggagaaacaaaatgagaatcgagcgcgatgagatgttttgttttgttttgtttgttttgttttgttttcgatgaagtttgtttgatataggaagaaaagaaagatgtcagaaaatgatgagcagacgccagatcggagagaacaagggcaaggaagagtacggaccgttgacgacgtcggtgtagttagacagtcgattgtccatgtcaacctttccgtccttctgagaatctttctgccagaagtttgtgtagttttccaaccggttggactctcttccatcggcgtgcttaacattgtccttgacgaccattctagatatctatgctgtagatctgggagggagagagggagtaggcgaaggggtaatatagagaacgagagagcgtgtgagatgggagaaagaaagaaggagcgaacggaggaagtattaaaaaggaaaggaaggaaataaaaaagaagaagcaaagaaaatcgaacgagacggctgatgtcgaacgactttgtcggatggacgtgtgtgcctgggcacgtgcctgggtgttcgtgtgcctgtttgagtgcctgcccgggtgcctgagcccagatcggggcctccgaccccagatacgtggtatcactcggagccttgaccccacacagcacccacatcaccccaaatacgtcccaaataccgaccccgtctatcacgacacgcccacaccgcccaccaacgtctgcacagccaaacaggcacaagactcttgcagtccgtgcgcttttcgtaccttcttttccatctcagtcttcctactccctagctcttgcctcgttgaccatcgaaccggacaaaggtaagtcggatgggaggaagatgaacgacgagcacgactatcacatagaacgatgcagtacatcgtacttgaggaactactgatcagagtaatgtactcaagacaaacggactggattgactgactggatgatctgtctcaacatgttcaatcgcagaccttgtctttcagcccgttcgtacgaccttccttcgttccacccagtcttccaacctggtgagtctctcagaacaatctgctggaccgtagatctattggaaattcgatggacgtacttgcactcttcattctaatccctgttcatatcacggcagtcgtttcgaccacacagtctagtacccatccttcgctcgttccgtcagggtcgcttccccatgcccgtcctcgtcggttcttcccctacggccacttcgacgaattctccctatcaacttggtcgcccgtcctcctctcattctccgacatctccacatttgattcctaggagacgacgctctcttgactcagtctctgtcctccgtttggacgcctcggccgatgaccctcagtctgggttcgacggactcgccgatgaggaggacccagagtgggtcaaagtggacggcgtgagacatgtggaattagagcttgatcctacgtaggtcaccactccttccttgccttctcttcgtttctctctctcaagcatcttttcgtctctcttcctttctcttcttctgctgtctcgacaccttcttcgtgtctgttgttagccaatatcaaacagaggtgtttgcaagaaaagtactcaagatgctccaatccctccgaatccctcactggtcgtcaatccatctatctgcacaaaacctcaagatacataaagttaccggtagcatgacaaacgccgtgttcttcgtgtccttccagcccaacccaggaagcacctacttttccaggcaaccaaccctttcctcagatccctcccttacgggtagcagcagtccctcgaccgcagggatcggccttctcagcctgagtgaatctccagctcctatgacggatactcctttggataaatctgaagcgcccaccctagtaggttctttacttctatgtatgtctcctcttttctagctacagtctctatcttactattcctctctctttacttcttttctcttcggactagcttcttcgagtctacggatccgcctcatcaacattcatctctcgaccacgagaacttcgagttcttcatttgctctcttcagtttacgaccttgggccagccctccggggaactttcaccaacggccggatcgaggagttcttccaatccagagcgctcaccgctagtgaactccgagacccaaaaatctctggatggattggtcgacggatggccgaactccactctgcagacctagacttgctgtctcccgtccagccgggtgagagaagagaaccagagatgttgaccagtctaagagaatggatcacacccgctaggattctcatggctgatctcgcccatgcccagtcgataggcgctctggcaggtactaatttaaacaactttgttgaggcatttgctttggatacgtttgagctcgagatcagaaagtatctcgagtggctcgcaaagtgggaacgaggtgaaatcggtcagatgggaaggccctggcgaatggtcttcgctcgtatgttgatcctttcttcttatccttcttcacttgttctgtaactgactcacatgcatgtacacactctgatagataacgacactcagtatgggaacctgctccttctgtctaacccgccaccaccaccccagccagcgcacaccgccctgatcgtagtcgactttgaatacgccgcgcccaacccgctgacacatgatattgcgaaccatttctgtgaatggagagcgaactaccaccactcaaccttaccacactccctctccgctcactcgccctacccgacgaaagccgaacgatggaacttttacaaatcttatctagccgtagcaagaggaagggaagttaaggacgaacaggagttagaagaattagatatgggtgtcaaagcttggagtccaggaggtagcgcgacttgggcgctttggggaatcgttagtgctaaagcacaggtggacgcattgaagagcatggacccatcgttcataccagatttcgagtatctcgtgagttttggttcatcgaccattcctttcaaaccgtttcgtttctttggaaactcttctttgtcttttagtgctgacaaccgaggtttgacctgggattatagttgtacgcatcagaacgagttcagatgttcagacaagagatcaaagatcttggaatcatatagaaatcgaactttctcaagtactcttcctgagctttgttcttctctttttctatacatttatatcctttccgtatcacaacacaagataggaagacagaaatacggagttctttcagctcatcctttttttaacccgatttcagttcggttttccttcatcccttcgttttcgatcttgttctttgttttcggattccatgtttgtatatgtgtaaaccattccaagcagagttcgcttgctttcgccagtttctgctttttttctcatccgtatcaaggatgtcttgaccggccaatttaaagtgggagagacagaaaagagaaaaaccccctcagtgttgaagacgattatccgagagacagacagcatggaaaatgcatccggccagcaggtcgttcgtgttcatatcattatatttaaatattcagaagggactataaactagactaaacggaagtgtatagagaacaagaaacacaaccggagtaggaaggaagaagatggtcagaaaaatcattaagatagatacaaatggatctcttgtaatcaattttggatctgcaaccccttcccctatacaaagggaatagtttcctgataggttgccgtttgagcagaaatagaaacggggaaaggccgatgaactctaggccagaagggaagaacaaaaagatatatgtcgagtatgaaacctctttatcgtatttaccccttacgtctggtaaaaacaagggaagcgtaaggatggagaatgccctattttatatttttgattcgaatatacagtcatctggataaaccccacaggaaagaataccaaaacatacagttagctacctgtcatcgtgtttggaaaagaggataagaatcgaacgaacagatgatcatctctgccatagagtcttccaaccccattgctccaacgcttgtactccttctttcccggccccagctccaataacagcccaaggcacagtcgagtaaattttctgaaccgggtcatcacattcctcggcattcggatcgacagaaatgtacttgacgttcgccggattcgatttcgcttccagattcgaagtcgaaatagaagtgtgctcgatccattctacctcctccttttcgggtgtctcttcccactcatcttcctccacagatggagcaaccgtagacgaggacgaggatgatgaaggaagggaagaaaaagaataggatggactggcgctgggtttcacgttgatggcggcgtaggtttcagtcgatacgtaagccggtgcagaggatcgacgaaagatcgcctgaaggcagggatgagggttgggttcttgagccgtcggctgggtttcatgaaatagtagaaacccaagatgtctaggtgagaaaagcctcatatactcagacgatgaaaagaaagaagggacatacaaacaaaaacctcaacggtttttttgcatcacttcggcctcttcctcgagtttcattctcgtaatatctgtcgacgtcctcagcccaatcaaatgaacgggcatccgaagaaacggtcctgatacggacgataggcagtgcagagtccactgatctcgagtacgagataattgaagacgaaggaaagcttgtggagaacatggtggatgggttggagttagttatggggaaggcgaaagaggagcgatttatgttcagagatgaatcagatggctcgatggagtttatgtgttattgatggagaagaagaagacagccagtcgagatgaggtgagaacagagatcaagcgaaaagaagagtgagcagggaatcaagctagaagattagttctttatattgctagtcagtttgctctggggaccaagaacagggggcaaaaggtgaatcgaggagtcatgatgactcgaaaattgaaaaaacagaggtccctaacacaacgtggcaccccaataggaagaacggtggtagtgagaaaagaggcaatagatcgtctgagaagcggacggaaggtgagcgatgtagcaagatccgtccctccgttcgtccccgttagcaactcctccgtcagtcatccgacgaatgacgtgctattggatgaatgatgatacggcaagcaagacagctaataaagctcaagaactgagcatctgttgcgttataccatgctgtctttcttcttcttcttagagacattcagcctagcaaacagaagaggatgggcaagggcaaacacggaggcatggccttgatagtccgttgggaagtcctgaaaaacgattggggtttgcacaagacttcgccgtaaatgcggtgcaacccgaggatagacataacctctgctatcaactgcctgtgagtacatcagtaggtccgagttgaaggaagaaagagatcgagaagagctggttagaacactttccatcgcaaacctaagaacgacgctcatagagtggacagtgcagaggtgatgcatcagagttagtcatcatgggggtcatcagcttaaacaagggtagcatagtctctattggagacaattctctagacacattcattggtttcagcccaacgctagatagaatgtcagcaaataaacaagtcaagtcaaagtatgtatgtcgtcgtgatgatatgggctgaagattgaatggtctgaatgatgaacacttgctcatcggcccatcccgattagcttccgtgtttctcttagaacagccatcatctccttcattctcccttcaaactcttcgagcttgtcaaatttcacttgataccaacccgcattctgaaggaacaatcagccggtatctctcttctctattctcggcccgtccaccgggcttatgttgaatgactcggcgtgatccgatcgagatgacctacttgcaacccccggacaacgtgaacgacactcgacccgctgatggcgaggctgaaaccgaacggttgatcacgtcttcttcttcgacttcctctttgttggaccatgaggactcacagctcacatgttcgtgctgtttcgagcatctattactcattctcgagcagtcgagctaatgtataattatccgacgattgattacgatagatactacgcctaaatggagggttataacctcgttctttctctttggagtgatcaacaatgtgctctacgtatgtagagtcctcttaagctctggatttgttatactagataaggaatcgtccaaattgcttaccgaccttccgttaaacacgaaatcaatgtctcaaaaaggtcatcatcttgtctgccgctctagatcttgttccgtcaacgactcccaaggtgagtacaccatgttttcgcgttgtcttctctcatgtatgatctttcggggactaagactgcattcattcgttcatccggcgtgctcaatgaaagggagtggtcctcttcttcaacatatttcccgctttgctcgctaaagttctctatccatatattctcaccggtccggtcatctattccctccgcgttctctcatgcctactcctatcggtcaccggcatccttctcgtggcatttttaccatctctcccactgcacctccttggcatctctctagcctccttctcctccggactaggagaattgacatatctccaactttctacatcttataaagacaaatggagcctaggcgcgttcgctagtgggacaggaggagcaggaatcctaggcgcaggcttgtggtggctcgtcaaaggatggggcgttcgaaaaggattgggatcgatgagtgtcttgccggtcattatggcggtcgcctattgggggatcctaaagagtggacgaaaagataacagtaggaaggaggatcctttgagggatgtacagctaggtaatgcgccggtcggcttgtcaataagagacaaatggatacttgctagaccgttgatcggaaggttcatgtgtccgttgttctttgtgtacttgttcgagtaagtgtcagctcacttcttctttgttacctccggccagccgatcttttcctctgattttgtgattatcgagcggtcgagctggcgttgttgtgcttctttggtctaaacctcgtctctctctttctcgaagatacactataaaccaagggatctctcccaccttactctatccactccctgctccgtttcctctgacctcccttctcccaagcccacgggacttttatccactttaccaactaacctaccagacctttgtcttcctctcacgttcatcccatatccttaacgtcccaccaattcctatccgcttcctctctgtaccctctatccttcaaggcttggtcctcatggtgtgcttgatggagagcacgaacactttcttggggattagggggattctagtcgtcatcgcactcgagggactctgtggaggtgcggcgtatgtcaacgtgtatcatcacgtcggtcgagttgacgacgatgaagttgacgagagaaccgagagatcaagggatgagaggaccaagcaggagaaagagtggaggatgggtgtggtcggtgcggctgacagtctggggatcctatttgcttctctagtacgtaccgacttcggcaactctttcttcggatggatggttagatggcagtgtgattgacaagaggtggccggttgtctttccatcagatttctatgccaatcgaacttggtttatgccaacatcaagtcgaaaaaggaatggatctatgtcgaaccttataggatgagtgtctggtggacgatgaagtatatatcttttacgttgatataaatactacgacaagtatgtcaatttttcatcgccagactggctttcaagtattttggtgaatgtgttttaggcatgcggaacgttggcgacgaaaatgagttcaaggtattgtcatatagatatagactacaattcagagttcatacacaatgtgagagctagcagaaagaggcttagatggcctgcttgtgggcagaggccttggcgtcagacgaggactcgtcggccttgtctccaagggcgtcaataccggcattgattcgggttccaactccggcgttactaatgaatgagaaaaagtgaacagaagagtcagaatggacgttcgcgtgaatattgaacggagctgtgctggtggagatgggaaaaaagatacttacgagtccttggcaacctccttgttggcctccttggaagtggtggcggtggcagagttgacggtctcggcgacgtagttggcggcgttggtgacagaggtctatagaaagagagtagataaaaggtaaacacacgaccaacctacacaaggaggctgaaaggatggataggtaggtggatgaagaagggatccaacgaatgagataggatggagagaagaacgaaccttgatggactccattgtgaaagattagtgtttgtttggggtggttggtttggttgagagtagagtgaagagtgagaaatgctttgtgtgtgagagggaagaagaagcgaaccccaatgtcatccagccggccttcttatatagcagacgaaggaggaaaaaacccctgtcaatgttcaacgtgtcccaccgtgtcgtcacagctcagcccatctcgccggcatctctggtccgctcgttcgacagtcgagcccggtcaggaacaaggcacaaggcacagacgccgtcatcatatcgatcgctcatctaagttggacgacgtcatgtgatgagctgtgacgagatgtgacgtcacatctccgcagttcgcggaacgcatatacctcgagcgcgctcgctcacgtacatacgcgtacaggtacacgtacacacacccgcatacgaggcgcttccctcaccattgactagatttctctctcaaccaaacagaaagcgctcacagtctagaaccatcgagaagctggcccaactgaagataaacatccatggccatatcgttgcctagaacacctaaaccctaactacggatatagactttcacagtcttgctttcatcatttcgttcgttttagcaatcgatacaagcgacaacaaatttaatatatctcgccaacttttctctccctgtttcttgaaccagatacttcttcacgctgattactttctcttgtgttggatggaaggtcaagaccggtcagtgcgtcagggtctgtaaacgatgtgtgttcgttctgatgcatgatctctttctcttgagcttccaaacgatcccatctctatgtatgtttttgacgagacaacaaggaccacagacctattagtgtatgtaacaaggcataagaaagaaactctaaccgacctgatcacacatgcaaatgaccgttctgattggagggaaaagtcaatggataaacagaagacacaaaaaacacttgtgtttagagtcgttgtagatgcaactccatgtagatgtttcatcacgtaccctcctcggacgcccgggtgtaactcaacagagtctgactctgcgtagttaggtagggtaacatgctggatcatgcatccacaactaacagacgtttccacaccatcaaaccatttttagtcagtgtcacacatttacatatataggcgggatacacgccaaaacgagggcaaggaagaggacctacgaagcaatgttcacgttgtgcttatataacgtcgcgcactttacttctccttccggcccaccgggcgtggtctcgttgaagatgacttcaaacactagctcagatgaaaaggcaagcgaggtctttgtacctggaagagtcgttggtcggatcgagtcctcatccaactgacatgatgagtgttttgaaggtacgaaatgtccgcgccagcagctcttgtctcagtactagcttgctcttccctcctaacgcaaccagcaagaaagagaaaagaacgcgcaccagtttcccaacctttctccatctccattctccaccttgcagagacttcccctccaggagcgtcgtcttatccttccttgccttctgggcaaaccctttgttcgagtacccatccgccggtccatccagacagataagctttcttggactacgggcatgttcaactcgtccttgtcttcgagttgacttgatgacgacgtgttggaagaggtagcatctgatggcgaatatcgtcatgatagaaggtactccaaacagagtgaatgacagaccaagcggactagcaacgataaactcctgatagtcccgaaacaagatgaaaagagcaccagacaaaacgtcagtcagaaacggttctcatcatcaagtcgacgggttgcagacagacattcgatgtcatccgtagagagtataatccaaaagttggagatagtccctcgttagctatcgtcagttgaagagctagagtgaccggatttcaaacccacatcagctctactaatgtcatccatacgagcgccaaaggaaaaggaagagcatcaaaaggaagaacaaacctccctcttctcgaacagggttcgaaaccacatagatcgagcagtcatcctggagatcagcagaaagcaatccgccagtgccgaggacagtcccggtaacggtccatttaacctttccgaacggtgatttttcataagtcgggacgtccggtgggataatcatactgaattcatatctacgtgaatgaaacagtcaggatgttcaatgaaaagaagaagcgattgcccgtcgaacaaatgatgagatcacgtacgtgttgatcccttgctccagctgcacttccgtccccggcccaaacttccgcttagcttcttcgtcttcctcaacccaaacctccctcttccaaacagattcatcctcccagagtccctcactagaaatccagatgcgatgtcttgcttcaactttgactcttattcctttgacttttcgcctgacggggctaatgacatgcagtactccatgaactcttccctgggtcccgggcttgttgtcttccgatcctccaggtaaagaaagatcttctagtgcatgagaccacgtgcgtcctccaggttgaacaaacacgccacgggacgagagcacaagagttgctttgggcttagaaacgttgtaggactgggtttctggacggaggtgatgatgaaggtgagggtagtgagaaggaattcgaaccataatgtttgggacaatagactccgatggagaagaagcctgctcatatgttggaggagaaacgctgaaggaagacatcgttcgtgccacggcctggaaggactttggaaagctcttaagcgaaggacgcaagaaatgcggatgtgtatgattgtgtagataggatcagaccagaccggcacaaataaacatttttaatagagtcttgatcctgttgagggttatgcgctagacatgtgatcggtcagctccgctcaagcccaagcgtcaatcgtgttttcgcagcaaaaaaaaaaaagggaaatcgggcaaaaaaacatgctcataaacgacatggatagtaactcaaggcgcagaactagtcatagcgaagcagtcaataaaacaaacataaatacaaatgacagggataagaggtgaagagtccgcgtgaaagagagaatatagaaagggcaggtacataagtgtttacgaaagaagagagataacaagagaacggaaaagatccaagacggcacaaggccctagcaactgggaaggaaagatagaccttctggctggacgaggcgatctgagacctaaagaacgaaggaaaacaaagacgggggaactataatggcagaagaagagacaacaacgatgggtgaataaagatgtagacttcctgtgaacgggggggaatggtacttacgaaagaaaggagggagggaaggaaggtgtcacactcaacacataacaaacgaaaagaaacctcaagagcaatcacgttctcgacacgtcccactaaaggatgaagagatcggagagagatgaaaggttggttttcgctggccgagagtgaacgggattgaaaagttgggctaagactaaaaggcaagacgcaggggaacgctcgatcaagtctcgccttgtcaagcattcgaaatttaggcagaagaaacaccccgagcggatcgtttcttggcctttgaagctgccattgggtcgaccatgacactagtcggccctttcacgtacttgctgacaagaggcccctcagctgcatggtgaaaagagtagacggaaacaggatcagtgatgggatattattagtattttaaaaagggaagaaagcaatcacatacaatgaatgccctgtcgatgtcggtcaagatcatgagctcgggagaacgatcgcccacaacctttgtgactgcaagcgaaaggcttgggtcggctggggtcgtgagtcaacatgtgagactatgttgtgaaagaatgaaacaaacagaggtaaatatgcgattggttatcaaggtctgaaacttaaaacactaaccttcaaattgaatgctctcgcaaaacctcgcttgcagatgatgcagacgtgtcgtttcttggggtcttgggcagtgacttcgatattccaggggatcatttcgcgaacaactcgggtggcactgttcttggtgttgtccgaaacactcggagacaggacggcgtaaggcctaaaatgcatcaaaaacaagaaggtgaaaagtcagccagcaataaggaaaattagatgaggaaatgaaaacgtacgtagaagcagacgtggcaggggatccaccatcggcaccgagaggttcgatgggtagatggtaggtttgagggtatgaagcccaggcttcccgcacatcaggagcaatcgcactggcgagcagcgaggatgacggctggacggtattttccattccaaagacgtccaacccgtacaagtcaaggtcgttgcactcataggtaagaccagagaacgacttaatgtccaagtcagtcaatgggtaagtggtctgaaggcccatctgagacataagaggcgagccgatgaaggaggatgccgaggaagacgaagcagaagaaccatgatcgtccatcaaaacaggtggtgacgcataggcagactgggccaagaccgagttggatgtaggactgaaagcagagccagagccgtcggattgaatggaatgcttccttgaaccaatgacctgagagccagaaggccaggattggagtggtgcaccctgccagaggtgttgctgcggaggctgggcaacaaatgccgaagaaactccagggaacgtatcttgaccaagaccatttccgttggaagttcgattcaacaatgcctcaatcgctttggcctggatcataacaatctcatcggactggttttgaagggagccgatagatgtcaacaaggttgaatcttcactaacagcggcgaccgagcgatagtactgcgcagttcggttggtttcatacacgatcgatgcctgcccgttgagataagcggcgatggcggcaacagcctgggcagtcgaaggaggtccaaacggaggggactgaatctctggtcgagagtattgttgagattgtgccataagctgggactggattggagacgtgtactggggttgagcaaatagagggccagatgaattctgcgagggacactgggaggcttgctgcaggtacaactgctcgttataagtgttgacggacgccattgtattggaggtctttgaggctctttctgtgaatagttttgggatttggatggatgggagaggaacaaatccaaagaagagaaaagactgatgtttaagaagaaaagagaagaattagggaaaagggatcaagaacaagaaaggacgatgtgtgacccgagtgatacatatagccaaaaaattctaaagttaggtggagtgaaaaccggggtgatctatatagagcgcgaattcagagtctcggccttaaagagaaacaaataaggaaggaaagacaatcaaacagacacaggttgtatgccggtcggtaaatatacacgttcgatcggtcttcaaaggcgatacttggcggggtctgtttgttctgcgaaaatcatccaactgttgacgctacgtcgacgaagataatataccgaccggccgtgagaagaaagttggatcattatatccctcaacgtgaagcggccgatagactccgagtcacggtgtttgcaaatctctcaatacaccggctggttaaggaaaagagcgaccaagattagaaacgtatacagattgacaaggaacttgtggtcctgacgtgattatgtatctgattgtcaacggctcagttttaatggtgagtggcaatgtcgaaacataaaggagaatatcactgctactgcgcagggaattgattaacgaaagtgaaggaatgcaatgcagatccaatataactatgcataacaacgagaaaagaggacggaataaactagaggattttcgatcaacagctgtatgatacctagatagagtggcaaacagatgacagtgatgagaatttagcctgtagaaaaaaaagaaaagaaaaaaaaagtgatcagctctgatataaatcagccttgatggttcatcaacacccaaacggtaaatgttgttatgctttgggctgtgagtctatacatgttgcccatataccccttctttgtgctgacatgtaaacgtccggacactgaatcagtgaaggtttggcttgttctattgactactacgacgggtgtgatgacgtttgcggct

SEQ ID NO: 2496 - DNA, 1594 bp, Xanthophyllomyces dendrorhous
gaaagaaagaaagaaagaaagaaagaaagaaagaaagaagagaaaatcacagccagccgaccagagagcgaacgagcgaacgagccagaaaagccagcttgagaagacaaagaaggaaggaggcaaacgaagaaaggaggcaaacaaacgaaggaggacgacgaaggaagaagagctaggtcgatatgtcatgtagagaaggacgatagtatacaacttggccacagtgctagttcacatttttcagatatcaacgaaaggaaaggaaaggaaaggagaagatagagagagcgcagggtagacgcccaaacagacgcccagacagacgcctcgattggaggccagtcaggaggccaaacaagaggccagacaagaggctagccaggaaacaggtggagaacaaagaaggcagcggggaagcaagacagaaggacagaaggcggccaccctagttgttccaccacctggcaaaccagttcgagttcttgttggccagagcctccaaagcctcgttctcggcctcgttctcgtcgatctcccggatcccagacaccaggtcgacctcggccggcgggatgatcttggtcttgtacacgagcttgtagccaaagtaggcgatcgcaaacacaggcagaccgatgtagttcgtcacgaacgagatcggctggaacttggggaagaacgagtcgtagcccttgaagatgacgatgaagccggtgaagaagagcgcgatccacgcgccgtacggttggaacggtgccttgtacggcaggtcgtcccgggacatgccctgggcggcgagcgccttcatgaaccggatgtgcgaccacaggatgcacatccacgtgagcgcaccaaacatcgagatgagcgacacaaagtacttgaacaccgtcagcgcagatgtcgccaccgagcagtacgacagtccacagaacgccgtgcagagcagaagcgcgttgaacgggatcccccgtcggctgaccttggcaaagatgctgggcgcctggccctcgacggcaagcgcgaagagcgtccgggagccgatgtagagatcagagttcgcagcagagaacacgaagagcaggatcgcagcgttgatgatcgacggaagcgtcttgatccccgagatcgtgatcgcgacgacaaacggcgatgcgttcgcgttcgccgacgacttgatcgcacccgccagcagcttgctgttcgacggcacaagcagaccgaccaccgtgatccctccgatgtagaacacaaggatccgccagaacgtccgccggatcgccttcggaatctcccgtcgcgggttcttgctctctccgaccgtcacaccgacaagctcggtaccgatcagcgcaaagagcgcattcgggaacgcatagaagatcccgaggaacacaccggccggagtgttgtatccgtagtgggagaacggcccgggttccttccagtatcggaaaccgatccggtcgtgcgacggccctccgccgagatcgaggacgataccgaggatgatcaggccggtgagcacggtgaccttgatggcactcatccagaactcgaactcgctgtgtggggtgtgaggggtgtgggg

SEQ ID NO: 2497 - DNA, 2438 bp, Xanthophyllomyces dendrorhous
  misc_feature (401)..(410): n is a, c, g, or t
  misc_feature (2378)..(2387): n is a, c, g, or t
gtgaggggtgtgaggtgcgtcatgcacaggcagaaacgaaaagatacagcccggtcagccagccagtcgagcgcatgcctccctccgaacagagtgaaaagcagacaggacgaacccaaagacggcaacgccgagcatgttcagcaggaagatcgccgcgatcatgatcgtacaccagatggcaggcgagtactttttgtggtcccagtactggatgacgacgactccggcactgaaggagtgaacgcaccaagacgacgcaaacacagcgcacacacacagtgcaaacacagcgcaagtgaagaagcacaaacacaacgcaaatgaagtacgaacacagtacagaacaggacatcagtcacgagaggccggtgggtcgacccgaaaagacaagcgatggnnnnnnnnnncatgcacaggcagaaacgaaaagatacagcccggtcagccagccagtcgagcgcatgcctccctccgaacagagtgaaaagcagacaggacgaacccaaagacggcaacgccgagcatgttcagcaggaagatcgccgcgatcatgatcgtacaccagatggcaggcgagtactttttgtggtcccagtactggatgacgacgactccggcactgaaggagtgaacgcaccaagacgacgcaaacacagcgcacacacacagtgcaaacacagcgcaagtgaagaagcacaaacacaacgcaaatgaagtacgaacacagtacagaacaggacatcagtcacgagaggccggtgggtcgacccgaaaagacaagcgatggctacgtacgtgatgttgttgggcgtgacgatgaggtacttgaacaggtagttgtatccgagagagaagccaagctgggcacaggcacacacacaggcacaggcacaggtacaggcacacagatgcgttcgtcagtcgacacatcagaccggtccgatcgacatcaggcacactcacagcagggtcaaagaaccgggaagagtatccagcaaagccttgcttgtgcggcaagaacgtcgcctgctctcccagactgatcatcaccatgtagcagacaagacccatgatcgagtagcccatctgagcgacagtcagagaagcacgacaaaacaccagacgcaacaccagacgaaacaggaggatgagcatgactggaaggcgatcacagcagaagacgagccaacagcagaggagcagagctcggtgcagtagaacccagcagaacacgtaccagcagcccgacaggtcccgactttgacagagcagaaccagaaccgatgatcagacccgttccgacagcctagaagcaaccgacaggatgcagagagagcacaagcgccaaggcgttagcagatggcacgcaaagacagagcacaaccgccgtcacaggacgacacaagatggaagagacctactcctccgatggcaatcatactgatctggatgggtcgcaaggcgcgcgcagcagatctcggtcagaacgacagacacagtccgcgaagagagcgacaagacaaacggagaaaagggaaggaaacaggaaaaagaagaaggaaaaaaaaagaagaaaaaagggaaaagaaaagaaggaagaacaaaagagaagcatggacggtacggacatgtctggccttgagccctcggtgggtcgtcgtgttttcgatctggccgtacttgtcgtcgacgtcttctgcagcaggcacggtcgcatggaaggcgcctccgtccttctcaaagtctttcgatccgtactcctcgtctacgcggtcgtccatcgtgggaagagagcaagagagaggggtgaggggtgagggtgagagtgagggtgagggtgagggtgagggtaagagtggtagaggacacaggagtccagcgagtccagcgagtccagcaagaaagaagaaaaaaaggcgcggacgggtggagaggacacgagcgcaagagagaggaaagagagagaagaaggatggaaaggatggggaagaagaaagtcgaaaggggaaagccggacggatggcgacgattcaagtagtcctcgcgtgcttcccatttttctgtccttatccgtttgcccgctctctttgtcgtcttgtctctcggacgctcagcctgtcgacctatctctgggacgatgtcgcctgtggcctgtgaccttggtgtggccttggtgtggcacggtggggacggtcagtccagacggggctcatcgatctgtttgaaggaggacagcgcaaattggctatcgtccatccttatcagctgatggctatctctgccgccttctgcctcgcgagatctgggtccgattcggggtgggtgtgcctgtgtgtgcctgtgtgtgcctgtgtgtgcctgtggacgtgcctgtnnnnnnnnnngacgtgcctgtggacgtgcctgtggacgtgcctgtggacgtgcctgtggac

SEQ ID NO: 2498 - DNA, 406 bp, Xanthophyllomyces dendrorhous
tgtttgcatatcatataccatatactatacaccacatactatgcaccacatactatgcaccacatactatgcaccacaccacacgcatcgcaaagcagtccggtcctttcgttctctctgccgctcatcgcgcgtccgttgatgtagcctcactctatctgcgagacacctacactttctgcgagacactcactctctcccaagccagtcgttgtctctctagatggctgggtcgatctactatgaggagtctgtagctcgcccgcttgccttatacgccgctggtcatgtaccgtgcagactgtgccattctccttgtcttctcacagaagaggacatcatagagaggacacaacagagaagacacaacagaggggacgccgtaccgaagacgaagacgaagacg

SEQ ID NO: 2499 - DNA, 598 bp, Xanthophyllomyces dendrorhous
cgaagacgaagacgaagacgaagacgaagacgaagacgaagacgaagacgaagacgaagacgaagacgaagacgaagacgaagacgaagacgaagatgaacatgtacatgtgagcatgatagcacagagaacgactctcggcggacagaccgtccatacgtccgttacccgtgttcttgttcggtttcttgcgttcttgtccgcttgcgtacgttcttggttgttcgttctctggcccatctatatctggtcgtgttctgtcttgccgtccgatgaggagagcaagctcggtgggctgagcaaatttgacgagagcgcgagcttctgactgctggtcgcccagccttgccttctctccgagaggctgaacctgctggccatgccttggctagacgatcatatctgtctggtgtttctgtttctatcttgtctctatttttgtgcgagaaacatcagtgtgtgccgtgtgctacatgctgttcccttttccgtcgatgatctttccctcttgcccttctcgctcttctttcggctgtgctctcttctcattcgctgctccttctctcttattggtaaaacagacaagcttgagcttact

SEQ ID NO: 2500 - DNA, 38370 bp, Xanthophyllomyces dendrorhous
tgtgtgtgtgtgtgtgtgtgtgtgtgtgtgtgtgtgtccatgcacccgtactcatgcgtccgtgcgcctgtgtacccgtatgcttcccaatgctgacctgtgctgtcacactctgatctgttacatcccggtctgtcgcttggctgtgtccagtttgcgctgatggccggtgcccgagcgatcatcacttcatcctctgacgagaagcttgggcaggttgccgaggccgtcaagacgctcggagggagccgactggagacgatcaactacaagacgacgcccgagtgggacgaggaggtgctgaagaagacaggaaaccagggtgtcgcgcatgttcttgaggtcggaggacagggcacgatcgagaaggcgttctcgtgcctcaagcagggtggcgtggtgagctgtatcggctttttggccaagccgggggatatgcctccgaatgtcgctcttcttgcgctcgtcaagggtgcggtcttcaggggcttcctcgtcggctcgaggcgacagtttgagcagatgtgcgatgcgatctcgctgcacaagatgcggccgatcgtgggcaaggtgtttgagtacaaggatgcccgggcggcgtatgagttccaggctgggcagactgggtttgtaggtaaggttgtgatcaaggtcagcaactagctggctgggatggaatgggaaggcctgtatctgaagatttgccaacgtgtcaaaatgataacacgtcgatatgtcaatatgccaatatgttagtaggtcaatatgttttcatgtaactataacttttttgtattcatgaaggatatgagtttcgagcagaagcttggaaatactgtataaaacttgaagagacgtgctcataccttgcaagaagtcttactccttctcattttctgtcttcgccctcttcacagcgtggccttgatgacaaccaaatatggaaggaactgagattttttcctttttttttgctctcactcagctcaaccaatattttccttgaaaggacaagtcgttttgacatgactatcgtgtcatgtctttctgctcagatgacgcgtcgctgtgtatagaggtaaagaacttagggttaattcaagatttgggtctatgcatctaatactacattgctgttcaacatcctgttggccgatatgccaggatcttatgtactatgtagcaaaagcctctgaatagaaggataacaaacaagccaactggctgttgaaggtcagagagaaatctctcacaggcccaaggaaacagacttacccaagtataattgaccagggggaaacatgaacttgagatagggatcattccatgagtaactttgaggccaataattttacatccgaagctatattttgcatccagatgatctgcgtatgtaaccataagcacattggttacgtttcatttttccgatcgttcccccgatatgagttttggccatcgactttttcctggctcaacgccaacttggctctgttcagacccgccagatcccttgattccctgcgttttatgggagaaagtgctgctaaccctgggcaaaggtcggatcattcaccggcctcgtactctgcctgtatgtcctggggctgtccgttagggaagctttcctgatacctttctcttcttttccattttgtttgtcaactgtctttcgttcccttctctgctcacaaccattgcaaacacatatacgcccatcaaggaacagcacttcttcctcttctctgctcaagaatccattctgctttgattgaccactacagttctaggctggcatttcctctatatttccaccaacgcccaagagtcttcataagagaaccttgtcctgacgttcgttgttccgatggaaggcgctaactgtatgtcgaattggctccacacctgcacgcaacaatctatctttctccatctgcccttttattgatatgaacccaatccctccccttcttgtctcgttgtttttcgttacgaagcgattcgaggttcggctctcgtctcttctaaatctgttccgccccagagttctcatccgatcccagcccatcgcattcattcgagttctcaacacccgaaatcagggtcggtctcctcgaccgattccggtaaatcaacgtcttcgtctcactcgggtgaaactagcagtggcagcagtccgaccgatacctctctctcaaccgtctcttcgtcttcttccttggacaaaaaggccaattctacaggcaaactatcgaacagtctgccgaatcatgggcctgtcaagtctttgccatcaaacaatcttggccagcccactgttttgaccagatcatcctctagtgttggttctgggtctcgtaagtttattctgacagagaaatcttttaaacgaatgcttagtcgttatattcatcgccgtgcttccgttcctttctgtccattcacaacatcagaaaatacacaccgtcccaattctctcctccatcggcccaaacgatcggcccagcctacccccattccaccgtctctccgatcgtcccatctgctcaagtcggagtcatctcccttctttgctaggtcaaaccctgatgcatgcccccgccattcatcttctcaatccagttccagccacggtcactatactcggggggcaggaacgaccccttcgcctcctcggaatgaaggttcgacggatgacaagaagaacacgtgggccaacttggtgttgaacgtccagatgtccagtcggattagaggcagagaccagataaagataagcagcagttctagtggatccggtcagagtcttagtgaagaaagcctcgtcataggttaactgtcaaggttgtctgtcttggtccttctctccttgtttgctcacaattctttattcccttctgactagtattactccgtacattttcttggctatcaatcaaacaatctctgttcttttttcacgtcctcatctcttctacttattcaagcagaacctgtcctttgcatattcgtatccttcttcgatagggcttgtctccatcttgttggacattttccttctccaatttcatatctgcttcttttctttcaccattttctttctctttttcagttttgggcgttttctcttttgggttttgatgcttcttccatcctttcgtttttggattctcgcttgggatatcactttttgggttgtcattgtttttattttgttttttctttttgttctagtccattgtttagtttgttcacacctgttgtacacgaatgaacatttggagtacctggcttcttgttcggtccgagacgggcatttgaagtccgtatgattctgtaaatattaaagtttaaggtgactgactggctggctggctggttagctatctggactaccgaagatgattcattcaggatatggcatatgtagattatgtggatggaatctgaggtcttgaagaacatcacgattctgtagaagaaggggttcgtcttttctgacatctttggagcaagtatgaggatcagcttaaggaaagccgattttcatccgaaaatcgactgcaaaacaagtgagttaatagcatcaagggccaggttggtacgactcgtaaagagtacagaagtactttgagattctgtatatacgcttacgagtgcgtcaaagtcggttctttcacctcattcatcggtatcgactattgatcagacatcgtttgccctacttagatgacaggcaaagtgtgactagctatctgactgatcaatacagcaacttcgtacaatagagttgaaaagaaggaagtctgaagacggggagggattacactatgaactgtagactataagacaaagacaaagatattcaaatcaagattagtagatacatataaagaaggatcaagacgataatctgcttctttacgggaaaaaagaaaaaggaaaaactataaatatatgtaatttggtatacataagtataaaaagagtgtagaagaatccgataaggatcaaaggtatattagtggacaggataggtaagccgagagatgagaactaagactaaatctacaagaaaatagcaagggagttgcatagacgatacatatgttgcatatttggcggacgcaatcagacacaggcacattcaaaccccacttaagacaccttcttcagtggtctgggaagctgaaagaacgaggctcctctgacctagatctcgtcctcgacaaatacagaggtgtatacatcagactgtccaactccggcgaacaaattggggagcacgacttagacgaacagggtgagttgccgcaaccggaagatggcgaacaaggacgaggtagaataagatcatcccccaaacgccttctgtgccggcctactgaaccatagatgagcgctggtaccaaaggaggcgaaaggcaccgccgatgaaatggagactgcgcagacgtaataagcggggaggtcttgagcctgtcaggcactggagctgcctcgggaacgttgtaaaaaaatgaattgatggccagaggagagttctgggacgaccgagtccggacttttggtcgcgtttgagaaggggagggttcaggagagaatgaaggtgaagccgaagatgtagtaagcgaagggggaggaggatatgaggaagaggaggaatgtctttgcggtctgtgtgccttggagcgttgaaacattctagaagaaaatgaaggaggcatgacaggaagtgcaatgtgcatttccactttctgtttccgagttcgaccagacaatgggggaggagtagactgaacagtatcggtggtcaggacatctatcggctgcaagaagctaagacctacaagggagggcaaccgggtgagaagatgaggacatgccagagaaagaaaggaaggcaattggaaagagtggaaactgctgtcagagaaccaccactaacctagggtattgacctcgcttgactgttctccaacactattcgaaaggggagtgagttcttctctcataaggaaggcaggttctgggatagccgtcgagaacgaggaataaagtattcgtgtagctgatagcttgaagagtttataacggaactgcttcgagaaaaaacgagaatttggtaaggatggatgtggagagtaaacaagccagggacggattgtaagagcatgtcaaagtagacgtgagtgtattggatacgagctatagcacagcagtacatagcgacagagaaaggggcttgatccggatgctgattatcgagatcgagcagaacagagcaacgaggaacagtccctggtggtgcgagcttacacaggcaacagacaggaacagttcgagttcagcataaggaacagcaaaggcacatatccgagttgggtcaactttgtaaatctccagtcgctatatcagtgtccatgcccacgcttgtagcgatcagtttaggtacaccggtgcagtctgacaaggtctctcaaccgtggtcagtgttgttgaaagaagacgcctacacagagtgatccagtcagccattgatataccagcccagaaggagatagctcgaatgatgcaaagatggtcggttaaatcagagtagagagagcgtaggtaaaaactgggaccccattaagttgtctatgcattttggcactattgttagggttagtcaataaaaggttgatggtgatgtcaccgcgagtctcatgcaaaccgtcgacacatgatcatcgccctcgtcatcacattgcatctctgacaatgccagcgaacatcctcgagccaatctttgtataagaacctgttcagatctgttttggaacttcttccctctcttttctccactcaaacacccatcttgctttacacacaaaccttacctaccttttcaacaacaaatcacacctaagcttacatcatggagtccatcaaggtttgtctgatcttgaactttatcctctcttcgggtccccttcctttccatcactccagattggtctcgtttctgacctttgttttttaaatcacttcagacctcgatttccaacgccgccaactacgcttctgagactgtcaaccaggccactagcgccacctccaaggaggccaacaaggaggttgccaaggactcgtgagttttcgatcctgcacaccaatcttgattcgggtgggcatatactcacacaccattctcatatatcttgatctaacagcaatgccggagttggaacccgaatcaacgccggaattgatgctcttggagacaagggtttgtcctttgctaatctcaagtgaatggtgcagtcactcttttgtactcacttctctgattttcgtcacagccgacgagacttcgtctgatgccaagtccaaggcctacaagcagaacatctaagttatttagatagtcgtccatatttttgcctagttttttttaaactatatccatgccatttgattcctttggattcccatttatcacatctgagatgttattataagcaaactttctggttctgatggcctcatactctggaagctaacaaatgcttttgtgaaagaaaaagggtctatattactgtgatggttacgtaatcaacattgatctctgatagccggttagccgagatgtcttcgaagacgaagcatcgagtactctgcctgaagctatattcgacacactacatcgttcaatgtctgcatcagaggtccctaactttacgcctgctggtcagccagaaatccgtacgtagacttgttaaaatggattcagttctgtccatgatctatcacagctgatcggtctcacatagtccgagcctatcaaagagatcaagcccagatatctcaactctccattcttatccaagataccttccgagccttattcggtagattgtctctatttatgtgaagtcactggcatttagcatgatcattgacatctagatgacaactcaggatctagagacctgctcattcatgagggcatcctcggcgccctttcctctctgatttattatagtctcacattcgggataggttcgtagtcgccagcgtcttgatgcctcgaatacatgtcaaattaattggaatgatgatattataactggaaattggcatcgatcgatcggacgtaatctaggcactcgaacgataggcgaagagtataccgatatactacccttcgcattgacaactcgtcgactaccctctcgaactgtatgttttcttggatcttctcggctcagagccggctacttgactaacgcttaccaagctcttgactttgctctgccgttacggatgcctacgaatcttatacagaggcgcctgctaactctgtttttgatactattgactcctcctttacttctgcgtctcacaaaacgtctttgcatacgttatgctcgactcgatcgagacctggaagtaggacgaagaacagaaacggagacgcgtgaagacagagtgggccgatggatagtgaaccaattggaaagaggagagacttggatctcgttgctaggagaagttcatttggcttcattcttcttcggtggtagatttttcgaatttggcaaaaggatgatgggaattggatatgtacgtgcatctgttcaccttttcctctcttctgaccaatcttcatagtatggagctccaagtttacctgatatcttctctctgctctatcgtctcacggataaatagatatctactctaccgcctctacaagatccgtcccagagaccaacgtattcaatactgggtatcctcctccttctccccctcttgaaacgcttgaagcatcttcttcctttatcgtcagattgccgctcatcctcacacgatcgatctgatcataaaatcgactccaagttctaccttccggggggtcaatctattctacaggagaataattcaataggtgtttcggaagaccatgatgaagatatttctgaaaaccatgcggccgaggtagaagaggaaaatgatgaagacaaggaagctaggaaatgtacgttgtgtttggagagctggaaagcgccttgtgtggttgaatgtggacatgtattttgctgggattgtctcggagagtggaggagagaaaaagtttgtctcttcacgtgctatcttcctttcctcatattctctcctttcgcttttgacactgactcgagacgggtggttgatttccatgattatcgtctattcacctgctggtgatgtctgatggactcaggcggagtgtccactttgcagacaaccattaaatctttcgagattgttacctctgtataatatatgatcccacgcagtctctctgatgtcgatgagtctacagtcaagccagcctacagctctctcaactcagagccaacgttggtcgaacacacgcgtttcgaccgttcgttcatacttacgtaatcgagaccatgaccaaaccatctgcaaactttcaaccctcatccatttttgttttcctttcatctttccatctaccctaaaaccttcatgtgcggtcctggatcatcttgcacaattaaacacatccaaccgaaacctactgctatgtctactgctgctgctaaagctgttgagaaggcccaggccaagtctgatggttcgtttccgtgtctctttctatcgtatcattgtcatcgttattcctgatgcaggtagaggcaatctgcttgatggacggaaaaaggatgggaaagtaaattatgagctggaaaacaagaacacaagctgacactacatcttgtgatgaatatagcctggctcgagaagaacgaggaggctgttaaatcacttcgatcccgtatgtcttattctcttttgttcgtcttcgcttcgcgtccgaccttggccatctgacaagtttcgttcatcaaccggcttgatcaccttacttattcttaaaagagcatcttgctgttgaggctgagcttgaggctaagtcgattgagctctttgctgccttctacgccaagcgacgagccgagactgagaagatcccttccttctggttgcgagccatggtcaaccacccaacttgtaagttagcattcctccttgatgcttgccggtgtctcatcaagaaggaaagtcaaagaagctcatttagaccttctttggttggaattttgattagtggccgtcttccttcagggagctggagatcaggaggccttgacctacctaactgacatcacccttgtcagaggaggagacaagaaggatttgagggagtacgacttaatctttgtatgtgatattctcgtcaaaccagtagattcccgcatgcgattagaccacgtcggttgaacacatctcatttatgctttgcttttctctgatcagactttcgctgagaatccttactttactgaaagtaagatctcatctctattttgattcgtctgcgctagtatccagatgagaagcgagtccgcaagtgtctcatgaaaatgctaatgtttttttgggtgtgtgtgtagagacgttgaccaagtcttacaccgtcaagaaggaagaggataccgaggacgaggaggactatgagctcactggatccgttagtctgctttacgttaagttcatcgcatatgtccactatagtaagctgatagacgtttcatatcccgtcgtgccttctttcctacttctttcgaacgacgatgaatcaggtatccactatctcatggaaggacgacgcacacaacttggttaaggccaaccctcagaagattgatgaggaggaggacaacatggagcccggaagcttcttcaacttctttgtcaaggaggaggaccagttcgctgtcggctcgcaccttagggacgagattctgcccaagtgagtctaggattcttcaacaagaacaaggaaccaagagaagaagatcttttactgaaacctggcacgtgtttgttggcaacactcttgctcgatcttagtgcgttggagttctttgctggtctcattgacgactcggacgatgagtttgatggtgaccttgatgatgagtctgacgaagagatcgacttggacccgagacccaagaagaagtccaaggcttacgcgcctctataaggacgaagtgaattatatgtgctttcactgtatgattgcaaatgagtcttcctgatacgtcaaagcaaatacaacaacatgcaacaaattgatacaaaagatatcacagacggatgcgtacaatgtaggtgtatgtgtccgtccgtttgcctctctatgcggaaaaatgtttcactctattatgctgcgcacctcgtattttgacctcggctcacttaccccaacaatcaccttcccttccctctctttctttctattgtatcctgccttttcttttctcttctttccttggttcctttccagtcttttcccacatctgtgaccgtttttgcgtccgcaccaaacgccaatctatacccaatcatctagacaaatgtccaaaggcatcgtctacggccttcacgcgttcgccgcagagaacgaggacgaggtgtcctttttacccggagagatcatccacgtgctcgagaaagacgacctgtacggagatggttggtggcaggtatgtgacgttttctttcctttggatatgcttgctcctttctctcttgtttcgtgtgtcactgggaaggttcccggctctttgtgatccactcctctggagcaagaaccaggatgaatgtctagatcttgggctttctaaacaaacacgtccatctccggccacgcaagactgattctgtgttgactcaacatttgatactcatcagggtcgaaatgctgccggacacgaaggcctatttcctgtagcatacacttctccggaaccaccttccactccacttcctaatcctgctgctacttctgcagctgtccctgctacctcatccgaaaatggaatagaggcacctacatctgttcggcgacgatcttccgcgtcggtgcttaccatccccaaagccactcttgatgcaccctacgaacaagcttcaaacaagattccttcgccaaacggttctcttctctcggtaaataaagatcagcagggagatgctaccccagtccaacgttcagaagctcaaaggaccagtcaaccgatgaaagatacgatgactgatcttcaggcagcaattgattccctcgaaggtggattgagaaccgatgcgggtaagagagaaaattctgcgtttccggaactaggagcgaacgatcatcgatctatcagatcatctatcgtatctggcgaggatggctctctatatggggagtctgttcacgaagaggacagggaccaagctgccgaaggtgaggtgatggacgaggctggatggagtgcgatgacgaggaagagattggctgagaaggcggcgagtgagaaccaacgaagattggctagggaggaagaaaaggaagcgcagagaagagaggccgagatgaacgagagctcagactggacgacaggagtgcctccggatatggtctattcggattccgacagcgaggatgacgaacaagatcaagaatccgatcacgctccttctttctctcccgttgcgagttccattccggaaccaatcgttaccgcgcaaacaactcctaccacggctcaacctccctcgactttcatcgcacctatcgctggcttggctgcacctctagcattgtataatgaaaactcttacccgtctcccaagcagctagagtcggttcctgctcttccagatattgctacatctttcccgaccgatcctgaacctctttcagccactcctagagcgccggcctctgtagtcactcctgtgattcagcaaacgggtcgggttccatctccagtttctcagggaggtacacccagaagcgttgcacaggccctcacgcctggtgaaaaatcaaccgccgcgcaggacatggcggcgactcaaccatcttcccttgcgattgagccttcaccgttcagaacagttattcctgatccagtcagcccgaactcctcttctgtagaggaaggatttcagggtgcctccaaactgagcgacacacaggcgcctccttcatctgctgtccgatccacattgccccttcagcagcctcaacggtctcctgccgctgtccaaagtgtgttgcctctttctccttcaccacaacagcagcagcagcagcagcagccaccatcagctttctctacaccagttatcacgaatagagcctcttcggtgtcgtcccaagaagcatcgatcgctacgttctcgcctgatacttcggtctatacatctgagcctggactcagcaaacgagctagctcaattgcaatgggagctgggaaggctgggatgcagggagacccgatggattggtcagtagacgacgtggttgattgggccaagagaagaggatttgatagcacagtttggaccaaattccaaggttcgtttaaagagaatgtcatgatgctggtagagtataaattttcgacaggaattgacttcaaatcctctttgtgtccctttaagaacatgaaatcacgggcgatgttctactcgagctggacctgaatttgctcaaagagatcgacatcatcgcttttggcaaacggatcaagcttgcttctgctatcgccgaacttcggcctaccgccggatctgtcactcaactcggaagctcgctcgatggcgccgctggaggcactccagcttctatccgatctgtagagcagagtccgtctcaacagcagatagcactcaataatccggcagcctcgtatacttccgtttcacagcaacagagccggagagcctcgaatgaagtgcatggtagctctggaccatcaagcgagtatttcagcttagacactccgcctgctcgatcgagagagtttgagaatacgaactctggtttggctggaacgactgcagtggcagtggcaggtaccggtgtggttgggcttggattggcagacgaaaaggttcgtcaagtacatctgatgcgtttcctgagggcctcaagctaaaataccatcttcctggtattttcattcctctgaatagactctgtccactggacggaccccgtcggcagcttctcccggcgctagtagtcctggttttgccttggcttccgcctttcaaccgactcgaattgctgaagagcctgaagttgtttctccaatcgaaaccgtacgtctggttgcattcatcacatacataccagcatgaatttatcttacttattcgtatggcttgttgtaaccaggtggtctctcctgtcgttcccacatccgctgagtccccgaagcccgccaatgtgtcgactgataaggtatctaccggctctggttctagagatagtggctctctacctgccagcccagctttgttgaataacaaaggttccttcaaccaccgacgagccaagcaaagcgtggatgagagcccgaaaggctcctttgttggaaatctactaggtaacaaccggactggaaggaagcctgccccaagagtgtcttcgtgagttacctccctaccttgtcaatacgattttgtttggaatcaaagacgaacttctgtgaatagcgttcttaccaatcggtttgttcggttgggtcatgagcagaggatctggctcttcacctaccatccaacaatccccttctgcgggtggtacgctttcctccttccgtcgatctaccagagatctcagtggcgggtccgccaatagaaaacgactctccacaatcgaaactggatctactactgtttcctccggatcgccaaccgaagcttcggctgctgctgcaccaagcgctactcagacctacggtcgggcactggatagagtccctaaggctgatttctctgggttcctgaaaaagaaaggcgagagatataactcttggaagatgagatactgcgttcttgttggacctcacttttactatctcaaatcggagaacgttagtcctctttgctgcttgcgtttctacgtctgtagtattcgaaaacaaagactgatttggtttggaaacttgcttgaccaatctacaggattcaaaattcaagggttatatcaacctccaaggatataaagtcattgccgatgagaacgcgaagcctggagaatatggtttccgaatcatccacgataaagagccgacccatctgttttcactgccggagcagatcgttgtccgagaatggatgaaggctctgatgaaagcgaccatcacgagggactactctggtaagtgaatttcatcagtaccagagaaagagcaggcttttaaggttttacttaatttgaatgatagcgccggtggtctcgagttgcaatattcctaccatggtgagatgttttttttgtctgtaccagtcaatcgtataatctctgtacgaaaaagcttacgaatacatctacttatctgccacagaccctgaaagaagctcaaacaatgagtcccgctcctcgaccgccttcgcctacaaccagaagcgcggctcagcaagcgagtcgccgaggaaatcctaaccagctgacggctcgagatgccagtgttttggtgagacaccagtacccttgtcatctgaccaactctgaatgaatgacttgctaaaatgattatcatgcttgcttcagatgggattgtcgcaagatggaaagagcgagactcagagacagagcatgcctccgtccttcagaatgccatcctccactctggccagtgctccaccaagaccttcgcgggagatgcgacgaccttctagtggggtcgtggcagctaatggtagccgaaccgccgctgctcccaataaaagcggagacgaaaacatcgactgggtgaacaggaatttgccgtcaggcgtatgtcttgtctttctttggtctttcttgcttaaagttaaaatgtttactaatcagtcgtgaattcttaaatttacagttccccccggtcgtttccaaccctgactctttccgaagtggtctcgctctgtaagtcttctctctgctgatacttttgtctttcttcgcttttcgttgaactcactttgaatgataatgtagtgtccgggtggttgagaacatcacgcatattccatctgagatcccggttgcgagctttgtggtcaaaaccaagcaggaacacgaagatgtgttgtaccgagcattcgattactttatcgacgctggtgtggatatggacggccaacatggttcgtcgtctccatctggcctcccttctcttggcctcatcaagctgacggtctggctcttcttttgctttcttccttttccttagtggacgacgtggtcgatggtaatgcagcaggaatcaaccgcctcatcgaccaaattcgagctagagccaatgtcctttaaaattaaggtgatcgctgagggagaaaagactccttctatcaacccatttttttgttcttttctcacacatatgtcctttcgttctctttttttgaagtgcatggcctgggttaattatctctctatccgtctttatccccttctaccctaataccctgcctttttcattatctgtttacctcgcccaacttactttaccttatatcattctcctccttccttttcccctcgatttcttcctttttttttaaaaattacatatgccttaaatttgcatcacagcttttgcccttttgggaagtcctcttaataaacccgctccttttctccttcttttaatcgcggtttttactactgcctccaatctcttctttctcttgtgaatatccacaagcttctgtcgctgtcttatcgaatgaatctctctctaggttggattggaccataggagcgttcatctcgtctttatgagcattagatcaatgcccagaaccggacgtcaagaaggcagtgagtgctggatcgggcaatgcggtaaacagtgaagtgaacgatataccaaacagacagagtcagcaatataagagattcatataggaagcatacaaagacaagacaaagatgacgcgtcgtgatgtatgccaagatggattctgtttataagaaaacttgaacgcttaggacccggacagaaagctctcatgcctgagggcaagctcggactctagtccggaccttgatcggcggcgtttactccgaacaccactcgggcatggacatcgagtcaccgacagaaatgtattaatcagccggccttacccacttggatctcaatgatcgttcgctttctccgttatttattccgtctccgcctccgttcgctcccttatgttctttgcttattgattaaattccgaaaacacatgatgagactcaaactgaacgatttctcgagataactcttcttataatacaatctagataaatacagacatgtgaatatacttttggtgatatcaaaggactaggaatacacagggttgatagagtaaagattcggatcgtatagatgacaagaaagaaaagctagctgaagcaggatcaggtttgccctgtgagaagtataaaacagcccggatgcgaagtagggcctaacgtcaggcagagatcggccagatgatcccttcttgtagaggcttggcttgatggtgaagcaaacgcctctaagggaggaaacgtttctaagatggttgtcttgactggcctcccgtaaaatttgccgcccgttatatctttttcgtttctggagccacgaaggaaaagagcctcttgaatgtcaagagaactctaatgttatggggagagggagagaggatactgattcggaccgatggaactaagcagggattctgtcgaaagctttggcgcgttcgaggaattcccaaggctcgaggtagagctcaaaagagagccagccaagaagttccgtctccattcggttgatctggttgagcgtccaggacgtccggtcgacaaagctcgagttgtggtaagagttatcggtcgacatctttgttgcaaggaggaaagccgagaagatcaggcggagcgaggtgtccttgatcgtcttggaatcggctaccaaggttgggtacttgagctgaagcttctcgatcagatgcatcgtatacaccagcacacagaatgggtgaggggtgagcgaagtccagtagtggaggtatcggacgatcgagccttcgtcttctgaagtgattgagttggggaacttgacttgatcgccgccaacgcaggtcaacttctggaggatcttaaacgcttgatctgttcgatgccaagaaaagaaagagaaagaagtcaatgcttgtactttaagacggccgtccgagacaaagcgacgaaagaaacacgtacaacaatcgttctcggttgtcctgatgttcatcaaaagatccattcggtctcggtcattcagatcgagatccagggactcttgactgggtgaaccataaggtgaggatgcggaggacgaggcttccgaggtgaacggagacaatggagagagggctgggttaggtaccgggctgactgccggcttgtccaccaggctgtatgccggaggaggtcccgatggagggattgtgagatcaaccggatagaagaaggacatgattgagcacgatgttgttgtcagagtaagatgtgtgagcgtgtgtgtataagtagagaactggggagaaagaaagaaggaaccgaaaggctaagacgccatgctttataaacatcttggcctgttcgaaagctgtcgtaaatgatgagtcggtcacttcggccaagacgagtccgagcttccaaacatgggcaggcggccggccggggtactggccgagcggggcgcacgaacaacaagccgagctttcccggccggcgcgacccagcacacgctgtaaaacatggcccgtctgagtcatcaacaggacttgccaatgtgcacctaacccggcacatacccacgcttgcacctgcattttcggctgccgagtttggtaagcgacttcggcgttggttgtctccgtgagcggccgccgtcagagcctctttaccactgcgaaaagctgtgatcaactctcattgcctctataccttcttcatatcgctttcttgttatcctcacaggtcctctcataggttctctcatggctgtgtttgtatacaatggggattttttaatctctgctttgttctgtgagaaagaaaatgaaccgaaccggatgaagatagggacacacacgcccgtttgattggtaagacccgcgctgacatatatctgtaccttgatgcatacgcatcccacgtacgtccggtcgcgtcagtgacacgtgaagttgccgtgggacaagtcatcggcccccgtctctgatcaacagacggagatcagcacaatgactcgattatatctcttcttctttctaatcttctctctggctcgagtttctgccctgcgtgcctgctgacttgacagaactgttacaaaccacacatttttcattaaccacttaccaatcaaaccaagatcggctctgtcagccagtagtaaccttggttatgaatacttcttggccttatttcccacaatgttatccagtcatcatctcgattacagcatcctctctcatcagcctgatcgtaatctacaagacagtacaagatgagctcaacaatggatcgaaatgacgtgttgaacagctccgttccgtaagaagagcaaagcacgtttctggtcggccggtcggatataaatcttacatgccgatgatgactctccatctgatgtatcaatctcatctgtgcggagtaccataactctggagaacggaacgggtctttccgatattcgacctttacccgaaggcaactaggtctgtagcgatctccttccgtttctctctttttcaagcaaaagccatcaaatttagacagatgcgcgtatttgtacatcgttcgagtctactcgatcttttctcgactcttcttttttagtatcccttcttgtttcttcttcccttctgttcaatacagtccggcttgtacaccgtttactggggagccatttgagctaggtcgatcggaacgagacaggacaaaaagggaattccgtcaatcgtcagctcttctattcgcttcgttgagttggaacaagacgaagaaaaaagtgatggctcaccagcattctgctcagcaaaccgggctccgactcgctcagaatgcttgaggaatttatccgagcagtgagccacacatgtgctctagtgtgttcatcaataggttttttaatcgattttaattatatatagaaacatttagcccagtatctgtcagttcatgaatcggcgaaaacaactgatacgagagagaagagagaaacaaacctccttgccggtaagggtcttgctggtgaaatcgttgacacacgacgagaaacatcgttcgaccaaaccggagtagagcttcatgaagtcttgcatctttagagaaaaagaaagacaagtatccatttaaaaaaacaaaagaaaaagaaaaagattgagaacaacaaataacaggatggttagagcgttcgactcattgaccaagactaatcggccacatacaagaccgaaaggtcctctcgatcaaaagagtcaaagcaaacagaaacggaatcaaggaaagaatggacaaacctgcttcttctcgatgatcttggtcatgtgggcctgctcggcagcgttgaacctgtagataaaaagagcaaaagtgacatagaacgaggaagtgagtcacttaggctcgcatgtgcaccagaagatctataagcacaagaagtgaagcttactgtgagaaatccatcttgtgtatatgtatgtatgcaaagtatgaggtggtcgtcgggtggtgtcaaacgtcgacagctcgaacaggagccgaagctagccgcgactagacggatcaactacaggatttgacaaagaagcactatagaaatgacttggaagataccaatgaaaatctctacaaaaccagcacagctctaggtcgtctgaagatttttttccctttgcccttcctctttctcataatttattctttgacgtaactttcccactctatcagccctctccctctagttgcccctctccttctcaccaacatacacacagtagactctacagcactcgtcaaataaactcatcatggctacccgtacgtgttctttgttagacctgtgatcatactctgaccttggtagtcgagcagagttaaggaacgttcaaaagagagaaaacagctcaactcataaacggcatttgaccgatactctattttctttccacgatttccttctttctccttgccctatcctccaggtgtccagttcgagaactcttccggttagtttgctttccttatagccagataattctgctcctcgaaagagtgctgacctcgcctatcggtcctgtcgacctttccttctgatctcgttagatgtcggagtgttcagcaagcttactaacgcgtgagttggttgacctcttcataactcaatcactctcttttcgtccatgcgtatcatctcactaacaacccgtctccgacttttcctgtgctatcttcagctactgtttgaccgccgttggtggatccgtcaacttctactctcactttgaggccgagcttcaggatgtgattcctatcgttaacaccacgattggaggaactcgaatcattggacgactctgtgcaggtgcgtcttctcttttcttcttccttgcaatgccagaaatcgcatctgatgagttgcacctctttcctgtcttttccccttcaacgccaacaggaaaccgacacggacttctcctccccaactcaaccaccgatcaagagctccagcaccttcgaaacgcccttcctccttcagtggccatccagcgagtggaggagcgattgtccgcacttggaaacgtcattgcctgtaacgattatgtcgcgcttgttcaccctgatatcgatcgggagactgaggagataatagcagatgttctcaaggtcgaggtcttcaggcagactgtggcttccaacgttcttgtcggatcttactgtgcattgagcaatcagggcggtctcgtccaccccaaaacgtcgaggagcgagcaggaagagttgagcagtttgttgcaggtccccttggttgtgagtggttgtcttcctcttctattgttcctccctacttttaccttggttgtctccgtttttctcctgctcactagggtctcgtatctttgcttgtgcttttctttgccacaaaggccggtaccgtcaaccgaggttccgatgttctgggagctggtctcgtcgtgaacgactggtgtgctttcaccggaatagatactactgctaccgagatcagtgtcatcgaggccaccttcagtacgttccgctctttcctccccttctcgaccctgattgtcatctaacaaggccacctgtctttgtcggaaacagagctccagggacagtcttcgaccgctatcatcaacgagatgagagattcactaatcgacaactacgcataaaatggatgtattatatccttgttttctctttggctttactcgtttagaatgtactacgtcatacttttatcttttcgttgattcctacaaagacaaacgcaagctagagaaagtcgagcaagaaagcaagctagctcagaggaggatgagttggaaagtgcaaattgttcgaacaaccgaccgaaggcaagacttagacaaaatcatttatgacttaggtagaaaatctggaaatccgtttacccccgggtgttcatccttactttctttacttctccctcaaggacattgtaccacaaagcaaactcgacaagataaagaaaaatggcacctcctacctctgaatccgttcagcttgcagtcctccaatatcttgatcagtcagccgatggaactttggctgattctagagaactcgtcgtggacgggacgccgatgaagggaccagcagagcagatcatcgtcaaggccgccgtcgatagtttggctcgacgagaggtgcgttctctcctttctcctttcttcttcagctctttacattgcatttgagttctcccagctctgtattgttctggaagacgatgctgagatggtagtattgacggaaaggcttgatagaggacgaatcatcatctttaagaaagctcgcggctgatagagagggagaaaaggctgcattgtgaccaagttgaaaaagagttgaatcgaatcaagagcgagagtactgaactttacgaaacttcttgttcgcttctccgaatggcttcatgaatcacaacagatgatttcttacgttcagaaggaaactctcgtcaacatgctcactccagaagggatctcaaccgccaaagatggttcgtttgaagtccgattctgggcggccttgcctctcgtcggtgaaggtgaaggaaagactctcaaagagatccaggaagctattggagagtcggtcgctaagctcggtcagccgacagcaatgaagaagaagtgggtcactagggacggagtgaagttcttcaaagctgtgagctctctttccttgttttctttgttccttccaaatgcctcaagtggcagggactgtcttttggctgatcgggacatatggggacgatctgctttcaagattcctgccgttacagacgatagtcagaaggacaccatggaagtcgagagcactggtgctcacgccggaggagacaaggtgttggcggatctcaagaagcgaaagctcttaacccagaagtgagttgttctcctaggttcggccttgacacacaagagtagatgatttactatgttctttgggtttatgtcgaaccccaggaaatttattttcttctcggccgcaaagggacctgagtttgctctctctatcaagaaacaggagaccgatttgacgaccgagatgatccaaaggttgttcggttttccgactcactgtattttgcgtacatgtatgctgactgggcggcctctcttttcattgccgtggcttgcggacttgtagcggagcttggaagaacgcttccttcaagaaatacaactttgaggcagctggtgtctcaccagagggaggtgcccttcaccctctcctcaaggttcgagaggaattccgaaatatcttcttcgagatggggtgagtgtacttgtctcgaggtctgggtgtgccggtttattacaatcgcgcttacgacaatattctcccttttcttcaactcgatagattcaccgagatgcctacgaacaagtttgtagagtctgctttctggaatttcgacgccatgtttgtgcctcagcagcaccctgctcgagagatgcaggatactttctacatcaaaggtttgttctcccgtgtctttttaagatcttcacttgcgtgtgcgcactaaaggtctttccttccggtcgtctggaacataaatatttggggtttgaattttcagagccttctacgtcgggttctcctcctgccgactactacgagcgagtatcaaccgtccacgagaaaggaggttacggttcgatcggttaccgagctcctttctcccagcccgagtctgagaaacttttgcttcgaacgcacaccacggctgtgtcgactcagatgctttacaacttggcgaaccagccgggcggattcaagccgaccaagatgttcagtatagaccgagtctttagaaatgagactaccgatgcgactcatttggccgagttccatcaggttgagggtgtcgttgccgattacgggatcactttggccgatctcattggtgtgtctcttctctttcttcatttctccgaactttctttctcagaccgagccttgactcatcaatccgaaactatatttggcattttttccttccaggtttcatgaccgagttcttcaagaagatgggtatcgagaatcttcgattcaagccggcttacaatgtatgtttttttcttcttcggacgaccaggtttatcacttgtctctttgtgctgttacatctacaccgatgttgttacataaactcattcgtatatatatttctttgatcgcatccagccgtacacggaggtgggccttctctcaaacagatgtacctatacttatctccgacacacgtcgtctaacacttttttctattttccctcagccttcgcttgaaattttccagtaccacgagcagctcgacaagacgatcgagatcggaaactctggtatgttcagacccgagatgttggagccgatgggtatcccgaagggcgtccgcgtactcggttggggattgagtttggagagaccgacgatggttaagtacaaaattaaagatatccgaactctcgtcggacacaaagttgacgtcgatggggttagaaaggctgctgccgttcgtctagacaagggggtcgtttagaacgttcatgtgtgcaacatgatttgtagggatcttagtacggacggtgtagctattgaatcttttatgaacgtaatagagaatgtactagaacaaggttaatagaacacaactatgccacacagcacaagatgcctagaaagatctagaagcttttctatagcccttagaaggattcaaaaaaaaaagaaatattcaaataaaagtcaaaaaaaagggagggcaacttgttgcttgtcgtcctctctttttcccttttctctccatcatccaccacttcgctttcgttcgatcccatttaccagaacaagtcagtaccgttcacgttcgttcagaggtccacggaagaggaaagaccaagatgcccggccggtttgttcgtgcattgaagaatagatgtgatattgactgttttgttacatctctgtcctccatcttccttcgccctttccctccaccttctttcctcaccgacccgttgcgattaatgtctacagttgcaatcaaaactaattaaaatggccgctcctgagacctttggattccaggtatgtttttgggctaactgtggcgactgtatttttgtagaaactatttttactgatgtgtttttcctctttctcctttgcttcgttctggaaccttctttgccttctttttctcgatctcttataattaacgaaacataggctgagatctctcagcttttggatttgatcatcaacactttgtaagtctgttacactcccttgcgcgccaatgttaaacgtttgcgcttacctcatcatgttctttacctatgacagctactccaacaaggagattttccttcgagagttgatctctaacggatctgatgctcttgataagattcgatacgccgctttgaccgacccgtctcagcttgacaccgagaaggttagctagctattcttattggcttgcgcttagttatatcggaaatagtgacaaatgctcctgtttttctctttcactctgtaggaccttttcatccgaattacccccgataaggagaacaagacccttaccatccgagataccggtctcggtatgaccaaggctgacttggtcaacaacttgggaacgatcgccaagtctggtaccaagtctttcatggaggctcttagctccggagctgatatctccatgattggacagttcggtgtcggtttctactctgcctacctcgttgctgagcgagttcaggttaccaccaagcacaacgatgacgagcagtacatttgggagtctgccgctggtggaactttcaccatcactcccgacactgagggagagcccctcggacgaggaacctcccttaagctcttcttgaaggaggatcagctcgagtacctcgaggagaagaagatcaaggagatcgtcaagaagcactctgagttcatctcgtaccccatccagctcgtggtctccaaggaagtcgagaaggacgtcgaagaggaggaggagaaggaggaggagaaggaggagaacaagatcgaggagattgaggatgaggataagcccaaagagaagaagactaagaaggtcaaggaggtgagaaatttatgtttgtagcgttctggctcagcgaaacgattgctaacatcttgtctacgattagatcaccactgagaacgaggagctcaacaagaccaagcccttgtggacccgaaacccccaggaggtcaccgaggaggagtacggagctttctacaagtcgttgtccaacgactgggaggatcaccttgctgtcaagcacttctctgttgaaggacagctcgagttcaaggccattatctacgtccccaagcgagctcctttcgacttgttcgagtccaagaagaagcgaaacaacatcaagctctacgtccgacgagtcttcatcatggacgactgtgaagatctcattcctgagtacttgaacttcgttaagggtatcgtcgactctgaggatcttcccctcaacatttctcgagagacccttcagcagaacaagatcctcaaggtcatccgaaagaacattgtcaagaagtgcatggatatgatctctgagatcgccgaggacaaggacaacttcgccaagttctacgaggccttcggtaagaacatcaagcttggtatccacgaggatgctcagaaccgaaccaagctcgccgagttcctccgattccactctaccaagtctggggacgagcagacctcgctcaaggactacatcactcgaaagcccgagattcaaaagtccatctactaccttaccggagagtccctttccgctgtccgagacgctcctttccttgaggtccttaagaagaagggattcgaggtcctcctccttgtcgaccccatcgatgagtacgctgttacccagctcaaggagtttgacggtcttaagcttgtttgtgtctccaaggagggacttgagctcgaggagaccgacgaggagaaggctgcccgagagaccgaggccaagcagttcgaggagctctgcgctgccatcaaggagaaccttggagagaaggtcgagaaggtcgtcgtctctaaccgaatcaccgagtccccctgtgtcctcgtcactggtcagttcggttggtcctctaacatggagcgattgatgaagtcccaggctcttcgagatgcttccatgtcttcgtacatggcttccaagaagaccctcgagatcaaccccacctcgccgatcatcgttgagctcaagaacaagttcaccgctgactcttccgacaagatcgttcgagacttgacctcgctcctctatgagaccgccttgcttacctctggtttcaccctggaggaccccacctcgtacgcctcccgaatccaccgaatgatcgctcttggtctttccatcgatgaggaagctgcccctgccgagcccaccactgaggccgccgccgacaacgttgccgaggcctctgccatggaggaggttgattaaacggttgatattctccatcaatagaaacccttcctttcctcttccccctctcctcaaaacaagaaggtcttggcattttgtcatgcctctcttctatttttaacgagacgtacgacattctcttctttttattcgtttcttagttcaagttcttttcattgcatctattattttttgtgggatgtattcgtaacaaatgatatgtcttaatctaatcaaaagcaaaaacaagaaactcttgaacctgattacatgagcttcctcttgcttgcctatcaatattgccacgacgttatatgtagggaagtcaacatatatgcatagcgtacgtgtgttctctgtaagcagtgatcatggtcagacaaggggatcgagcaagggagagcaagagaggaaatgccgaatatatagaagagaaactggtgattcatcggaactggggaaagaaaaggaagagacaaatcaattactgctagaacaaaagatcgcgagacacaaaataagaatttggcccaggcacaaaaagagaatttgaacccaacgcgggactcgaacccgcaaccttcagattagaagtctgacgctctaccaattgagccagccaggcgcttgatgttaataatcctttattatgaagtatagccttcacttcttgttgctcccacgatgtcttcatccgttcggcttcaaagattcttcaaatcatagtgtgaaaacgggcttttcgctctggtacttgttctccgtcaagtctttattggtttctcaaaatcatatgcatatcaccctggtgtctcaataagatgaattgaggagctaggaaaacaaggaacgaccggcaggttttgcgattcttaaataaacacctcgaaatctttgcatttctcttggcctctactcgttcttcgcaccatgttttgttgaaattaacagcttgagcttcaatgtggttatgataaatcaaccacttttcggttgtcattgaagatgattactgaaataaaagggtgaaaatggacttttctttgtggcacttgttcccaatcaagtcctcactggtttcccaaaccatatacacaccacccaggtgtttcagtgaaatggattgagaaaccaggaaaacaggagggagcccgctagaaaatttatagctcttcggaaagagaggcttgggactccgcgcagaaggaggtcggaaggtgatgtctcaagagtagataacaaataacagatgaaattatgtcaagactgctgaaatcccaacagtcattacaaagtaatagatcgatggatgtgcgagcatgttctctccctcttacatatgtcacctagagttttgccttatttcggttctctaaccacttgctgaacacctgaggttgctgtgtaatcagtttgacagacaggacaagcaaccagaacgaaagattaagcaacccaatgaggcttgtctctaggatgtactaaaccctctttccattctttccttcccgaccctatttttctatagattcaggtccaccgggatatgtaggagagattgagaatttcagtggttcaatatctgaattcttgtatctatcaaatcttttgcattgactaatgttctggctttctgacctgtgagttccttagaacagagtataagtctatataatatttgtggatgtttttctgcctaaaaaggcgctgcagaaagatatgtacagaccttgtttatgtacaaaagggaatggattatagagaatgttcggagattacaagtaacggattatgaggtggcaaacaaaaaagccttgaaagagcgggaagataggagatgaatgaaaaagatgataagaaaatctatttggagaaaaccaaaggagctccctcagtgatcaatcgaccaagagaaatcgactgtttggggacacaagcagtggcattgtggttaagggcgtatcctcgctcgcagtcgaggacaacacacttcgactcctggcactcgacggagccggcatgaggaatgctggtgcaatcgagaccggtctgagctccagggaagggagaagtgcatcctccgcctgttcaagaacataggaatgtcaagatcaataccaagccatagtatgagaatacaaaaagatatcagaaaactaacaagactcaatgttggccttggtatcaatgcactcgaatccagaagcgccggacaaagtggaaacagggcaggcagtcatggaaccagggcaagggtttcgagatcgggcgttgaggtttcgtcgtcgcgctccgggagagatgcaggtctgtccgttggcaacgcactggccagagcatcgctggtatccggttgcacaggctggaaagatcggttgtacagatcagccaggtactcatgtctaaggggcaatgtatggcaggggcaagacttactgaatccacacgttccagagcaatcgttgggaacagagttggcagggtacttgcaagaagtagtcttcgaacctaggagacccagagcgatgggctgagcaagggtaacaagcgagttgactagagatggaagggaagagtttccatggtcagtcggacggtagcgcgagtagttgaagaatggagtagtctatacgaacccgtctgtccaattaacccaagaagtccagagttcttgctggctccggcctggaggttcaatatagactgaggagtaagaccgttggcagtctaattatataaattagataaagagtccgatagttgattagtttaatggtcatcgaaacaagacggataggtttagacgcacggcgcagatacaggtgcttcccaggtcgatgataagaaccttgacgttgagatcaacctgggaatatgacaggaaccagaaagggcagatgataagcgtacgatagacaaaggaatatcgagggatgcgctagggcacttacacagataggagcagtgatcgctccggcaacgagcgaagccgcagcgaggaaggtggcgaaaaagttgagggcgagcatcttgagacagagacggaatgaaggaggggaagaagggaagaaagggagacagggagatggaaagaggacggagggaaagagtaagggaagaagatgaagaagaagaagaaggatgaggagccagaaagagaggaagtacacaggacagtcatgcctcttataccttgggtttctactgactcctacacctcgatgagactgcgacacattctagattcgatagtgcctcatttctggggcttgaatcggatggctaagagacaagagacaagagacagaaactctatcagagcccgatggcacttggaagaagattatcagggctgaaaagaggccattgtgcgcgcatgcgttctccagggcagagcatccccagttgcagaaacatgattagaagatgtttattagctcaatcaatcttgatcggtcgtctctgacttcagggaaccaaaacagcagagtgatatgtgagtgtcaatataagcctgaactttatgagatatgacttcataagcacagagttagtccatttaatccaggtcgatcctgtgaaggaaggtcagtatgaggaacgagcggtctatggtcagttcaacggaaactaaattagacatatcaagacacgtcggagggtgttcagaggtgtcggaggaggctaatcggatgccctgaccgatatcaatgccaagctccgctccatccggatcagcgaatctctcaggaagatattctagtttgaccttaaacgaccaaggtcgaatggtagaactcgtgcgaaggaagatagaggacgttatgaaatgtcctgccttgtgaggatggaggtattccaagttccgagacacaaaaacattatctatgtgggtcacatcttatgtgcctgtgacagggacaaaaaaccgacagggacgacaacagggataacaaacaggaaacaattgacaaacagctgacagagaggagccgaaacgataatttacagtggacagaacagtgcctaaattatgtaagcaactgtgagtaaagtttagattagacaggatgtccccaatgccgacgtccccgatacaaagatcggatatatgaatgaaatatattatcgttcagacacatccgctcagtagccgatgatgctagatgcaatcccggttcttcttccgagcccggacctatcgattgttaaattctatttattccgaggcgtaacctttcccaagttacccgacggatgaaaactcatgaaaagttctgaaattcatcgaaattgatcaaaaatcacctcattttaggttacgaccctgcgaacccctaccattttggttacctgcccttcaccaggaagagaacgaggaggcaagaatgctagtgtttggcactgccaccaatgctcatgctgacactgcctaaccgacaggggcaaactagatccatagcccatgacccataggatcttggtgggtttgtggtctgagagcaaccaagtccaagatggctacgtattcaccccaagttggctagggttactctcatcaagcctaaggcttacaattatagcggcgtgagtgttagggttgtaaacttccactcatcagttttccagttgacaaacacatctccctgttgaggttcttccaccgttgcccttctctctcacattcaacacatcatggccaacgtccatccctctatcccattcccgccaacaccagttcctcatgctccatctcctctaggttttggtttcggtttatccaagccatcgtcctctgtttcttcgttcgggtttggctcgacaccagtcaagaagacacctggctggggatcgctccattcccaatcttccttcggaggtggcccgtcgccctcttctgcttcagcctttggctttggaggatctaacctgccttccccatcaatcctcacttcggcctcacaatcagatcagctggtctattctcatatatcaatcggatcaccccagatcaacaccccgtttggaaagagaaaggcatctcacccagttcctacacccccacctacattatcttttggtcaagggtccaactcccgtcgccgagaaagagaagaagatgaggacgaagatgaagagatgggagatagcagatcttttggtggaaggcacgtgaaaccgctgaagaagagcagagttaacgccgcagacgaggaggagcctaagagtactcagacgaaacagagaggttcagaaacaaacactgcagaagatgtggacttgggagtccttctaggttcgttgtttactctctattctgtatgtttaatttgaagaatgtgcaaggaaacatatacgtggatttaccggaaatgcacttcatgaaggagctgtggctaccaacaaatgataaagacagacacatgaactgacccacacatattcaatttacagcacttctgcctccagcctcgctccttccgatcttgacatcgctgattcaacagaacccgtcgcttaagtcaaatgtacttgctcttcttcccagtccatcgctgccaaccgcgctggaagcactccggatagcagaacagaatgtgatgtcatccatcccgtttggatggtccaaagcgggtggaaacgtaagcgaaatttacgtgttgggaagagtgaaaggatctgtaggcgaagtagctacattggttcgtatccagttgatcctactcattaatcttagaatgcggcgtcgacttgtcttcattcttccatcaagtaatctggaattgacgattaccttctcatctcttgatattgatcataccttttgtttttgtatttagattcgatctcatctcccgttctttaccacccagccgacaccttctcatcccactacgacattcagctacctttctcaaagcacaactgttttacttcgactgactcaccttttgcccggtccgctcgaggccctcgaagtcgtctggcctgtactcgcgaacgaatggcttcagtgggttggagctgtgtccagactggtcaacgatgaaggaggcatggtcagtgctaacgtggctgaaggttggatcagagagctcgaaggtttggccggagatgaaggtcaaggcgtgggcgaagaagcccagatcagaagccaattgagagaggtcgggagggcttggattggccaagttgggtggctcgttggtaggcgagaaggaggtatgaggatggagtagttatctattcgatctgggtcgttcttctctctactttggcttcttctctctgctgtacgggtacctgtgcctcctcacctcactttgcttgcatcttcccattatatacaacatatatgttctcttttgattctctttttcctttcccttcctttttctctcctctttgtgttatcttgtcctgctaatgtatcctctcttcgccatacctttcattcaatcatctgtaccagcatcccagcctcccttcctttctatatccatcctgtcactcttcattctccttgatcatctcctcatcttgctatccttcccttcccttctccttctttgattatacatgggcgaacgcatactcatcatcctccttacctataagcacgtctactaaatacacggaacacttgtcaaaaagatcgaagcgaaaaaatctgaacgcatctttctttaggtcttcatgaaagcatcagcttagcctgcaggaggaatatctgatcgccatagaagtaagaaaagtcaagagataatgatagagcaggggaagaaacttgggctctgatgctccttgattgaacagtcctcatccgtcgcctacataaccctgacgcagacgaatatcgatttatattacgtaattgttttctatttatcgcttctgtttcggctctccttttccttgttcttttcccagtccggtcgttcgtactctttggacgactcattatcatcggcaagtctatgaaccagtttctgttgtttcctgatggcacgtctttttcagctctgggagaaccttgaaggaaggatgagggacgagcgataaaagaaaagaacaaggaaggatgtgatgaaaggcgcgagggagggagttgtacatcatcgagagatcttggatacgttcatgccaaaagaaaagaaaagaaaagaaaagaaaagaaaagaagaaaagacactgagaaggagagaaagaagaagaaaagaccatctaatcaaatagagggacaagagaacgagccgataaaagagatgaaaggaacgacgcgattactttcgcttgaccttctcgagaactagaagtcggaaccgagagatgagaataagcttttgatcgagataacagccagagaagagcagatgaacaaaccggtagcctcggagacctcatcgaaatcagttccctggatctgttaacccgtacgcgcatagagagtaaacacgaagattcgttgtcagccaactcaagcccatcactcgatccttccaaacaagagtccaacggatggcgtagataaagatgttggtatctaaatgtacgaacctcggtgtggataccaacgagggactttcgaagagcctacaaaggagaaaaattccttgagttagcctagtccattctttgacttttcaaaggcgacacgaaaagatgcgtctgctatgaggatatgaacaacaactaacatctttagaagcagcgtagaccatcttaggcttgatcttagcaccatcaggagtcctacgtatagcaaggcgatagccggacgagcgcggcgagtgtggtgaaaagaacagcgagaagaatattacaacaggagattaaatcagagaaagatcaaacacaatcagtataggcagctgtcgtttcatgaagagaattctaaccccccctcactcctgaagatgctcataagaccgaaggaagcgaagaagacgaaccacatgtagaagacgagcttgtttcggataccctctccggaatcgaactcgaagtcgtacacggcccaccggcactcgttctcaggcagctgctcaatgaacgagtcgtacgacttctcggtcgatttggagagcacaacaatctcagtgttatctggagacatgccgaagacgatgtacttgatcttcttgccggccttaagctcctggtaagcggagagacattcttggttgacggaagctccagatgactatcgtgagagggttgtaattagaaacgagggcaagtcgcaagaaggaagtgaagaatgagcgatgaaggtcaacaatgagatggggagattataaccgagcgagtaagcgatctgatgaacactgtgaagaacgaccaggaacggaacaaagaaaaaaaaactcaccattgtgaataagataaaaagataagagagagcgagttaagagaacgagattgagagaggtgcggtcgaagtgagagaaagaggaagggagaaggagaaagaaacaagagaaaaaaaccaaatgaaggcaggaaggaacgacgtgagcgtgtcggcttacgtaagggtgtgtatcccgtagtcgtctggtctctctttgttatagtctggtctactgttcatcttgggattttctatttgctctcatactgtatttagttttgcatcttgctactgccatctgtctgttcactatctcctgcattgtgtcaagagacgattctcttaccaagatgagcagcgattctttcagaattcacaacccatcggcatctccagcctcatctgctcctgcatcatctgcaccaggatcgccttcctcatcttcgtcaaccaactcgacctcatcgtttaacgcgtctcggccggcagcggcttttagagtcccacatgcacccaatcgaccaagtccgttagcagcagctgcacagagttcaggaaggaggtttgtaagctatcagggcaatagcgacagcgaagatgatgagcctgctggaggagcaagaatggtttcgaacggagacagagataatgttggcagagtggatcaagaggtagagttggggtgggtgttggatgccaaagggaaagggtacgtcttcttcatcttgagctagattgccacacggaactagctgtagactcagaactaacgaagatatgtaaacccaacagcacgtatatcaccccacaggtcaggtcacaagaaatcatcattccttccctcgccaacaaagactggcgaaactcctctcgagcagcaagctcccgtgtggcaacgacgacagcaacaaaaactcggaaaaccgaaatctaccttccacctggagctaagacggatccaaatgctggcccggttaacaccagagagatcactggcgatggccctgaggaaggtggattgatccgacatgtccgtctagcaacttctaccgttgccataagcacgaattctactcctgaagagtccccgactggagaaggcagtgtgaaagccaaagaaaaggttgaactgactttggaggagagagcgcttagagcagttttggcttcggccggtgaacaaggctcggacgacggtgaagaacttgatgctatccctaagcaagaggatcagagacagaacacgattacagaggaagaagctttcagaagggatgtagagaccagaccagatgaggtatgtgttcttttatctgcgcgcgtctcaagaatcgagctaacctttctcttggctttacctgccgtgtgcctcagtcttccttggacgattatgcccgagtgcccgtcgcgtcttttggcttagcacttctgaaaggtatgggctggaaggaaggtcaggccgcgtctcgaacccgacccggcatggtggaagcctatgttccaaagagtcggccgtcgttactaggaattggagcgaaggaacgagacgcgccaacattggcaaaaggagagaagccaaagaagccatggaaggtaaaggaggaggcacgaaaatacagcccaatcgttagagtatctagttcgaaagaggtaagtgtggccttcacgattgccgttgccgttatatatctaccaagctactgaacatcctactggacattttactgatactatatgttcctttgtcttttacttttatgtacggaatcatcatcatcatcactccttctatgacgtcttagtcttctgtatctcgttcgccgaatccagattctcgccgaccaagccggtctccatctccctcgcggagacgaaaagaaggtgaccgctctcgagactacgctcgagaatcagctttgacttctagttctagacggaaacggtcgcgctctcggtcgcgttcgcctgataggtcttctcgcaggcgggaagatcgggatcgctcaaggagtccacgaaggaggagggaggagggccggagttatagcagtaggaacgagaccgagagcagggaccatgatgaccggcgaaataggtatcgagacggcagaccagattatgagagggatagagatagccggagggatgataggcgggacaaagattgggacagaaggcggcactagatatacgacatacctagtatggctttgactatagagtcactcaaccgatgatggtcgataaatggcccttttggacttggatcctctcagaccacaacccgcccaatcgtcaaggatgtgagctgagtgttagccgtctgtagcctgagtaccatagatccaatgccagagctcctactccttgggtgatgcatcaactgctaactatgtagacgtacaccgaatgtgccagggccacatcctatgatctctgcttgcgtgcaaccctgtcgttctatcctttcgtgcgatacgtttgtctgtgtatctgcctgtcatactacctccatgcagtacctccgtagtctgggaaccagatatgaaacacgcttcctttgccacccatagcatagcctccgaagcctggaccctttgttc

SEQ ID NO: 2501 - DNA, 22324 bp, Xanthophyllomyces dendrorhous
tccacttgtcattcctccgtgctgctcttgttcccagttcgtgtactcgccatacaccagtgtaatccatcatcgagatctatcaactctgttcccttgtgcctctgttcaccccagttccaatctgagagcctgaagttctacttctgcgctcgtctctgtatcgatcgcgcatcctctgaccgatgggatctcggtggtttgtggtcttagaacacccaaatccagaagggccatgcatcgttcaccatcagttgaggttgctctctatcagtcaaagccatatagctgttcaaacaatatatctgtatcgatctttactctcagatttatattcatcctatctacaacacctggcagcactgaggtagcgagtccgaccaaagaagagaaaagatctatccagacaagcatcccagtatgtgttgagcttagcctatacacatcagaggtcgagaacgatcgcaagaccgttggctggctcgactactgtgatgatcatgttgtacacctgacaccggacgtctagatgaacactgctgaaattagctgcacgcggctcgatcgaacgaattatttctgtctctttgtctctctgtcttcctgtcttcctgtcgctttgtctgtaaactgcagacccagcactgatagccttcacgatgttattcatcacgaccgacggctaatcaaaccggttgtaggagatattcctagtaaagggggaacatctacttatcaaaggcttgcaaagacacacaaagtgcaagaatggagaattccgcctgacttttgtcggaaaaaagtcagacgcggcagtcttgtcagtcgtccaacgaagccagccaaagcggccctttcttagacaggctctcgatcttcaaggttacctcaatacttcgtacgtgtggattcagcaatacacgtcccttctccatcttttgacagagtttgaggaagggactttttttcctaaaagaagaaatgaaaatacggaacctttgactgacgaaaatgttcgattgaattctgctggccctgtcatttttttgtctggtcttgatatctcccccggatgcacacacaaacttgatggaaacttctcctttggcctcacgaacctcttacccaaaaaatccaaatccaatcctcgaaaatttgccctcctgaacttcttattcctcaacctacacatccaactctgcttttaaacgcgaaacccgcttttcaacccctgaaaccgtcactcaaaaacccctcgccgtccttccaacctctcccaaaattttgtcaccgttgaacacatacacatttttgacctagcagaagatgcccgctcacgtccccatcgtcaagaagcgcaccaagcacttcaagcgccaccagtcggatcgataccatggtgtcaaggagtcttggaggaagcccaagggtgcgttggaattttttgcagcaactgagtaaagagttgaggaaacagaagatccgaagtggacaacaagaaacaggtctcggacagatgtagtggtctgagacagtttaataggaggaagaagactaatttccttgatgatattctggtgttggattggggtttgatttcgttctcggtacaaatgaacaggtattgataacaggtgtgtacactttcttcttcttcaaaagtatcaagtctagaagatggaagaccgcttgctgtatatccgagactgatccttacgttgtcttttcttccagggttcgacgacgattcaagggacagacccccatgcccaagatcgggtccgttctacattttcgcaagcttccctgactaatttgattattctctaatactcccattttataccgtttctcttttgtcctggtcacctcctgtccccctttcatattcgtcctcaaatggtcgattttttcattccctgccccatttctctcatcatcatcccttgcgttcaattgaacaatccagttacggatccaaccaccttacccgacacatgaccccctctggtcacaaggtcctcctcgttcacaacgctcgagagatcgaccttctcctcatgcacagcggaaagttcgctgccgaggttgcccacggagtctctgcccttaagcgaatcgatatcatcgcccgagctaaggttctcggtgtcaagtaagtccaaatttccttcaagccatatcagttgaacgcacagtgtgatatgatcgatttctgacttgttgttataatctactgtgtctctacttagggttaccaacgctggtgcccgactccgatctgaggagtaaaggatgtgcacgtgaatgacatgtacacttcttgaatagttttgatctgcgagaaagcaatacacagttgatcactggcgacacactgaggcatcaatcaatttgctaaacaatcgagagctttgtacgttgagatcaagattgacacaacactttggcccagaaggtgatgggaacattaatgatcaagcagaggacgattgagccggcagcaagtaggaataatttggaatcgtcaatccctatcagcacacgattgtccggataaaccacatgtacactggaactcgacaggtctcttcacagacccactctctggatagtctgtacggacccatcgtgattgccatttgtctttctgaccgtatctgaagttacagctgatgaataatgaagaaaatcttcacagccaagataacaataccatctgggtgtctaactgaaaaagagatccagcgagaatagaacttgcggctctctgctatcatctcataactaacggacagaaagaaagaaaaggcccgcacggaagagatgacggaaaaatgtgctggaggttgttgacgtggcaagggacaggagagtttggagtgtaaaattgcgcagtttctaggcgattcgctcgaccggccagccccttgccagcacatcacaaaaaaaagagggaggcagcaaaataaaatccctgccacacaagatctctcttttttctctttctcctccatcttcatcaagaacaaacagaaaacatccagcgttctcgccacctttctttagaaagaattctatagagaatcaatcttttctctttctaaacatggtctcttcaagcagtcgctcgccagcgcgacttctttctactctctccttcctattctttgccatcctcgctttcgtcgcttttgggtcccagggggtccgagctgagggacacgaggaatacggaactgttatcggtgggtatcttttctgctcctgctgttctttctttttcgtattgataaactaaagatgagcgctgacaagttgtctttttgttgtcttcttttcctttgattttcaggtattgatttgggagtatgttcatctcatctcacttttttttctgtgcatttctgctgcccgtgttcgcatgtgcgctagtcgtcttgcacttcacattgatactgacatcgcttggttgctcaccctattctagactacctactcttgtgtcgggtatgtccatttcacttgcgtttttcttgctaggtgcatctgctcatctcaattctctttcttcctcacagtgttcagcgatccggacgagttgaaatcattgctaacgaccagggacaccgaattaccccctcttgggtcgccttcactgatgacgagcgaatggttggagatgcggcaaagaaccaggctccccagaacccccgaaacgtatgtgattatctgttttctctggtatatgcagaaaacaccatcttacaagcttattcttcatgtttgatccttgttccttgatagactgtcttcgatgccaaacgattggttggacgaaagttcgacgagcaggatgtccagaaggatatgaagcactggcctttcaaggttacctccaaggccggtaagccccagatccaggtcgcccacaagggtgacatcaagaactacgtatgtctccctccttttctactttcttttttgcttttccgtcaaacttaccgtttgtccaactcctgcattatgtctatctagtctgctgaggagatgtatgtatatcttggctgtacttctcactcgctttaacagattaactaatatatttccatacagctctgccatgattttgaccaagatgaaggagaccgctgaggcctacctcggaaagaaggttacccacgccgttgtcactgttcctgcctgtaagtcactttccacatcaatactgaatccactttgtgataccaaatctcatacccatatcttttctattcagacttcaacgacgctcagcgacaggccaccaaggatgccggaactattgccggacttaccgtccttcgaatcgttaacgagcccaccgctgctgccattgcctacggtcttgataagaagggtggagagactcagatcatcgtgtacgatttgggaggaggaaccttcgatgtttccttgctttcgatcgacgacggagtcttcgaagttttggccaccgctggagacacccacttgggaggagaggacttcgacaaccgagttatcgactacttcactaaggagtacaagaagaagaccggaaccgatgtgactaccaaccttcgggccatgggtaagctcaagagagaggtcgagaaggccaagagaacactgtcctcccagatgtccaccaaggttgagattgaggctttcgagggtggaaacgacttctctgagactttgacccgagccaagttcgaggagctcaacatcgatctcttccgaaagactatgaagcctgtcgagcaggttctccgagatgctggtgtcaagaaggaggctgttgatgaggtcgttctcgtcggaggatctacccgaattcccaaggtccagtcgctccttaccgagtactttggtggaaaggccccctcccagggaatcaaccctgatgaggccgtcgcttacggagctgccgtccagggaggtattctttctggtgaggccggtaccgaggatgttgtcttgatcgacgttaacccccttacccttggtatcgagaccaccggtggtgtcatgaccaagctcattccccgaaacaccgttgtgcctaccaagaagtcccagatcttctccaccgcggccgacaaccagcctaccgttctcatccaggtttacgagggagagcgatcgttgaccaaggattgcaaccacctcggaaagttcgagttgaccaacatccctcctgcgccccgaggagttccccagattgaggtcacgtttgagattgacgcgaacggtatcatgaaggtctctgctcacgacaagggaactggaaaggagaattcgatcacgatcaagaacgaccgggacagactttcggccgaggatatcgatcgaatggtcaaggaggctgaggaatacgccgacgaggacgccgccatcaagaagaagattgaggctttgaacggagtgcagaactacgtttacggactcaagtctcagcttgctgacaaggagggacttggtggaaagatctctggatctgataagaaggagatcgagtccgccatctctgaggcaacctcttggttggagagcgagtccgcttccgctaccgtggaggagcttgaggagaagttggccgagatccaggcgatcgtgaaccctatttcggccaagttgtacggaggggatgagcagccttactcgtgggtatttctttgttctctgttgtgtacactgtcatggtaacgttgtgtgttaaccgcatttgtctcttgctgcctcctgtacagccacgatgagctttaatcgatttccttttccttacctttccctttgcttttttgacgtaaactaagaagacgatgacaaggttgagagaatcagaaatagaaaaggaatctatatatgaataattgttgtcaatttgcactacttgttaccttgaccggacaaacggcgatagtttgttctaaacagcggctgcacacgactgaacaggacagaactcggttccatcgtctgcttcgcacaagccgttgggatgtggggtagatgggacaatgtcattaaaccgaggaaacccgaaagacgggttttaagagcggcacttcgccggcggcctggtggtgaacggtatttatcaagaaattcttaaggtaaaacaactctagcgctagttcgtacggtccggttcctagggttatggaatttatttgattagaattcaattatcatcattcattcaccccccaaagatctccattttctttttttctcttttcttcactcttttattttacatttccaaagactctcaaaccctctgtctggagctcatcacgatggttctactgacaaaagcctccttaggacgtattccttcgtacgtgttaaacctctctctgtctgatggtgttttgtcttctctttgcatgggccaaagggagatccggaaacggaaacaacaccagccaaggtcccggaggagtcgaaccgtcaaataacatctacaactctttagctgatctttttgtccctcttttctcgtctgtaccttctgcttgtttgccttctctgggtgcttgatctgttctcctcaattgtcaacggaccttctcctcactgttatcgatatccatgcatcgaccggacgcttgctatcttctgtcaactcaattctctgcatctcctggatctgatgtgaactgaatttcaaaccggcgggcttatcttctttcctcttttttttccttggccggatacatctctgtcttcttctaatcgtccgggtcctccgcaaaatctccggatgtttggtctgcaatcatcttggtccattgaatttcttggttgggtgggacatatttctaatctagccgggtatctgtgtcgtccaacttgggcaaccgattcaaggccaccaacatcaacgtaagctcgaagaataagaactatgtcgccatcaggtaagagtgctcttcttttacttttcttgtatcttctctgcgcaaaggcgactatgtatacatcgttggtctgtacttgcaagattagatgttgatagatctttctccctgcacgtcatgctcaatcgaccgactgtgtcatcaatttaattaggacaaacttgaagggagatgctctcctcaacacccctcggttaaataaggtttgtctctgtcgtctctttgtgaacatacacacgtacgtgtatcgtatggcgcagcttaggaacagccactgatgttccgaattgattaatcatagggagccgcctttacccgagaggagcgatcaatctttggattggagggaatgcttccttatgaggttcgtcatccgcttgattagtcgactgatgtgttggacctctcctcatcctcgtatcctcttttgttcttggcgatttgttggcattaggtccacgatcttgatgtgcagtgcaagcgagcctgggctcagcttgagaagcagccgaccgttctcctcaagcagtatgtcctctacttacccacctttcacacgctcacgagctcctaacatacgtttaccctaatttatctcttctcttatcaaagcgccttcttggcctccttgcgagaccagaaccaggtactcttctaccggttgatgagtgatcatctcaaggaacttctcggagtgctttacactcccggagcagccgaggtccgttcttgtatctgtacttcctaataccctatgaccaaagacagtcaagctcactgcatttcaactgcccgactgaacggatgtgacaggccgtttcgaattactctgccctattccgaaggcccacaggatgctacatcgtacgtcttacaatctgtttttctatccttaaagccatgcttccgctcgatttctgaactctctatttcgtccattcatccaatgacagtcgtttcccaacgcagacggaatggccgcccagctcaagtctcacttgtactccctcaaccgacaggccgatctaaatgagcgagctggggaggatgattccaaggcggcacccatcgatttgattgtcgttactgactcggaagccattctgggtattggagaccagggtgtcggaggaatcaccatctctaccagtaaagctgcgctctacactcttggagccggtatcaacccgaacaggattttgcctgtcgtgttggatgtcggaaccgacaaccacgcgttgttctctgatcccttgtacatgggatggaagaggactcgtatacgtggaaagatctacgacgagttcattgacaagtttatcaagaactgcaaggcgctctttcctgatgctttgatccactttgaggactttggattgtccaacgctcagagattgcttgacaagtacgccgacgagatcccttgtttcaacgatgacatccagggaaccggtgccgttactctttctgctcttatggccgccgtcggcatcaccaaatccactttggctgatcagcgaatcgtggtgtacggcgctggatccgccggaatgggaatcgccaggcagatcagagatggaatggtcctaattgatggattaacccaagatgaggctaacgccagattctggtgtgtggacagaaacggtttgctcgtcgaatcgatgggagattctctccgacactctcaattgcaatacgctcgacctgatgccgaggtcgccgactggccccgagaggaccccaaccgagaggcacttcggttgatggatgtcgttcgagccgttaagcccacggtgctgatcggaacgtcgacccaccagcgagcgttcaacgaggagctcgtcaaggagatggccagccacgtcgagcgacctatcatcttccccatgagtaatcctactagtttggccgaggttgatcctgctgatgctttcgagtggactggaggacgagcccttctcgccaccggatcgcctttccccccttgtaggacctcggacgggaagacctacgtcgtcgcccagacaaataatgctcttatctaccccgctttgggtcttggagccatcgtctccaagtctcgaacgctttcccccgggatgttctccgccggtgtccaggccctcgcttcgctctcaccggcactcaaggatcctcaagcttctctcttacccgatctttcggaagttaggtccgtctcggtcgctgtcgccaccgccgtggttaagcaggctgttgatgaaggaaactccagggttccccagttggagaatatgacgcttgccgaggtttgtttcttcttctctttttctgcatgcgcgcagggtctcaagagcagataagaactgaaaatggacgaatttctcatctttgtagatcgaagagttcatccgagctagagtttgggaccctgtgtacaggcctttaggttcgttttcccccttgtttcttctctcatcgctgtttccctcttctatgtgctccccattgacccttgttttatttcttcgtattattgttttgatttcttttagaactcatggattgagcgaatgaccagagcgttgggattggaacgacagcttttctatactacagttttgtctgatttcgtcttatactacttctccattcatctttcttgtctcctgtcattccctttctctttgccgcttgtggcttttcctccctttcttccaaccccccccctttccggtagtttttttctcttggtaatctgacagcaataccatgtgctttttctcaaactttgtttaattgctccatcaatcctcgataagcccacatcgacattctgatcaagagagaaacgaaatcattattataaacggggttccttcttcttctactaaaaaaaccaatgacaacactgaggtaaaacaagacagggtagaatagagaaatcaaagactgaaaagttgggaaaaatctagctttctgacaaacttccccgatcccttgttttcctcatctcttgacccctaaacttcacggaatctaccttttttgtttccgctctcctcttctttggctaaaactctattccgaaacgggcttgtaactttttccgccaacccatctcctccttcccatccatctcaacctcctagctaaccctctggccctaccccatcctcgcacgatccaatcctcagcccacctctccgacgcaagacagaggaccacgttgagaatgacgatacctagtagttggagtttgaacgacaactcaagagacatcaagtcgaggaagagagcgataggaagcgaaggagacaagagaacgtatgttgagaagacggagaggaccacgagacacatcaccaacgagactttaatgtcaaggtttgaggcgatgtttgaacaaggatatcagtaaattttcttcgatgagaagggaaaagtagaggaaggccagagaaagaagtagaaggcgaagaggcttacagttggtgtagagaggctttctgtaaggaggtccgacactgaacacagcagctactaagatgtattggaatgatgagacaaggaatagcgccgaattctcatagttgatcgtctcgagtttatctacattgacctctggttcttcgtacctgtgagttcggttcgaaagagaaatgcaaccgatcagaagaagattcggatttggaagaaaacagaaaacgccataacggaccaaggttgagcctttacaaggaaaaacactccaagctggatgccagcgttgataatcgtttgactgatgatgcttgtcaacacacgtttcgacaccaacgacccggccggtcgtttcgggtgaatatccgggtagggtaacgtacgacccactttcgtgattagttttgagatcagagcgatgagttttagtattttggaacaaatatgataagagacaaagcagagtgtcacatactggcaacagcaataggaatgataatgaagagatcgatgtactaagaaagcacgatgagagtgatgtcagctcttggtatactcttcagaatgaagatatcgtctaccaatgaacttacgagaaattggaaatctccaagggaagacgcaaacgaatacagctgtcgcaaatgaatgtgataagaatactgtgaacaaggtcaggaaatgagaaacttagctcaccagagtgatagtcgtaaactgaatgagagaatacaacgccctgtatcattcgttccaagcggtaaagcattagaacggacaggggagacacaacaaaagaacagaagtaactcacatgtatttgaaacaactgaaactcgtcactaaagcagcccttccctctctgcaaaaagtatccacgagaaagaacaccatcagattccagtctaaccgatgttatatcaaagaaggaccaagattaacttacttaatgacttctataacacaagagatatccgccacccgactagtgaaaggcgcggcaaccgaagcctcggcttcagacaatgagattcctacgtcagctgccttgagcgctccacagtcgtttgctccatctccacagaagcaaacggtatagcccaatccttgaagacgctcaactagctcgtgtttctcatcaggagacattcgggcgaagatcactcctttgataagcatctatcgacatcgaagtatcgcatatatgcacgaagacatcagtcctagcgctccagacgggactaaaccggacctaaagaaagagagagggagataccttctggaatgactctacaggcgcccaatcgaccatccaacggaaaacatcaccggtaacagccaggttgtactcttgaggttcatcctcgtcctgctcgaccaactgagtctgttgacgaggaacaggcttcatagtgtagctgtctagcttaaaatcatcatcgtccacagaggtccactcgatcaaagagttaggattgtccggggagcctatgtccgcaagaaaataggagaaacgacgaaatgacgatatatcaacactctcgaaccgtatgtgtttttgcacgaatgtgtaggatatgaactgaccttccaagaagtttggcaagaaaatgctggccgattgagagaccaatccacattctctcgctacgctaacggctgttcggacattgtctcccgtcaccattctacatgccaaatgggcacctcgaagtacactgatggccgaggttgtctccggtttgagcttattctcaaagatgatcaaaccaaggaattgaagatgcgactcggcttgctctctgtgcgatatgaggaagcatccgcctagttagtaggctgaaggtgacaaggatgaatgggagaaacggtgaacaacgaaccgtttcatgcgttgcgctttaagccacgtcagcccagggattgactttccagcgatagcgattactcggaacccatgcttggtgtagtacgacaaaagatcatcgtagtccttggggactggtgttcatgaaatcattccaattcgcaaaccagaagaaagaaggttgatggtaagaggagagattcttactctgtcaaaactccaggtcaaaaggcactcacaagatgcaggatcgcagatatcggccatcacttctggagcgcccttgacgtagacttccatgctaggtgacttgagcctctttacaatcacactcatccttcgaaggctcgacacaaaatcaaacgttcggatgactccaagttcaaggaaatgagcgtgctataaacaccaaaggaatagctcagttcagtcgattgtaccgaaacaccttctggagaacaaggaaaagaatagagacggacctttgtaccagacttgagagcatcctcgacctggaaagcctcacttgacaaaggccgaaccactgtctggactagcgtctgaggtctctctgctgtcttgccaggtattttggaggatgaagtcgtcgagttcgagttcgaattcgacgaacttgactttccagcccgaccttcttctagaatccaacgcgtgaagttgaacatctccatactagacaattgcacacatccaaaacccattagagaccaacaattcacaagagaaatgcccgcaaggtagacacaaaggagaacacgcactctaatggatctccaataatttcctgattaacagacttcaacgaatggcaagtggcgagcgcgtacagcatcggggtctttccatccaatccacctgtcgacggcacgtctgatacatcagaatgaagttccgagaaccttcctgtattcttatcgattgatcggatacccaggacctcaagaccttcctccgtaagggtcccggtcttgtcaaaacagcacacgtcgatctttcctccgatgttgactcggttaggagagatgcagaagatgccgagctttcggagtcgatcaattgcaaaggttgtgccaattgaaagtgtggcagggagagcgggaggaacgacgacagtgatgagatccaaggctcggataaggatagtatgccatttgatctatgggcgatgaataaggagagagacgacataggtcaagcgcctgctgaatagggttatcaaactcgtagagatgacttacaccgatttcgatgaactttccaacactaaatggttgaaatatgtgtggaacaatcagttatgaggtcttatcttatgaaacgaacttgagacgtacctgataaggaatccgaaaccagcaatcaaacccagaacgccaataaatcgcatagagtctcggctgaatatatgacacggtcagagcgttgaagtcaatgacagagaacacctttttaaggaaaaagccagaaggaacttactagaacttgaaacccataggcttagggaataacattgatcgtaccaaagcaccttttgtcgtgttgaatcctaagaaccgacccgcacaaaatatacggtcgtttttgtcagctttcatgtatgtacaactcccatcaaaagattggaacacggagaagaaggagaaccgacctgttcgaacaaccagcgccaaagccctagcggctgggttctcgtttgcgggtctaaccctgataatctttgtacccgaaaacaaaaagttcgcagccaatgccggcgatacgtctgtactaccatttttttcttctaccgagagtccaagaagagcatcgtctttgatcggcatctttgcaacaggtaccgattctccagtgagcatggattcattcacaattgcgtctccagtaagaaggacggcgtcgcagggaaagagagtgagggtggcatccgaggcgtcgaagatatcaccaggaacgagtgtggcagagtccacggtttgccctgtacagttatagatccaaaaacatgagattgagtacggtccaacgatgcaggtttaaaaactgggcctacattcatcattgattaaggcttggacagggcacgagaacctagacatctctctcatacgttcaagcgtctaaccgcagagagaagaagagagggtttctttcagcttcaaccaaattacacgtcaactaatgaagattagaaagcagatgcttcttccatactcttttcgtttctatcaaggtttgcaggatacttgagacactaatgagcgcaatggcgaaggcataatagtagtagctgaatgataaaggagggcggaagtgatgagatttatacatcagacactggacgggtgagacaagaaagagatcaaagataaagagaagagaactcactcgtcaaatgtccacaaaacgatcgaagccacttggaagatatagaaaggatgcaagacctgaagagaagcgggattcataccattcatccagtcagtcgatcagaggattcctgatatcaacgggtcaagagagagatgaagtagagaaaacaaaggacaaacttcatccatcaaaatactcaacacgccctttccctcgatgtctataacgttgttcccaaacaggatacgtctctggtccctagtagactcatccaatccgctcaagacggctttgatcgatgtccatctatggtctcgccagtctctattcaaatacaggagacaataagcagtctactcccaacggattgaacaagacggagaggaagagaacggacctgatcatcctccaagtacctttaccttcgcctcctcgttcatccaatgcatatcgagtgtatcggtattctacgactttaaggaaccccatggtttcctcccaagtcatacttcccgcctcaatatcgagcggaataaggtcttttgcatctggaacaatagagtgaccggctgggcgagtattcatttgagtaggagtgacggtaccagtagtcgtccgagaggctgtgttggagggagtgcgtagcttaggagggaagacggtggagattgggtaaggatagggtatcgtctggaaaggaatgatgttgatatctttgaatggagtctgtagaagaagagttatacgtcagtaaatctgccatgaagtggaagcaaaagaggagagaggcgaaagtagaaacctacctggacgagaacccatcgttttcccaatttttcgaggccaaactcggtctcctttccaacccagtcgacccagagcgtgggtacccatctgccaacaagtccaagaccacctccggtaaacaacacaccaatccaccaaagagtttccttccacctaacggtttcatacccagtgaaaagtaaggtgagatcctcgtctggaagttcaatcaactgcttacttcccgaaagtggatcaactggaggaaacggttccaccggggtgttctcatccttggccgtcctgatatcactagtgccaggggtccgatggaagagcggatcttcggccaaaagagggaccgtctgtgaggagggtgagtggggggaccgatggataggcacaagatcgttgttgtctgatcgataggattgttgggagtaggtctcactccgggcgtcgtcagagtcagagtcttgatcgttcgagctgtagccccagttgtcgccttcatccgaggagggaatttcggatccatctcgatcagacagagcgacagagcctgctcttgatctgttggaagaccgtttccttcctagcgatggccgtgaatgagaacggtgggacgagaacgatcgctttctattgatgttcgaagacccaccgagagcttcctcatcatcggcgtccttggaagctctaaatccgagcacactggcaataccaccgagcacgcttttccgcttggattccttggcttcttcatctgagccgtaggtatcagtctcgctaccggataactcgtcttgacggttgaaagagtttcgccctcgtcggcctcctgtccctccgtaggttgaacctgcctcagaggaatgaccacgtctaccatcataaccttgcccacgagatatagatgtcctagagtgtgagcgatggagagaaaacgagtttcttggggtggaattcatatgatggtgcatcgttgtgactgaagaagggacagagaaggagccgggtccggaaaagatagcggtctgttggtctaacgaatagagtaaaagacgaagaaaaaagtcagcctgtggcacttcatagtcatggtgatagcaaatagacctggctcttctatctctgtgtccacgctattttctgcccggagagaaggagagaacgaaagataaagagaaaaaagacacaccctcaccctccccgttccaaccgctcatgctatctctcctaccgtctgatctacctctaatctcgattgcttctgccagatcttgctcgcctgctccttcggtgtaatcatgctcaaatgggttgacatcctgagcgtttggctctgggaaggatctctttcccggcatccttggaaggaaaggatagaggaagaatgttggacgtgagtgtgcaagaagagacaaagtagattgaagaacatgacatcaggatcaagccgtgtaaccaactagtacagcattacgtgtttccatagatcacgtgagttgcaaaatcaattacgccacaccgagcaaccctagcgaatatcctccctccgaaatcattctctcggttgctgataataacagccacaccagcgtagatcgcaaaccgtctttctttttcttccctatatatcatctctttacttcgagatggcaatcaacgcaaaactctctcctccaggtaagcaagatgagtctacagagatgcgtctttgatgaaacttttgccagctcttacctctctggttcactccattcgagattgatcttcccgcacgttccatccctttctctcttgactgattctcgttcgatatttcttctcttttattctctctaaacttcgtactcaaaaacgaaccattcagatatgtctctgtacggaggagcagagcttactatgccatccgcttctgagttctcctcctcagcttcgtcggcatcgtccgactctgaactcgatactaactcatcagggctaaagcaacgtaggtcggcatcagccccacaacgcactacctcccaggatgatgacgagcaccagaggatctatggtctcgaacgagcagacttcctttggaccatgaccgaggagcctcaccggtcaagaagactacaaattctcaaagcccacccagaagtttgtctgtcgtttatacctttgcgttcttgtgtactccaattctacgatggctgattctttttctggctctagattaaatctctcatgggctacactccggtgacaaagtatctcgtgcttctcgtggttgctctccagctctcggtctcggtttatcttagagagacccacccgttctctctcaagttcatctcgatcgcctattgtattggaggcaccgccaaccagaacctcttcctcgccattcacgagattgtccacaacctcgccttcaaagggctttggtcaaacaggctgctcgctatgattgctaacctcggaatcggtgtgccttacagcgtagtcttcaaggtgtgtcctcttctctccatctctatcaaaccccctctcgggagctgatcgtcggtttaatgttcgacatgatagaaatatcacctcgagcaccacaagcgaatgggagaggacggagtggacaccgatattccgtgcaaacttgaagcaatgtgcttgaataacgtcgctggaaagacattcttcgcgtaggttcattcttgctgttgttttctccgaacaagacctgctgacaatgtctttcttttttccatagtattttccaaatcctcttctatgcgctccgaccagggttcatccgatctcagggaaagttcaccagagttcacgccttgaacttcgcgatcgttctcaccgtcgatgctctccttgtctggggtacaggaagtttcaaccccatgtattacctgcttatgagtagctttttcgcgggtagtctccatccgttggccggtcactttattggtaggcttctcactcgtcttctccaatgttgcacaccgcgcatgctaaattgctaaagtgatcctgcctgtttgcatgtttcatcacggtagccgaacattatgtatgggaagaagggaacgaacaagagacatactcttactacggatggctcaactggtttgcttacaacgttggttatcacaacgagcatcacgatttccctaacgtcccttggacgaggttagcggacatcaaacggattgccccagagttctacacggacgatgtactcaagtcacatgcttcttggccatatgtgacttatagattcatcaccgatcctaaagttggcatgttttcaaggatcaagagggagaacagaggtgattgagcatgcttctgttcgtcctctatctcagaagagaagacgaaacagaacaaaacataaatagagcggggctctgcagatatcttcctttctcattcactttccgtttctttgctttctttctttcttcttaacttcggcttcatgttcattcttcttgtccgttgggttgtacgcgtttctttctcttgtcgtttctagtttctagtttctagttcaatcttctcttcttggggttctctatctgtccatcttttgctttgcctcgcgtagttcatctggatccaccaacaaaatcaaaaaaaccaaaatcacgaccactactacgttcttttccttcttgcatgtcctctacaaatctctcattctttctctccttccgttcatcggacacataaacggcacgcccggtatatacgttctttacaatccgccccactccttctttgttcttgttcgttccttgccttcccgtctggtcggatatttgaagatacagatgttcagacgttcagacgatcgacgaggttcctaagctgaagattctagaattcaggttcgctctatcgttgatcacatctgagaacaacgccatgagacagcatggtatgtcaaaaggagaagaagggcttatagagatggaagcagatgagtgagcataagtaaagtttatggatacaacattattaaacgaaaattggtttggaatagtgttcttggagatagcgaaccgaatggacagagaaatagattaggggcaaagataagacgaaagaaagaagattctatggctcagataaagatctatcgaatgtaaactgcaacgaaacaaatcatgccgaaaagaacgtcagttgaactggttatcttaatacgagatatcgaagaaagagaaaaaggaaacaaacaggagtgatgaagccagctggatgaagaacgtctgtactctggacgacctgtccttcgccggcgccagcgccgtcccagcctacgaccgagccaagccttgtccttcctaaccaggtcttgatgcgctgtcgtttgttgctatcgccctggtccccgagctgagcctccatccgtccggcctcggccttggcctcaggggttcgagacgttgagattggtggtaacaaacctgacggaaggcaaggccgtcgtcgagattgagtgatcatcgataaaaacctggcatgttcgccttctgtccataatctccatggcgggattctcgccggtcgggtgccggagctcgactggttaaattctccccatggttctaccagacctatcagatgatccactaagccggtgaggtcctcgatctcggcctgtgagcttggaagaggaatcaacgtgctctttactgatgacctgtcggaagggaggaaaccgggaagctgaaagacgagtcgagctgaggattctatcgatcgagaaggaattggcaggagcggactagaaatcgacgaagtcgacaagggcaaaggcgaaggtaaagaaggcgagacagcagaggacgaagatggcgagggcgacatgaacgaaggagaagaggttaaaggcgaagaagacggctgatctattcttgaacgccgggggatgatcagacgcttcctttgtcgagtctttggagatgcgaaagtcaaagactgatctgtcggaatcggcctagtttttcgttcaccgggtttcgccttgtcctggatccacaggacgatggccgaatctggttcgtcctcgatctctgtttcctcaaggccacctttgccgccatcgtcgtcgtcgttgctaccacccccaccacactggatggacactatttgaagtgcgaacgcccaatcagttgagccttcaagtgcaacatacccgatcgaaaacagctcttctactaggtcggcgtatgttcgggcgatgatgtagagcgcacctgtctggaccgggggaatgggtatgactggaatttgagggaaagcgtggagcggagagagagtgggcggtgaggttgtcgttttcccgtaaactacggatgtgtgtgtgtgtgtgtgtgtgtgtgtgtgtgtgtgtgagagagagagagagaatgtaagaagaataagaagaagaaagagggaaaacatgatatgagcatagacagacaagattaaaacaggaaagaaatgcaataaacccactcaatcggccgagctcttcgtcttgactgttctcaatcgcgtcgacaccttcgaccaatcgacccggaaaaagccttgtactgtcattatcaataacatctgcatcaatttccaggatcggacgggcaggtttcatccgaagcactctttcggagggcccatccagatctaaggaccggtcgtcctcagtagttgggggagatgatgtgagaccaggtgtttctacccgcgctttgtctgagcgcaacgatctagagatgattgttcttgcccaaccaagggtgggtgttcgggcgagggcaccggttgactgaatgggaggaccgactggtcgaacagggggtgtatccttggccggagtgagagataacggggcgtgagcttgtgagacgggagtctgttgagtttcgagccgggaggggcctgagtgagatggaggaaggccagggcgaatgggcaatggcggtggtcgatgacgacgatgatggagcgaagaagacaagggcgctatagcaggatgcttggtggattgtctaggagaagctgtcggacgttgtgcttgatctggttgaaattgaagccttttgtattcctcggccagcggtgagacctgagactttttaccgtctttggtgaggaacgaagcttgaagatcctcaaactttcgaacaggaggagagactttccaggatagcgtcaagctatgcttcagcgctcgtgcaatatccgaattgttctcattgtcctcgttatcggcggtctgatcgaacggtctgggacgatccggttggatcgacaaagaatcatgtatgggatgagaggcggagggcgattctgcagtgggtctggagagtgagaccggaaccggatccgagaccgatggaactaacggtccggatgggataatgggaagagcgcgagtttgaggtcgatgagttatcgacggtaggctctgctgctggcttggccaagtattggcatggtgtgtccggccccgtatgaacggaggcgttggcgggggcggtggaagggcgggaagcggcgggagcggaggtgatggtaatggagggagcggaggagtgatacatatcggtggtctagtcggagggacgtgagtgtaggacagtgagagagtcagagggggaggcggggaggggctgataggaggaagtgagacagaaggcagacaagaagggcaaatggggtgatagcttggaggagggagctccgggtacatggtggaggagaagggggaggaggaggtgactggtagattagcagggatgagatgcgagctttgggtgcacgtgcgctcatgaactacagggattgatgatgatggtgatgcccgaag

SEQ ID NO: 2502 - DNA, 57646 bp, Xanthophyllomyces dendrorhous
acaacgacgacgacgacaactttgttgatgatgatgagattgacgagattgacgaaggccaagcgaaagttagagatacggtgactaacggtcgaggccggcgaaaatggtgtgtgctgacaaagcagccgaggcacgccgaagagtaaccaggtaacacacacaggcgatggaaagaagatcagtacgggcccaggtacacaagaaagatatcacgctgcgaacgctgcgcaataggcaccgggtgacacacgtaagccctgtccgcagggttgcgcagcagattactgggttttgtatggagaaagggcctaagatccggtgtggcggcccggcggtgtatgctcttcacgtgtaaattgaccgcgcattcaggtcgcaagatcacgtgcatccgtcctccctgcacccgccgtctgacgcgtgtatcttttttgctattgttgttcgttgctcaagtggaattctccttctgctctctccccccgtctgctttgcttggcctccctcgtttgcttttcctccttcatccagcctgggacacgacagaacatttgttagtgttctccttcttctttctatgtgttgtgtgtgtctgttggaatcaatctgctcctatcagaaaggaaggaagacgaggaaagaaaggaaagaaaaaaaaagggccagctctcccctcgcttactgtgccaagcggggtattaatcccacatcggtagagccctcataacaccgcccgccagctagcctgcctcctcttttcgttcttgccttctctttctttccctccctccttctcctcaaccctgcatttgacagaccctcattgtcaaccctgcagcccgttcatacgtgtttactgtgtgttttctcttgccctcctgctcatcggtccatctcttgtcctgcttttgaacggtacgtctgcgtggtggacgatcggctatctcgctctctctttcacccactcgcatatatatacacacacgcacacaagcacacacacacacacactttttgcctggtcagtatcggtcggtcaccaggttgagtgtatccccttcgaatttccttggcccttttgttgtcgttcgtgcaccaggccatctctctctcgacttatcagaagagaaagaggagaaaaaaacacattcgaaaaaaaacaacaaccacttctcattaccccaaaacgcatctgtacgattacggtcgatgtactgaagcacatcccgcttgcaccctccaacactctcttcttctctcgtcttcacacacacagatactgacttgtgtttgtctctgaattctatttctcttgtcattttcttttcgcttccggtcatccctgcttttccatctctgcatcgtccattcagttcggtcttttgccttctttttgtgtaaaccggtttcccgcagcctagggccccttccttggcctccctttctctcccctctcccttctttcccctatttctttactcgacactccatctccatccctcgagatgtccggctttgaaccacccccgaatgttcagtaccaacagtacccggatccgtccaacccctacggtggaagccatcatcagcagcaacaacaggatgcgtcctacgatgcgtacaggccatccccctcatccgtctcctcagaccactactccagctaccagccaggaggatacagcaactcatctggaccggctcctcctctgaccggaagctacatcccctcccggtcaagcacaccgacatataccgagagtggagctggtcacgccggcatgaggaccactgagccttatgtgggtgttccttgtttactctgcttgtcaatacatatcctaatatagaagtctttctcacccttcttctttccacttgtttactcacatctttcgatctttgtgtgcacctctctgcctctcctctcgtgcctttatgtccacatcatcatctttctctacatctcgatcattcttccgttcgatagccggcctggacgtctgacgccgctattcctctatcaaaagaagaaatcgaggatgtgctgatcgatcttgccaacaagttcggtttccaaaaaggtacgtcttcctggaccttttgctcatgatcatgatcttgctcgtacctgttcaccaattgaccatgcccgtttctcgatctcctttccaatctctctcttattctagactcgtctcgaaacatctttgactttctgatgatccagcttgattcccgagcatcccggatgacaccaaaccaggcgttgcttactctgcacgctgactatatcggtggtcagcacgcaaactaccgaaagtggtacttcgccgctcaactcgacctcgacgacgccattggcaccactcaaaacggtggcactaagaagaagggaacaccttcggaaaagtcactcgattcagctgtcaaccggtggagacaggccatgcacaacatgagccagtacgacaggctccgacagatcgctctcttcctcctctgttggggagaggccgcccaggtcagattcgttccggagtgcctctgcttcattttcaagtgcgcagacgattattaccgttcgccagagtgtcagaacaggatggaacccgtaccggagggactctacctccgagcggttgtcaagccgctctatcgatacatccgagatcaggcttacgaggtcgtcgaaggaaagttcctcaaacgggagaaggaccacgaggacatcgtcggttatgacgacgtcaaccagttattctggtacccggagggtattgcccgtatcgttctcgccgacaaggttcgtttggtagttttcttcaattcccttgtctgttgatgctcttgcctgactcgagcttttcccttccttctgtcccttctaatcttttttccttattcacagacccggctggtggatatccctccggcccagcggttcatgaagtttgacaaaatcgattggaatcgtgcgttcttcaagacgtattttgaaaagcgatcgtttggtcatcttctcgtaaacttcaaccgagtatgggtcacccatatctccatgttctggtattacaccgcctacaactccccgatcatctactcgccctcaaattcgctcagcccggaacgagcgatgacctggtcggtcaccgctctcggtggagcggtctccacgtttatcgagattctcgccactctttacgagttttcatacattcctaccacctggaacaacacctctcatcttagtagaagacttgtcttccttctcatcgttctcggtctgaccgccggcccgacagtctacatcgccgggttcgacgacacctctaaactcgccgtcattcttggtatcgttcagttcggtatctccgtcgtcgctaccgtgctcttttccgtcgtgccgaccgccaggttgttcggtgaccgagtctcgtcaaagtctagaaaatatctcgccaaccaaacgttcactgctgcctacccaaagctcgacaaagggtctagaatggcgagcatcatgctctgggtcctcgtctttggttgcaagctcacagagagttatttcttcctcaccctcagtttcagagattctattcagatcatgacgcctatgcgaatccaaaattgttcggacaagtatcttggtaaccacctgtgcaggtatcacactaccttcaccttgaccatcatgtttgtcatggatctcgtcctcttcttcttggacaccttcctttggtatgcatcttttctcttcctagcccgttcacgagatctcctcccctcatccttgttgagttttacttcattccacaaacaggtttgtcatctggaacacggtgttctccatcggtcgatccttcgctctcggtatgtctgtctggactccttggaaggatatcttcactcgattgcctaagcgaatctatgccaagatcctcgctactggtgatatggaagtgaaatacaagcccaaggttctcgtttcccaagtttggaacgcgattgtgatttcgatgtacagagagcatcttctgtcgatcgatcatgttcaaaagttgctctatcaccaaatcaattcagagaccgagggcaagcgtaccctccgagcccccgcctttttcatctctcagggcgacaagggtctcaaaactgagtttttccccaaaggatccgaggccgaacgacgaattagcttcttctcccaatctctgacaactgcgatacctgaaccgctcccagtggacgcgatgccgacattcactgtgcttgtgccccattattccgagaaaatcctgctctctctccgagagatcatccgagaggaagatcaaaacactagggtgacattgttagaatacttgaagcaactccaccccgttgaatgggataactttgtaaaggacacaaagatcctcgccgaggagtctgccttcagcgcgcctggtggctctccgttcgccgacagtgatgaaaaagcagaatccaaacgggcggatgacatccctttctacaccgttggattcaaatcggccgctccagaatacaccctccgaacgaggatctgggcgtcgctgcgtgcacagacgctctaccgaacggtttccggtatgatgaattacggtaaagcaatcaagttactctaccgggtcgaaaacccggaggtcgttcagctatttggaggaaataccgacaagcttgaacgagagcttgagcgaatgtctcgaagaaagtttaagttctgtatctccatgcagcgatactccaagttcaacaaagaagaaatggaaaatgcggagtttttgttgagagcctacccggatcttcagattgcttatttggacgaggagccccccagaaaggagggtggcgagaccaggttgttctccgccctcattgacggtcactctgagattcttcctggcggacgaagacgacccaagttcagaatcgagttgccaggtaacccgattttgggtgacggaaagtctgataaccagtgagtgtccggtggacctgattggtctgatcctttttcttttctgaccataagttctttttgccaaatttgtttttcctttgcgaaagaaaccacgccatgatcttttacagaggagagtacctccagcttatcgatgccaaccaagataactatctcgaagagtgtcttaagattaggaacgtcctcggagaattcgaagagttcaattcgtcctctcaatcaccttacacccagtggggctcggccgagttcaacaaggccccggtcgctattgttggtgcgagagaatacatcttttcggaaaacattggaatcctcggagacgtcgctgccggaaaggaacagacattcggaacgttggcggccagagcaatggcttggacaggtggaaaacttcattacggtcatcccgatttcttgaacgccatcttcatgaacactcgaggaggagtctccaaagctcagaaaggtctgcatctcaacgaggatatctatgctggaatgaacgcgttcggtcgaggtggtcgaatcaagcactcggagtactaccaggtaagtccttttttttcaagttctcgtgaatgcacactctaaaaatttccccttgcttcctcattactaaaccccccccctttaaataaatagtgcggaaaaggaagagatatgggtttcggaacgatcctcaatttccagacaaaaattggaacgggtatgggagaacagatgctgtccagagagtactactaccttggaactcaacttccgatggatcgattcctcacattctactacggccatcccggtttccatatgaacaatattctcgtcatctttgctgttcagatcttcgtcaccacattggtctacatcgggtccctcaactcttcagtcttggtctgcaggtacaactcgctcggtaacttgatcgctggccaggagggttgccataaccttgaccccgtctaccaatggaccactagatgtattatcagtatcttcttggtcttcctcatcgctttcttgccgttgttccttcagggtgagaggtctttcatttcaaaactgttgggtttctaccaaatatactaacgtacccgacccttattgcttcactgccattagaactttccgagcgtggagctggacgggcgctcatccgtcttggtaaacatttcggatccctgtcgcccgtattcgaggtattttctacccagatttacacccagtcaattctatcaaacttgacgtttggtggagccaggtatatcgctaccggtcgaggttttgctaccacccgaatcaacttctcgatcctctactcccgatttgccggtccttcgatctacatgggtctccgactggccctaatgatgctttacgtgacaacaagtttctggatcgactggttcatctacttctggatcactacctttgcgctctgcgtgtctccgttcttgttcaatccccaccagttctctttctcggactttatcatcgattaccgagaattccttcgatggatgtccaggggtaactctcgaagccataagaactcttgggtcggttactgtcgactctccagaacgagagttaccggtttcaagcgaaagaagcttggacacccgacagaaaaactcgctgcggacgtccctagggcaggctggagaacggtggtctataacgaggttctcggcccgctatgcatggcgatcatcatgacgctgccctatctatttgtcaagtctttcaccgtcaccggtgagaaacaggtctctggtctggttcgaattgcggtgatctcttgtggaccgctggtttggaacatggtcttcctcctcctccttttcctcatctcgctcttcctcggaccgatgcttaacaactgttgtgcaaagttcggagctgtcatggcttctgtcgcccacggagcctccgtaatcggttacatcgctttcttcgagctcttgtggttcctcgaggtgtggaatgcatctcatgcaatcctcggtctggtttcctcgctcttcattcaaaggttcatctacaagttcttcattgccgtcttcctcagcagagagttcaagcacgatgagatcaatcgagcttggtggaccggagtttggtacaaccgaggactcggcacccatgttctcagtcagcccgccagagagtttattgtcaagctggtcgagatgggtctcttcgccacagactttattgcctgtcacgtgcttctcatcttgttgaccgttccgttcttaattcccttcattgaccgacttcactcggtcttgctcttctggcttgctccgtccaagcagatccgaccgccgatctactcgttcaagcagcgaagtcagcgaaggaaaatcgtggcaaagtacacgttgctctacatggtcgtcgtcctgttctttgccgccttgattgctttgcctttggtgttcaaaaacatctttgactttagcagtggcgcgtacacgtggatctaaagtccttttcttgccctattcttttcatatgtgtgtttactctatgtgtttctcttttttcactctgcacattatgtggcaaccctcccgcatttccctctcttctttccttgtcattcgtcatgcataagcaagcatctaggttggcgacatttccttttctctatccaacttttttcttctcctgttttataccctatcccattacagtttttttcttttcttttcttttttttttaaatttcaagtactctctcatcctcggacgctggcttccttttttgccgttttctaccaattttccttcattccataaatctcgaatcatctgtttttcctcttcttttcttctcgcttttttgagaacacgattttcgattatccattcgtccgaccctccccttctgctcctctgcttatccaaggtcacaaaaaccgaaatcggaactggagatcgaaactgaaactgttcaccgcctcgtagaagtcgtacacgaacgtccattctttttgccttcctctctctcctctcctctcctcttttctctctttccccttttccttctcttcttttcttctttgctctgcttccttcttcttttctttcacctatcccctatgtgcccgctccagactgtttttatatcttattcatgtctcccctctcaaacctttcatgccacctatgaattgactcgcttacacagtcacctgtgtctacatatacgtcccataaagatttctcctttttccccccttcgtcaggaacgaagatgagagtggaaataccggcacgaaccggacacgacggacgcggtctcgtagaacatcttctatcttgcgctttgcatctcgcgttttccgactcgcaacaggggtttgtgtttgtctttttacttgtgtgataacgaaagaaggaagaggtaatgtcgagcgaacagattgataaagggaatgcatggtatcgaacaagggtatgtactttaggaaagaaggatacttgaaaaaaacaaaagagagagagaggaggaaggcagagtatgggtggtcgttaagaatgcccagaaatctaaaatcatgcagagacaaaagaaaagaagcaggaccagcctatgcataatggatcgatcgacccggttgttccttgaaatattcaagaaagacaacagagaggagaagaggcaaatggtgatggtgaaggctacagaacgaatgatttgatgaacagacgacgaaaggggtcctgaaacaagaagaagagacaagagagaggaaaagagaagaatgtgcgccctcaaaaggggaaggttaagtaaagaacgaatccgtcaacctgttttcctccggatcagctgctttctgtcttgttttcccatttaattctctcgcgagctgttcagccagaagaaagtcgttcaggattggaaacagtcagctcaaaaacaaatctttgggggccacaaagcaaaggacaaaatatacgaggcaggatcgggaaggaatacgaacctcagccgctatcaatgaaacaaacgtaagcatcgtggaagcaatcggtgattgaggaaacgacgaaatagatctagtcaggttttcttttctatagagcacagtaaggataggatgatcagaatcgacgaccacatacgggtatagatcttcggtgccgccgctgagtagaggagaaacagaggatagcgcgagaaaagcatcatcagcctatttgtttaggaatatttgagaagaagtacgaagtatttctaaccttctctagccggaccgtcgtctaccggtacagcgtctctgtcagcatgcttctttctgatggtcaagcctctcttgaccttcccccatcctctccctcctgcttcagcggccggcgcatgctgttcactaattgcccgatcaacggcagatgaatcttcttgcaagggacccctgacatcaaccgagagaggatccgatggatcctgagccaattgatcatgcgtccacagaggtaattgatgtgatcggtgctcagacttattatggcggtggcttacttgtggattcgaagagcttggaacggagaccgaggcgtacgacccatctcgaaggcgaaccatgttagcggaaggcatagggggtgacgacatcgggggctgggacgacgacgatagagacgtctgaccgtgagaatgggcagaagtttcggtttgcgacctagagtgagaaacttttctagggacctgtacaggttttgtgtgaacatgaagatatggataggttggacgacaatgatccgggtggaatgaacagatagagaaaacttcgaaacgtatcagagtcattcaggaacgcttgtgtacgattcgcctcgactagatcaacaatcttctcccgcgtgattcttttgttctttcaaagaaactatcactgcgagctatttttcacgcgaggaaacgggagatgaagaaaaaagatctaatcagacgaaccttttgatcttctagtgcaggcggtaagacttctccagacggcccaatagccgagaacggggccactcctgccttggccacaggttcactgcccatgtgagctctcgcccgttctctcaacgtgcccgctctagagactttcggaacgttctccatcccacccgtccatggatcagctatggtcggtggatctttagagggggcatctcgtttggacttctttgaggtgagtgaccgaaggagacctttgctttcgagcatggaacagaacgctcaaggagaatttcgtttgaaatatagaaagagggaacgaaaggaattgtcgaactggtggccgcgtcgatatggttccaacccaaatggaaaggttaatggagtggttgcaagaatgaggaaacaacgaaggaaggaagaacagaggaggtgagttttgtttgaatcaaagagactctgaaacgaggtgcttctcccgagacggggctccacgatttagcacgcgcgcataaccatctcgtcatcatactatcagacaccatcgatggtgacaacgagcgaaactcgaactcgagagaaagttcaaagaaacaggaagcaaggagaaggagggagagcaaaagtgattattttttgggggagggagatagagagataaagtagaaaagagattgacagaaaggcaagcagacaagcaagagatcaagacaaagctcggtagagaaaagacaacgcagctcacacttgaaaatatggttggtacaatatggaggatctcacagagtagatcaagaacagacaagcgagaagaaaatccagagagaatacggatgcaaacgaaatatagactgcagatagaccggataaatacttgaagaaagaataaacaaaatataaagaaaatgatatggagaaagaggcggaaacggatgaaagaaaggattatgccagctaccagatcccactctgtccctggggggaagaagaattagcagacattggtctctggctattatcgtcaaatatccatgtagaatacggagcaataggtcgaccctgctgaggggcgtggattgaatcacagagaccttgaccaactggaagcgatgatgtctggattctgtgtccactgctcaaaactgagtgacctggtgctccttcgttggaagaacttgatgagcttggtcgaggctgctgcagactgtttcctggataagtacgtgggccccagctgtcgataggcgaggtccggccttggtcgatgatgccattcatatgtcgggaaccagggggcgtcgatatcaattctggaatagggtacgagttcacggtcagcgagtccgatcgatcacgctgtctcatcataccggaccgataatcaacaggactgagagcaacattcaatcctgagggaccacgagtgttcgcgcttgaactgatcgtcgtaggataagtcgaggctcgatggtgctggtagcccaacgggctatgtcttccaagtgcagaaaccgggctaaggtcctgcgtgacatcttttgtcgacggctgaaagtatggttgggctctgctagaagcaatttcaggggtgttgattctagacaaaaaaaaagacgggtaaccagaggaatacaattagaacacatggaagaaaaactgagaaacaaggcgtctttgttcacttacccagagactatactctcattcccatttagggccatacgagctcgcaggatgtctcgcaaggccgctggagtgcccaattcgcctaattgtaagtcaagccacaaagagaaagaaacgatcggggatcagtcgtggtcaaaacaatggccctagacatttgccatgagatttaccaagttctgggattcctccaaccggtatatcgttgtgaaggaaacagcatctgacaaaacaaacgttttgggcgagatcagcgttacatcctcacatataaattgcgaataaaatgaaacagccaaacgtagacacatctcaccttcgaccgtaggcacatcgtccgaacaaccagaaaacagtgcatatctgcgttttgtactaaaaccacatggacaaggatgggagcggaaaaaggggaagagtaatggggatgcagcagatcgctgatgtcagaaatgtgcgttcataaatatccgggaaattcatgcggcccgaccccgcatatgaaacaaaagaggggcaaactttaggatgtcgatctacgggccggatttcctcagtcccatgtgcgtactgtacacaaaatatatagaggccgaactcagaattcattctagctcaaaagaaggccaaatctattgaccgaaggaacaagaagagcttcgctaacctggcatttatttccatattgacacctctcctcggccgttctagcattggtgttacgctcccaagtacctaggcattatgagcacacacgagcggaggagaccgagatgtatcggaaatgtgaaatcagaataacgaaaaagtaagctccgatacgcggtaaatgatacggaggaaatgtgcgaacaagccacgacgtacgacatagctcagtcttgtataatttagcctttttgttggtaggactgggaccatcaaggggaagaccatggtccaaaagatatctttgcagagcaggatccatgacgatggggttgatcccatgtcctagacctgttgtgccaattaaactcgcaagtggtgtaagaggtccctcgatagctaagccacggccgctaggaacccgctggccattcaaccccaaaattgaagtttctagactgggaaggtaattgtcttctaaactattgtttgcaccatcgtccttgtgtatcccaaaaaccccagggtgaagatgttggattgcctgaaagcgagtgaggagttccgatttattcgtcgcaacagaactagggggggaggggccagatgagaagccatgcgatgggcgcccatcggggtcgtaggccagcatggaggttgtggtgtgagtaagattggagaaaaaggtggaagttgaaggagaaacaacaaaatcgccgtcgcctccgacttcttccttagaatttccgggatcagagacgaaagtcttacccagcttctggttcaaagcaaacatggaaccggagggaaagggggccggatttgtttcattagatccgtaatcaggctgacgagtttgatcttgtttatctgagtcaagaaaggtgggtacagcaagactattcggagaattttctgtatggatcgagcgcagctgataagcactcggttgaaataaccgaagattggattggagatttttttgttgttgttgccgccgagatatctgttgttgaagcagtaccgcttgtcgctgaatgtctctaaggcttttaggctcctcatcggaagcaatctcaaacttattgatatcatgattgaacggaactgtcggacaatgagatggctgagacgaccaccggtcatcgctaaaatagggatccgatgtgatagagcgggaacctagatcgatgatagagcttatatcccttcccgaggattcccagatcatggcagaaccaatctgtcgatattgttgagacaaatgagcatctccgagtgaccggagaaagtcgtaatctgtagaaataggagtcgtctgatattggccactcaaaactgattcttcaacccatccagggacgctagacggggtcgggaaatttgagatatcatgatccgttgcttgctgtatggcggtcgatctagttgtggatgcagtggtcgaatactgatgcccagcagctatctcgtaagcgttcctctgtggggaagggacaacagttatccttcgaacttgagaagcattgatggtagagggagagttgcctggagcccaccgtgagctggaaagtcctcgtgttcgtcgagcagagacatccctgcgaccgcagcaaataagcaaagattgcaatactctttttgagggtgataaaacacactagaattgaaacttactcatgatcagatttcgtcttcgttgcaagactctcgggcgaccctccttccttttccgagcagtctttcagctgtatcttggtgtcaatctcagcggcagtgataaggcagggtgttcgacaagggaccaagggcgcacaaccttcaagtatctcgagtgaaggctggtctacgtgattcgagatatagtccatgtcgtcaaggcgaaattcaaggcaagtgatcgtttatcgaagaggttatcagacgtgctataatcttaggagaagaatagatgaagccgtctcaagcgacatcagctacgtgtcaagagcacttgataaagaaatgggtatatgcgctatggtctttttgaaaagatgaatggacctggtgatgacttcgaaacttggttcatcagagaatcatcactcacactctgccggagtagattttacagaactcgaaagtgatggttgtcaaagaaagggtgttgacgtccttatcaaatcttgacacacaaaacaccacagcggaagtcgcaccaaattaacggacaaagacagatagtggacgaaggaaaggatcaccttactcaggtattctccaagttgattacaaccttatgtaaacgtttgcgtctggattgacagcgctttatgttgagctgtgatcaatgctgacgacagtctgaggagtgcaggggactgtgcaaaggagagagtatcccaacaaggagtgaaaaccccgtcagaaacatcagattgacaggcagagctatgatgcaaacgttgagctttgtcgttaccaggttaataatcttaatgatagacgtctgaatcagggggtgatgaactatccgtcaaagaaaataaaatcagagaaagagaagaaaggcggttgagaacaagaagagaacagatgagatgggaaaggttaacgagagaacagaggacaagaaagaaggaagagagtgctggactgagggtcgttccttttaaggacgcctagaggtaagagtgacagaaccttgatgatgacaggaattgtcgttgcgcgccattctttctcgtgcctggcctgatttgtgcatttccatggaacgatcggatgagatcacataccgacagaactcggtcgaccggagcgaaggatagacggatagtcagatcatttgtcgtcctactcaaacggtgcttgagtcgtcagcgttcgatgcaggtgtttcatcaggttaggtttgagacaaaaaaccagacgaaagtggttcatcggtcgaccgttagtgaggacaagtcgacagatgtttttctttgtgcaggtggacaaaagaagaaagttattgcacgtgcacactgtctgtaaccaaactttgaggctagtattgccacgcttttcgaagacgcaagtgaatgttcatacaggccagcctctctgtttaaatatcttctttaatgtcctaaaccagcccagccgccatcactctcaacacccttcactttgtgatcagccaggttcgggtttgcctcgtaaaccactcctttcggaacgtcccgtctgagtttgagggcttcacctgagaaggacatgtaggtcacccggattgggctatcttcttcgtatgaaattgaagtcggtgtaggaaaatgtagagtaaggtgtgttattgatgagaacttggccacgctggtcaggacggtcaaataattcatgagagaaaacagtcagtcagccatacatattaaagactatactgaggatagattcgccacatggcccagcaaaacgaagcgtgtgatggaaaaagggaacataccggacatcatacgggacagcctcggacgtatctaccaagtcgaatgattgcgtcggtctcaacccctccaaatcggaaaagtcaggtgaagcgttggcgtactgaaatatacatatcagtacaaagcgtgacagctcggtgaagtctcagtgcatcatatcgaacagaaagaaagaggttcaagcagattgcacatacaatgtgaatcttttccgggccgctgataccttctcctccaattctaagcgtgatagatcgtagtttgacagtatcgacgaacggtactgttctcgccatatcaacccttctcagccgaagttcgaacgacaatgcaaaggataaaggaacaattcacctactgcgaatcatcatctcgccgtcttcctcactttgacaatataaagtgtcgtcatctatcatatccctaggtctagcagtcagagcaaaagttcagtcgatatacctatgggtgagaagcaaacatatgcataccaacttgatgatttctctgcccatctcttctctctctgtgttgagagcaatgatgttctctcctgaatatgatacaccgagatacagtctcagcagctaccgttgcacattgagagtcgctcgattcactcacggtcgattaccgagtaaagactttgctgctctccatcgttaggcaaatgatgatcatgatcgtgttcatctccacagccgccgctgttgctaccactaccctcaccggtatgagagtggccagcatgatcgtgcgaattattgtgagacatgccgacaagagagagaaaagaaaggatcagacgtatacgtgtgtgtttgattaatagaacagattcactgacatcacctttgaatatcgagtcgagaccgatgaagcccgcctggtatattctaaacgggcatatctgggtacactttgggcaactccgggggtagatcacctttaccatatacgctcgttctctttgatctcattctctctctacaattccttccctcaggacctcattctacacctgactacttgactaactctcctcaagatggatattcgttgtgcaactgtgagagctctagttccttttgaatgtctcctttttttttgttaggggtcccgtcaaggctaactcaaagttctttcttttcattttggatttacactcaaaaaggtcgaagacctgttcgcacatattctctttcctcaccttgtggaatgatctactgatcgctatctatcatcggatcacacgttatctttacaggatagggatgcagaatgccaacatcttcaacctaccagagaactacacgatgaaatactgttcgccccaacctactttctcctacctctctacttcccctatatttcggctcaaatatataccttcaatgctgattacttctctctcttgttttgtctcacccaatgatgttctgaaacatagacctttatcatgccctctcatggcctcagatttcttacgtagcagaggacaaagcgacaggcaagatcgtcgggtatattctcgccaaaatgtaagcccgctcgcttttcttaacctcactcttcattctttttccttcttttttctacaccctttggataatgaattgctcaatcgttctccgacttgaattcttcaactgattcgactgtatgatgaacatttggatactcgttcccatagggatgaagatgccgaagctgatgatccccacggacatgtcacctcaatatcggtccttcgaacgcatcgacggctgggtatagccaacaagcttatgaaacaatcccgttagtcttcttggctttctttagcctatctatttactcctacccttcttgtaccaactatctactcctcgtaagatgtcaacagctgtactcaaagagcatgtaggctgattgtccggtctcaattcattcttctattgacataatctgattacagaggaagcaatggccgcgatatacaaagccaaatacgtttctctccatgttcgacaaacaaacagggcggctatcagtctttacagggattcgttaggcttcaaggttgttgatgttgagaaaggatactgtaggcaaacttctttttattcttctttaggggacggaggggtctgaattaaaaatgaagtatcttgaactgactgttatcgtgtctctcatttcctctgattttgattctacgtgtgagtagatgctgacggcgagaatgcgttttctatgaagctcttcttttgaatgatatgttccaagaatcaagaatcaagaatcgctccggaccacatggtctacgtactcttccgactgggacaatataagaattttgagtaagctcatacatagatacaacttaacagacggcttaaaaatgagaaggctatgaacatatagtagaatagattgtcggttgaagaaaataagcaagaggaagcgagtagggacaacgtctttgataagacggttcaagttgatcaccaaggaagttgaagaggagctagattcgtgatataaaaaaaacactaggtcaagataaagaacgctcgtatatttgcccccatcatcttgccctattggatcgggagagggcatggcgtgaacggactaagaaggagaaggacgaactaggaagatcctttccaagaacctcctcagcattcccaattcccttcggacccatcggcgcccagaactggcctgtgtgtttgagcgtgacggtgtctacaaaatcaaggaaaattggcgctgcaacttcaggcttgaccgcttatttcgttcgatgaatttgagaaggaagagaacgatatgtattccaatcagtaaccttaattccaatacaggtctatcgagacagatacaattcatgatgcttacctccacccttcttgtaatggtctttcatacctccggtcatatcggtgatgaggaacccaggctacatacccaacgtagattgaccgataagttcaattgtatcagtttgcagatcttaagatgctagtagcaaaccacttttctcacatgaatcatcacaacggtgactcctttaggtttgagatcataggacaataaatgtccaaccatattcgccgcagctttgctgccatggtgaccaaacatgccccctccttcctctgttcgtccagagcatcgataaaaacaaaagggttcatgtttagccaatcgtgctcaatggatggcaagaagaagagtgcctactgcagatagactgactttcggttcggagcgtgatcgaccctccttcggaagtgagcaggatcaacttggcgttggatgcgaaagatgatttagagctgatacacatatccaaatatgtggagtcaatagagcggttcgttgataggagttaatcatcggtgaaacccacagcgcagaagtgatgaatactggcccaacagcgcagatcttgtacctgaatacggcagaaatcccagatagatatgccgaattagtattggtatcaagatcgagcctttgacagaggaaatatacaactatcttacatatccatctctgcttgaaaatcaggctctttgaacgtctaataatatcatacgttaagggcatggatgagtgaaaaggatgccatgatccttgattaatcggctgatccatgtccttacctcttctttgagcaaaccagctacgatgaccgtgagatccaacttggcgccttcaagtttctcaaccagtgttttgcccgcaccgggctcacccacatcgatcccttcgattacgtgaactccgtcaggaaaggttccctctttagctggagacctggtggtcgcatacctgttacagcccaggaaagcaacagatccgatcagtcaaggtcagggtagatgaaagcgtgtcgagggagattgacagatgcaacacgtacacggtggtccctcgcttgtgtaactcttttgttagggcaagaccaagacctctgttggcgcctacaatgagcgctttgagcggagcgtatgccatttctttgagatgcgaaccgttgtatataacagattcagatgagggtgatgatgtggtggaaagatcgaattgcaagaatctcacggtcgatcgaatcatgtaatctaatcacataaaaaagagcagttaagtttccttcttcccatccgttcttcggccgttcttcagccttcgctccttctcaaccctcttggttcctttgccttctctccttatacatttatctcacatacccatccttcgttgtaatctttaacctgtctcacgctgagtcagaaatgaaagacttgatcggacctctatgtgtgttgtgagtcaacgatcgattgtgttctgacagtgagagaaacaaccatgcgctagttcattctgatctctggccatgactcgaccacatctgaggatagttgcggctcatccaacggaaaagatgaagcatatagatctgcagccagatgtatgtgtatgaaagctttccgtgcgtataactccctaaactcactcatatctatctcttcttttttggtacagctgttggcaaggccttagccgaagcaaacatccctttgatctacggagggggaacatctggactgatggggctgaccgcggcttctgcggtcgaagcgggaggtgaagttcatgggatcattcctagagcttttctgggcccgggtgagcagggcgtgccaaccttgtcggacaaggatgagtcaacaggtcgaacaggtcagctgaagggcggaaaaacctcggttgtcggtggaatgcacgaggtgaaatacatctttgctactcgttattgtaaagttcttgttgattgacctttttcccgagatgtcttttctcatctttgttgagagcagaggaagacgctgatggcaaagttggcgacgggtggattcgtcgtgttgcctggaggatttggaacttttgaagaagtgagctactatgttacttctctctttctttttctatacactggcctttttggactgacttgagtcttgcaaatttattcacgatcgataggcgatggaaatgacgacgtggtctcaactcggaattcatttcaaccgaccggtattgattctttccgttcgaggtttctatgctccattgaaggaacaaatcttgttggcttgcagggaaggatttatacatgtacgttcgcacgtccacttgacgaatcgtctttatgaatttagtttctcatgtctttgggtgctcaacggcgattcaactttcatcaaacaaggaaaagaatctgggtttgatcaagtttgtcgaggcagaagatgtacgtcctgaagtacatgtgcctttcttttgtctgtacacgatatactaactacgttcctgattcgatttgactgacggaccataggaagcggattggggtgcactcacagtcaagacgttcagggaatgggaatgggatgcggatgctggctacaaggggttggactgggcttcttcgtagatgtacaggactagatgggtgattctacacggataaatgtactgatgcaatatccagactcttgaacgtggagcgtcggagagaagcgatcaactaatcgtagcgagaaacacaatttgatcacatagaatatagacgcgcctgctttttcccacttcgccatctcttcactcccgatctcgatgaactaacagatgaaaaccattcatcgagtaatctctggccatctactcttccttttcaatgtgaccgatcgatcctgcctgatcgtcttttgtttgatatcgtgtgacctaacttacatcacctcttttgttatcgatcatcctcactgacagattagaccaaccccgatcacactagcagttctcatgcatgcagatgataatcattccactccatcatatcacgtcacatcgaacacgacttccgatctcgagagccctgtttgttattcatgatgttgacgacaggtctgatccttcgcttcaaggtcttgtcaaaagtctatataaacgatgtgtggatggtctggtcttgtgcacttatcaccatcacatatcctctctaactgaatccaaatcgatccaaccaaactcttatacgtttcaaccttacacaccaacatgtctgaagcacaagttcttggaggatacaaggccaccttgtccaaccctaacacctccgatgaggccaaggttcgtatgcttcttctcttgctcctgcccagacatgatctctttgaattcgttcactatttcccattcttccaggagcacgcccagcaagttcttgacggatcggctgagcctacttcccactccactggttcttccgaggaagccaaccagggcaacgtccttgggtcagtctttgtctgacatctacgtctagttcatctttctcataaccactccgttcctaacggttcaatctcttctttctccttgtctgttcaatctttagtggtcacaaagccaacctcgcgaaccccaacacgtcggaggagtccaaggagaactcccgaaagattctggaggatgctcgtgcttaaatatcgagcccactgtacactcgactcgctcaatcactgtattttgtgctttgcctatgtatgaagtaatagcctttgctttcgttccctcgttctttgtttctttctaacattcaaatcaattcttcaggagatttatcaggatcaaagtcgatacatcgcgatatgctacataaaaaaagtactataatgatacagtggataaacagaacgttaaatatcgtgtccagcacgaattcgacaagaaacgatcgaactaaacaaatcgaatatacgtattaagaagaaggaaatgaagttgaggggggaaaactatctagagccctcggtagagtccaacctgggcatccattcgaacagcctggccaagcgtaaaccccgtcatgcatgagtcgtaactgtaatccatgaactacataaaatccacgatacattgatcagttcttctctgtccaattatgtctttgcgcaaagaacaggattagggtgacaagaggaaacaaacgttactgatcaaatcatcttggcttccagggcaagttctctttcctacagggcatccctgggtgggaacaccctctgagggagtgtctgacacgaagtctccatcgccggagcagccgccttgaaaggtactttgggagataagagagaaacccgacaaagatgtatgagttcggaagtttagtaaagagtagaacagttgagaagaactgaagagaaagcgtactggtataatcctaaccagtgtccaatctaagcgagatgcgcgatagcttgttgtcaggatatattggaccgatcatagggaatagaagagaagcgaatggcaagatcaaacctcatgcacggctgttcttcccagattgtaattcgtagtagactatatgaagaagaacatggaggtagacgcaaaggctcagaagatccacccgtataagagcaaaagtcaagtgaaaggaagatcgagatagaaaacttacccctcctggcagagagctgaagagaacaacaacgccatcgtctttaggtgcactcgcgtacgtcgagggaaatgttgcatatcccaatagacccttgccgctgcctgatttgaatccagaggtgtacagattcaacgaagcagatccgcctttacgaagagcggctttcatctctgcctgttgagtgctagatataaacaaccagagtggttaggaaggcctaaatcataaaagttgaatggaaaacctggagcaggactcacgtttcaggaccaacgttgttgaaccagtcagagttcaccgtccagtctgtagagactggtttggtgagaacgttgcaagaataagagggggagagaatcatggtcaactttgattacagtagtcaagaagatcaggaacgatgcatacttaaagagaacccaaaattggatgacgcgtagtcgtcgttgaggacgccgatttgatcgttgaccatctcggaggtaaggtaaccaccggataaatctggtacaggaaagatattacccaagagactcaacagctttgagtatatcagatcacggtagattccattgaatagttataaataacaaaccggtggattcagaaatcacatgaaagtacacgtcgatagtcgttgttgatcgtggtaggaccggcctggagatagtgcggaagcgctcaatctcttttaccctcgcttctcttcagataccacagaatcaaatacatacgcttgtcagtcgatattgacaagaagtgtgacatattaggtgcttacacggcctgatcgatatcggccgcattggagtgagttgtaccgcatcgagtaacagcgggagtcatatgggagcttggagcggcccaaacgcctagttgagccatcatgcccaaagagatggaagagacaaagagtgctgagtttcccatagcaaggatttgacgtgatagaacagggatggggattaaatataaacgagtgtggggatgatgtatctagatggaaccagccgaagaagagaagaaagcctgttgaaaagaaaagaaagttaagtaaggaagtgttagtaggtaaagaacgatggatataaaataaaagagacttcctttttctttcccaaggaagcaatctcttttatacagttcatccataggcgggtagagtaagaagggagcgaatttcaaaagcggatagactaattcgtcatagctacccgccgaattggtggtgttgagaacgggagacgccttttcgtgaattcggaggcgggaataagcggaatatatatgtgtatagagtgagcatagcagggtatctcgagttgattagatgaaagcgaacaaaatcgacaattgagtaggtgtgccgacgaagatgttgagcgaaaaacaaatcgaatcaagcatttttaggcaatgacaatcagattagatagtagctgttcatcatgttacatataattaatggttacagttcgatcgcttgccattgtccgatcatacgcgagaatgcgcggtctgagcaacacacccgaagaacccgatgtttagatttcctccttcagacggcgaggtcgaataactaacttcgtgataaacacaggcatctatgctgttctctctattctgatattaattaatatcgccgaggacgcgtactacagaaacagaacccccaaggtggaaatattaccttctgtgttctgaacgccttgcctctttgatccacgaccacgaccacgattataatctggaagcttgttctttccatctcctgttcattgctgtcgagactctcttccgctcataatcttacgaaaattttcgtccacagatctttatctcaaagtgtgaacagctcgaagtcgaaacctattgacggcaaggtccacttcaaaatatttcttcctttaggacaatgggtcagtttatctcggtatggttccactttgagagaggatcagaggctcatactacttaatatagatctctctggatttcttatagatccttcttcaggtgaacccttgtcaggcaagtcccgaaggtttttaattatacaacatttcgcatgtgctcgttctgtctcgggacaagttctaactcgatcttgtctcgactcatccttcgtacccagacctctcactctctctgtccgagattcctcctatacctcgtcaacctcgcgagcgtcctgtttttcgtcgattcgcttcagactcatctgccacttccttctcctccaccttgacccaatcgtcttcggtgtcacccgtctcgtccacctcgaggtcctctgcttcgtcacctaccggtctaaatacattgccatcaccaaaagcaacaacaccgacagcaacgtcttccttatccgccctaccccgtccaactcgaccaggcggtcgctctacgacaagaacatcctttgtcggctcagccagtgaatttctccgggcagccccagcacaggcaccggtgcctgaacgattaaaaaactcggtgttgattacgtgggatcaatctcctttccatcatcgagccaccggttcctccggcaggtcggtccatcctaatcactcgagttatcagggtaatttatctggtggttctcgatttagtggtccgccaatttctcctaattcacctccaagtccgtcgacaccgtccagctcggcatcctgttacttttcctctgccaattctggtagtcaaaattggatgccttacggtcaggacaccatccctttggcaggcgctaagtctaatcgggtagaaaaggagcaggctagacggaagcttgactgcgaggcatactcagcctgggttgggccgtctgctggaccggacgaacgagtgagtagcgggatggggagtcaggcatggggagatatggggttgaatctagatagtctcgatgaattgatgagcggaggaccaaagggtcgcgtgaggagcagaagccgataaatcttccttgttgaagaaaggactaaacctcatttgttttcttctatgatttctctcccatgttatcttatccttatattccgatcgctgtttcgtgttcgttttcgttcggatccgtatgttgttgtatatatatatgtgtgtactttcctccatatagatggctgtcctttttctggatttcttttacggataagaaggagccagtcgtaagcgaatcgtcttctcttcatcttgataaaacatttctaaatgccagcgaattccaatctgtttcccgcaaaatccctgatgaagaacctgtcccccttccgacttccaaacaccacttgttctctcgactctccttcaggggtggccaacataggtgattgatcgcgagtgacagcggagcaggcggcaggatgacctgatgtagcaaactcgtccagtcgatcagccagaacagcaagatcggtgtatggaaggacgaagcagggatgttgtcggccggaagatcgaatttcgaatgtatccttagatgatacgtattccaaagagatatgaatctggattggccatgcgccacagcgggaacaaagatgatgcccatacgagagacgagaataaagaaagagttagcaaagttgaatcttggttcttgcaaaacatgattcgaattcctacttgttgaccggatattcccagtgcgaaccaacgaagtttgccgatcatatcagaaggaacgtcgtcttgttctttagtgttgtcatccaaccacccgggtccccaagtccgaatttggtcagtcactagtggacaccagaatgacattcagaagagatcctactcagtccaataacttcgccgtaaagtttatcagccaactccaacggatcttgatccttccaatccgaacgaccgctatagacatttggttgaccaatcagtaattgctatcaaggtagttttattatgaatctgaatgaaaccagggtgatagagaaaaagagaaagacgtacacagtgagattaacgtgttgaaggcctgtaatcaaggttcccatacgatttttagttgggtgacagagattcgaatcagaccattcgttgtcaaaaatcaacgccagaaccatctggaaaaatataaaactatcagacgaaggaagggagaaaatcactgaccagtgagcatattgtattcggttgtatgagactgatggagtgtgggtgtgattgttgaagtggagaactccatcgattgaaaatcgaaactagatgaaccggacatcggcccggttctctcgttctcttcatccagaaccgcgttctgtttcgttgtctctgtcgcagatacatctagacatgtacattttctgatcgaatcacattctatgagatagaatcgcatatatacacaacaatttatatattattagttcattgagcttgcctcaatcagcataaagacgtcaattatagataaagagcaaggatgacacgcgagataagataagaagaggtagattaaaaacgagaaagaatgtatcaagggacatgaacaacaatcttcccgcaagccttattggttttcattcggtcgaaagcagcaaacagaccagcttgatcgaagccgtaagtagaatctacgtccacgcgaagtttttctgaagaacgatcagcagagaacagaagaatctgtgagctttgaaacttcgtactcgtctatgaatgaagggacatgaagtaagaataaaagaggggaagaaaaagagggatgaaccttcggaagcaagctttgctaacgtattcaactgggttttgttcgattttgtggttacaaacttccactttctgttgacccctcctagccatgtcggacggaccgcgacgttgaataagaggaacaaaaacctcatctttgagcccaatcctttagggaggtctatcgagatggtcaagaacaaccctttcggattcagtaccggagccgatcgcgggaaaaagttgagaatgttcccgacaacgtcgtatattgcgtcgaacggatttgacgtgtagttcttgacgaggtacgaaggtaggtcaactcttttgtagtcaatgatctgtcaagccaaagatcaatgcatcaaggagcagaagtgaacaagaagaagatatttctcactccaaagtagagaagtttaggatcgtacctcgtctgctccaaaagatttcactttgagagcattttctccggagcatgaggtcacaacgtatgctccgagattttttgcgatctgaatggcgaatcttccgacagtggaattccctccgttgatgaacagacgctgaccagcggtgattttgcattggtcgaccaaacctatgtaacaatcaaaaatcggtgtcagtatgtttaatctgtttcggaagttgagtcaagaatcgataacaggatggaccttgatatgcagtaagtccggccagggtgattcctgcagcctcgtcagcagtgatgttttttggcttatgggctaaattctcggtctgtaagaggcatggaagagagtaagtatcatgttgtatgatgaaagatcgaaaatagaatcggcaccaactttgacgaggatgtattgaccaagcgcgcctctgcctttcttgaggcagtcctcaaacgtggacactaagcagaattggacgcgtgcatcccatagtgttcagtcattcgacgcgcctctgtatgatgagtaactagagaccgccttacttccaaagacttcgtctccaatttgaaattcagaatcattcgggttaaggatctctccgcagagatcgttctcaagcatagctgatgagaaaacagaagtccgagtcagtttggagtgaagcatgtgctgcatattgattaggcgtgggtttacttgggaactttctggcgaacgatgggatggtagacatggtcttgacacccaaaggattcaacgcaactgcgcgaactctaacgagaacatggcctggttcaagagctgggataggggcctgagtgttgagttcgatggactttgtgtggtcaccgcgccttttttgcaaccagacttgttggacaggaggaagagatgccatgaataaatcggagagtacaggtgactttagggatgaagagtgcaggagatatgagaaaacagatgaagtattttctcagagtatgctctcgctccatccatcgttgcttttatcttgtgggattgcttcactctgtcgatgtctaatatgatgtctttcaatacatttcttactaccctgttgattctcaacaattgttggagtcgagtaggttttttcggcgatgtctgcccggctggccgatctagggttaccagagttacatccataggggttgaatggccaaatttggcgcagcattccagctgcatatcgaacgtcatcggccttccccgaacagatcaatttctcggcgttctcaacgctttcagaccgaacttttgttcggattcttcggtgacacacctttctccttactggggtaacctctttctcggagtgatctcgatgtgcatgcccgaggatcgaagaaagcgatgcagggaaagccaaggaggaacccgatggaaacatgcataaaagatacagctcagatactgggatgaatcctgtttatcgtcttgacaaacccaatacctctgttatattcatcaagcgtaaagtaattttcataacgaaacagcatcgacatgtctttctctctcgataacgatacacttgctgggatcattaatccgaacatcaactcgcccaacctaatcagcggacagatcgagtgtgagtctgagcactttcactcttttttcttatcctactcttttcctgtggtatcttgattcaaaactgagcagcatcgtgtcttacaacaaaagatgcgaattacaactacaatatacacatttcgtcggcggtcgtgtttaccgtcctatttggactcctcagttgtaagacagactttttagacctttttactgacaacacctgtgtatctgggctaagattcgcgcgccgtcttgttcctatagccatccatctataccaagcaattcgatcacgatactggttcttgctctatactgtctctctgggtggattcatagagatgggtggttgggctggcagacttgcctcagccacaagcaccaaatgggatcctactttcggtggctactgggctagtacagatggcgctttccttgcacagtaggtctctttctgataccttccgtgggtgtattttcgggcatttaatcaaccgttgaacttcttcactttaacatctctcaggatctgtatgctcatcttcgcgccagccttcatcgtcgctgggtgctatgtaattcttggagtggtcatctcgagatgtggatatcagtactgcagactacacccaaagacgtacacaatcatgttccgtgtgtcctctttgcctactctagctgtgcttcctacacatctgactgatctttcggatcattttatcaactttgacagttgctggagatctcacctctgttagtagctgcttatattcttcatattactctaatcataccttatattgctggtattaaccgttctgttgtctcttgtatcggctcgctcaagcttgtgattcaagccattggaggaggtgtcgccgcttcagcagacacccactcccaggccgatcaaggagttcgtttcatcttcaccttttcttttcaatctggatcgaatgtgactgattcattcttcaccggtattatcaggctcgaatcatggttggcggtgtcatcttccagatgggtgagtctgcttacacatatccactcacgtctagatgaatcgcactctaaccgtagcattactctcatcgactccttcatactagtcgtgatggttgcctacacatacctcctcctcgagttctcctaccgatacatctacaaccagccgacgacccagctctcgccgtttgcatggatgacaaagaagacaagagagaacgcgcggcgacaggccgaggagaacaggctggcgacggcgtcttcttgcgccgcccgtggcagcgtggaagacaagcggacgcgatatcagctgatgggagtaggcggggtaacactgtttatcttcattcggtatgtctccttgttatgtctctgtgtctcctggccctgtgttcgtccggctactgaccggtcgatctcgttcctattcaatcttcttcctctgcaactgttcaaatagatcaatctatcgaagtacgtcgcgtaacaccatcacgcggcccattctgttctgtccaagtattcacaagtttgtctcttcttcctcttcctctatagctatcgaactccttgatggatggaacgggccgatcatcaacaaccagtcactctttgacgccctcgacggggctatgattgtacgttttcgcaacatctctaacctggtcctcgataatggctgatcggactttatatgtaaaacctcatctgtctcacagaccttggcgctcgcttgtttgaacgtagctcacccagtattcttgcttagccaacctcgatcttcgttcgatgacgagaagaccagtttatccgcagacggagtgagggtttgagcgatgaccgatgtagtttggatttcggttttgatatttcctagagctttgtactacaaatctctcactggacaacatctctactctatacactgtattttccatcatgcccttttcagactagacgtgttcaatgacactccgtatcaagtcttgacccccttgcgtatatgatcagcaagtcaccgtagttttcttcaactcacatgaacttagaccgtctcattcgaaacaagcgggaaactgctcgattgcgcaaaataaatgaacattgaatataggtctgaacatattcctctttcgttctacctgcctgaatattaattctaaacgaactcggtgattaagtcaaccttgtcactttgttatatcaaactttgtttcggattcaaaatctttcttcatatcagattgggtgacatcccgaagtttgtttttttactcattctctctggttgcccctcacttttatgtgaatcttgaggattgggtgacctactttggttgagaaaaccacagccacctatcaagtctacgactacctaatattcatatcaatgatgggctttaccagattagatgctcatgggcaagaaaaaatctacataaaacgcgatagctcgctcagctgaacatgaaacctctcttcatcctctgcaacatcacaaaactcaaagcaagcttttgattctggagacctgacagcatgaacaactcaactatctccaaccaaactttgaactacattattggctcgcccaacctgtactctggcaagatcgagtgtcagtccacatcattctctcacttctctctactcttcctccctacgtgctcatattcgggttacgcccgtttttctagacacccactataactacaatgttcacaagtcgtccgccatcatcttgaccaccttgttcgctctcgtcagcagtaagacattaaaccttttctctctatgataatctcatgcctgcgcttatcgtcgagttctctttttctcgcgcgatgtctttcttagccatacatctctaccaagctatacgatcgaaatattggtttttgctctggacaattactttcggagggttcatcgagatggggggttgggccgctagactcgtttcggccacttcactattctgggacccggccgacggaggttattgggatagtaacatcaacgcgttctttgcacagtatgtctttcatctatctttctttcttactcctttctgtgtctttgctctctttgcgattttacctaccgcgctgcttgagatatatgatgttgatattcactttctcttgattcgttcatccgttccctctccgttcgttagaatttgcatgcttatcttcgcaccaacattcattatcgcggcatgctatgttatcctcggtcgtctcgttacagcctgcggctttcggtactgtcgcttacacccaagaacatacaccatcatctttcgtatgtctcgtcggttctgtgtcgtggttaatgcttcctttaggctgatctgattcctgttttgccatagtttttggagacatcgcatctgttcgcaatccacctctctacttcttcatctgacacctcaagcttcacagactcactcgcgcccaacctgatcttctatcctgcaaaagcttctgattcaggtgatcggtggtgcaactgccgctggtgcagacacaattgaggagtctgatcacggagaacgttccattcctatctctttaactctgcctagtgcaataatattctaacaatccagacttacccaacttgtcctttgttggtatcatcaggctcgaatcatggttggcggtatcgtcttccaaatgggtaagtactcgtccgtctcacatataccgcgccgtatacgcctgattcaccctgcttgactgtccttcatcgccatttgcgttctcctgtctaacttctcgcaataactacccttgcatctgttagtcgtgatggttgcctacacatacctcctcctcgagttctcctaccgatacatctacaaccagccgacgacccagctctcgccgtttgcatggatgacaaagaagacaagagagaacgcgcggcgacaggccgaggagaacaggctggcgacggcgtcttcttgcgccgcccgtggcagcgtggaagacaagcggacgcgatatcagctgatgggagtaggcggggtaacactgtttatcttcattcggtgagtttaatctaatctagtcggattcatgcctgctttgttcccagactcgatttgctgatgcgctacttctgaacattctgtttcggaaccatcctagatccgtctaccgaagtacgtcgttcccttgtagcgcttttgtatatttgcagaaacttacaagccttgcatttcgttctatcaccctcttctttgcccgatctagctatcgaactcgtaggtctcattttctctaattctgcgctccctctgtctcatcggacttctcgagttgacatgtaccgtttttttttaaatcttcactgtcatcagcttgatggatggtcgggaccgatcatcagtaaccaatccttattcgacggtctggatggcgctatgatcgtacgttctcattgcacttgaacctcatcttctttattttattattgaatatgacaaagactgacttgttttctcttcggtttctgttattctcagatcttgtcgctcatttgtctgaacgtagcccacccagtttttctcatgggtcgaactgacaacatggaagcatatccattggtttctgtctggaagtgactaattaacgaacttggatccttcagccgctcgggctgatcctcgggtctcttggttatcttgtcagcttgagcaccgcattctcttcacttctctatatcttcatcccatggacataagcttctcgttaccatctatagacatcatacccattatctttttttttgcttctggtttgtttcttctcttcttctcacttgatgcatcccctctttaggacttagaatcgtcttcagatggaatatgttggacctggacacttcactttctctctttcttctgtttttccctccttactcccttctccctctatatttcctctttgtcatcttcgtgttgcttgaaagtgaggtaaagaaaacacgtctggtagcgttgacatctcgtactatacactataccctctctgcagcgtagcttgaaacgatcggaatgaaatcgtgtcttcctcttcctgtccttctctcgatcagcctagcctattctgatggcgccggcaatgacgtcgctggcgcgtacacataagaatgatctgatcaactcaggagccgtatataattaagatgaacatgaatagaataagcagacaaaaggggaaggaagagaaaggttatcaaacgtaagtttctgtgccaaacggaaaatcaaatgttcaagattttcaagaataaaagacgagaaaagagaaaaggaagaaaaataaaataagagagcagagcagaatattcaagaaactaatgaaaaggaaaggaaaacaaacgaagatgaatcgtcgaagggtatcattactggtgatggcgttttttcgaggctaaaagaaagtgtatgagctacggatgaaggtttggataggctgaaatgatcagctgtgaatgagaaggatcagaaaggtttggttcaaagaagtgagatgacagaagagggaaaaaagacaatacgaggaaatgagagaaagaggggtaatgatgagggtatatgcactgatccacacacgcacgaggtacgagggtagaaataatatgtttatctacgtattacacgagacgaaacaagacaaggtgtagaattgaaaaatagaaggggcaaatattgctcaagccagagtgaaggatgcgacgatggcagctagcgctccgaccgaccaagcaccgacaacagacctgctagccccgctgagcgagctggaagacccagaatcagtggaactgctgtctacgttagcagcgttcgtgatccccgccacccaagtcgaaccgcacgtgtcgatcgccgcctgccataaggctccctgtccaccgaggatagcagacgaagagaggccaagggcgtagggcatcctagattcataagctgcgtaggcagtaaatacacccttggcacatgacgagcagagaatggaggcaggatcggtgggttggatgaacaagtacgggaggtcggtgttcttgtaagtggtcgcattgggatagatagcggaggatgcgtcaatcgccttagtgatggaggctctcttagaagctcgagtagagagtgcagatccagaagaggaagaggtcgagagagtgttcacagagaggtaggcagcgttgtacgcaacttccggctgaatgacagcggtgtttaagacggtgccgttggtaacgacgatagtagcgttctggctgactgtagaagcggtcgtcgtgtttgcacccaatgccgtcacacaatactcatttgtgttgtcatccttggtgcaaaccacggtcctcaatggctcaactacgtacaacagatcgtacaagtttcggattgtgtcgtcggcgccagcggtgagctcagcagaacaatttccgtagaagtaggagagcttggtccgaataaatgtctcggagcatccattagcggagcaaagtttcgtcaaagaagaggtgagggtagtcgagttggtcgacattgccgcagcgttcgtggtcgtcaacagaggggtcacacagttcgagagcacggtatcagagtcgaggtcggtcaagaaagccttgcagttggcagaggttgaggaagggaccgagacggaatcggtggcagaggcagaagcagaagcagaagcggaagcttgagcggaagagacctgagaagatgtgaatgagaggcagtcatgttagttcaggccaattgattcttttgcgacgaagaaagcgacagcaacaaagaggtatttcgcaatgaccaggacgaaccgaggaagactgagccgaaacgacggtagacaaagcggcaagagcgagggtaaatctgggaatcatcatgagtgactaggtaggtgggtgattagtcggttgggtgtcaggtaagttttaagtttatcaagctggacggcgctaaagaaattataagttgacaagaaatgcgagtcagcatcagaaggagagatagaaagagagaggacagaaaggagaacgggaacaaggaaaggagaacgggaacaaggaaagtgaggcgtaaagttaaggagagttgttgacgatgacgacggtgggtgggcttgaaagaatgttgagtgattgaagcagcttgcttttttccccaaatccttctcagctatcaactgaaaaaaaaatcatccattctcgattgagaaagggcgttggaagcagacggttcttcaaaggattctgttatgattctgattgagtctcatgtaagaaacccagcagaccagtcgagatggatagtcttgggaggttgaaactctgttgttgttttttccaaccccgactcgctgattttctccttcctctaaagttgccttaatcctccacttcctgcctatcttccttctctggtgttctgcatgtttgttctctatcataagttatgtgcgagatagaatggaatgtaccatgtctcctacaacgatgcatacaaaaacaaaagtcaaggaagaaggaaaactcacaataagaggcggggaaagcgagacctgtagaaaccgaacgaagggaggtccgatgcagcgggaaaaagtcagagaaaagactgtcgaacgagtgagtgactgctggcggatagagctgagcgaggagaaagagagagaggaaaagaaagagaggagagagaggtaaggatgagtcgaggtgagggtatggttgaactgatggccttaggaaaaagcaggcatgaggaggcgagatgaagaggaagcttaggtaagcgagtaaacaacacgatgaaccgcgactgatttttacgaggagcttaggtaagcataacgtcatgttgggtgtctaggtatgtgagtgcatgtaagaccgcatggaacaaagattgagcaagcttcgagaagatagcagtctgtgagggtggcagcaacggcatggtcacgtagagagcaagatgtagacgagaagagactctacataggattgtgtggtcatagttgtgcgctgtggtcagaggatttagaacataaggacccatacaagcaacaccgactcgtctcacgatttctgtgtaccctgcatgcgctcgacctacatgttactgctcaagatacgtgtgtcatacatgctcatcaccgcccaatccaaacgtaagaacatgcacccacttggccgtctgctatgatggcatgaagcgcttaggatgtgcgcagtcgagatcgattcagccgcggcgaccgacagtctctttatcagtcttctacttgcgctcaccttccttgtctcttgatcacctacatttctgccatggcatacggaaatattgagatacctcaaagattggacacagccgaaccgctgcctatcctttcctatggtcttccttcacaaaaggctctttttaccttcccattgacgctaaagcagacgccggaggagctccgccaggtgatgtggcagatctttgctgtagagattgagcgtgcgtatatctttttcgttccgcccttattctcttgtaagatctcttcatgagtattcatccttgaacatgtatgcgctcaggagggtcaacttaccctcatcgaggagaacaaagcctcaaagacttcctgaattattactattccgcaggagtcgtaattgtcggcattgtcgtcggagcggacgaagcgccagggaagggtgaggatggagcagaagtcaaaggcgacggatgggagggactctccatcgatgaagtaagggccggtagaagctgggaaggctgtctaggaggattttattacgtgcgtctttagtcgtccttgtttcttgatacccgatcggatcgtttgatgcgcccatcctgaattcgataacatatggcgtcacagatcaaacctaactatcctggcagatcttcacacgtccgtccgtcaatctgctctcgtgtttctgtctttcttgtctttcttgtcttttgacatgagaacatgtacaattctgtatatccgaccactcctttgtcagaactgcaatgcaggttttatggtcaaccagacccaacgagggctccgagttggattatctctcggtcgatcctacttgatttacgctcctaaacttggtacgcctcctgctctcaatctctatcaagctttctcgaacattaagtgccagttcattgactgtattttcttcatatctctgcgcgcgtgttcattcggaaggttatcgagcttctgtcttcaatcttgtgtatacaagtgagcttcttatgtccgataattttatatatcatgccattcaagtcaatttactgatatccatcgtactcttagacaactctgcctccgtcaggatatgggacagtctaggattcactcgagcaggtctaagtacgcgttctctcctgtctgtctcctctcgtctgcattcttagtcatgaagaaatgaggctgacggcctgtaagcgacttacaatagttccggaagcgggtttgcttaaaaaagcagacggatcaggagaagaattcgtagatgctattgtcttgtgcgtcgtcccttccaaatcctaacaatagacaaagttcatctgactcttgtctgtcatttctccttttggattgtacagttataaaaagttcgaatgaagtcgcatcgcgacgaggtgtatgcctctatctctcattctgtcatcacaatctctccattccttgttctcttttgttgtatatatggagttgaagtggaaaagggaaggcaagcccagtcaaagcaaaactaacaaaaaaccagcttttgtcgcgaaaacaactacatttcaaacaacccagttctctcagggattcatttgcaaagtccgatggaggtcccggtacaaagacctcatcgacttgtcttccacccttcctcttctgatattataccttccctcgtccattgttccaaactcttccactctcctcctacccccttccctgtaccttgcctcgtcgtttccttcttccgtatgcctgcttccaggccaatcggatctactgaaagcgacggaagatctgtaagaactagctcgactgctgtcgctaactacgcttgttctccgttcgagacccatatttgatctgtacggaactcttttcaacctcggtaagaacggggttgagagtatctgaggcgtaaaatcgatgtccgatgaccgagacgacctgtcgtcaaacgatcggtcggaccgagggcgggaaacgggagaagaatgaaaatgcgatggataagatagctcggaaataggtcgaggatgggcctggtataccgctggagggatttctggggtttgagcgggactctcatccacggtgtgatacgaagggatcgctcggttcaactgtgaccgaggttcatccttgtagtattgttgatgatattgctccggtgtggagcgcgcggatgagaaggaagtgatcgggcggagattcttccttggtccagatttagatctttgactctggaaagggtaatatcgagctccttcaaatgcttctggatggacgtaatcttttgcttgtcgagtctgatctcttgaggcactggaatttcgtgcgagaacaggaacggtataaccgtataggtggttgtcaaggaaagaggatgaatcaaatttgtccgaatattgatatggatcttcgtaatctgatttgaggaacagttctttcctccctgtcggttttgtgggtacatccgaccccttctccacatcactcgttccagccgccatacccggtcctgttggtgtggtggtggccgtagtggttggttgaccggtgtaagctatagccgaagaagtactccgcccatctctccttcgtttcctcaagaggaatatcaaaacacccatacagaaagctgcaagcagcaacaaggatgctgctaaagccggtccatttatcccctgtttcgaaaccgctttcgaagtgttccccgctggagtccgaagtccgccgttgccaaggtacgtccctgtggattgaggggctaaggcggttgcttgtcgagcttcggaaaggacggatatcatactaggaccgggaccttggtgtaactccgggttcgatctgtcagtcgattgagaagaggtacctttcgtgtcgacaaggggttcatgcacattagaaggctcggttttggatgcgtccggttcgagagggtcatcgaccgaagatgaatccgacagagcggtttgggcctccggatcggaatttccgtcagaagaagagagagagctggtggaacttctggccaaaggtgaatctgaaccaccttttagaatgcgtgcacaatgcagaatatgtgtcagacaagcaggtactatcgaaacttcagatcgaaacctgttgtggacttactgagaagagtgaatgcgggggattgatgattcgccatatcgtcccctctcatgacaagatagaagggtgtatccagacccatcgtgggtggcgtcctactctcatcgaggcaacccattcggtgagctttctatgcatttcaattgcgacacactcgctccgtcgatatagatagaaagacatacagagttacagagtatgttccgtcagcatcatttgtgatctcaggccagataggggaaccacaagaatctgcagagacgcaaagtttgaaacaaggattcgcgactggcgtagccgacgacctgtcatgacgtagaaggaaaggagatgagaaaccgaaaacaaaatatggccgtacaacagtcaagacttctcgtttgagaaacctgatgattttcaagtgtaaaagttgtctcaccatgagacttcgattttatcacccgtgatgattgagcttcctacagttggacttatccagttgattgttgtatccgctgccgttgctgcaggagcagcggcaacagcaggaacagcggcagcaacaggagcagcagcaggtacgcccgaaacaggtgcaagtggagtggcaggagcagcagctgggactggtgcggctgggacggctggagcagcaacggctacgggacctgccgcaggggctgctacaggagctgggtttgcccatgtcgtggcagcggtagcagcaggggcgacagcagcaactgcaggagcaactgcagcaacaggagcgatggcggcagcagcagcagcgactggaataactggagcagctgaagtgatgacaggtgccggaagggccggatcaacccaagctgaggcgcctgcagccggcacagcggcttgacctgcaagaggggatgctgttacaagggcggccatagaaatggaaaagaacgtaggggtttgcttcagaggacagtaagtggaggagaaggggcacgtccagcgtttacccgacgagataatggaggatgatataagggggatggggtggaggaggagaaaaggaggaggacaggaggaagagaaagatgatggctgggtcaaaaaggacggttagctcagacggataactttatcagacggaaaggacgagacctcgaatcggttagaaatgattcaacaatgacaacaataacaaaaacattagccgttagtagggttgagttaggctcttgacgcggcagatggtgcctgattttgtagacttcccgtgtgggatgatgctagccctaaaggcgagtagacgaaacgaacatgcttttggataaccgagcaacgagcagatagatcaagaatggaagaaaacgggagtgaaagagcaagacaccacgcctcccgctaaatgcacaaagaagatctacatgctagccatcaaggcttttttgatacctctcagcgactgttttctctcgtccgactcgtcaagggaagagaacagaggaagtaacgagttggtgacaaactcttccactaagagtacaggaaatcgagaggaaggtcgttgactgtatggtgattgagatcgctgccagtcggccaacctacgagcatcattgacagattagaagagcaaatatcagaatctaatagtgaatcattctcaactgatggagaacacgaaccagtcggtaagaagcgccgtgatatcagtcgagaggaacagaatggcatcctcgctattccatggagccaactgtcgagatatcgaacgagacaaagagagaagatttatcagaagagtccacaatggaggttgttgcagatcaaaactcactttttcctcaaacattgcgtagaacacttcgaagattcgctcccaatctacacccgcctcccgaagcataccatgtacccacccagaagcgttacctttctcaaagctcaaggtctccagacggcgacacaagaattctatctcggatttagataacaggttactttagaatgagaacccataatcgtctctgaagtgatataagaaggtgacagatagacgaaccgagcgggtaggcggtttccgaagggtaaaaacgtcgtccaagctgagtgactacgctggcaacggcgttcatcttattttccgcctcttcagcaactgttaagaacagaagccaagactttggtcaacagatgtatttatcaaagacgtatgcatttgaaacaaaagacagtactttgatcgaaaattccttcccacgtctgaacgataagtgctggatcccgatggtccgaggtgtggagaatgagaaggatgcattcaagcaaccggtaaggttcagcgaagttaaggtagagctgtggttgagatgtacgcatgttaaacagattagccaacactctacttgaataatatgaacactacatatgaacatacttccgaaatggtgagtaaactagagttcagttcgttagtcaattcgaccttcagactttcgttgatgtcctggtgagccatgattgcccttagaacctcaatctggacctgagcgacctccatcttctcttcaaggtcgtttacaaactccacagagacagaagccgagctacctgacgacttggcattggccacagccagggtaaggtattccaatcgctgaggtaacggcaactgaagcctgttccacaaccatccgcagcacaaatacgaagcctctgttagtctcttcatgaacgtgacttcaaccatcgatagaatacacatactcagtagactgggcgaggttggcctggacaaccgatgcacgggcgtagtgtccgtttcgggcgtaatattgccagagcaactccgatcgagcgtgggtcataggctctcgcgcaagatattgctcaatgtaaggcgttcgaatcttcataacagaatttgatatattaattgatgttgaatttgaaagaattgcagatgtagccattgatcgactaacctctaaaagctgatccgtcaattgtcggcctactagccaatcatataaggtcacatggaacaaaggatccaaagaagaaagcgactggttgtacgcgctagctctgagcgactcgatactcatctctgaacctacggagagcgtagcgagaacacatagaagtaagcttctctatagacagcagacaaaactttctttgcaagcttcgagtctcaccattcttggcagccaaggcttcgtctagcatctcgtcgaaagcgagaagagtgtcaaatacacaattgtagcaatgcatcctgttctcgtaagcgactcgtcgaggatcagtggatatacatccatcctcccaataagccaggccttgtccgctagcatcccaatcctgagcacatttaagaggaagctcgatagcacctgtccaaaaaaggcagtaaaatagtcagagcgtgtgaatattgctgaagtagaaaaggaaaagaggcataccagtagggaatgacaaagatcggaactcgagacaagtctcttgcagcttctggagcggcaaattcgtagttcctttttcgaacaatctgatcgaccgaaaagataagagatggcagatcagaggatttggatgtcggatacgtatgaaagacatgtgacgaaggagttcttaccgaagtgagtcctccaggcattcgcgtcttcgctgcggatctctagtctctttagcttgccgcaatccctcgagcgcctgaacggagtgaagacacacattacaggagttagcacatcttcacaaaatacagatttcaagtgtgggaagggatagatggtattaccttgaacaacagcacatcatctgctcggcaaaaagaaccacatcgctgctgcagaatttcactgatggtctcgacctatcaacacgagaacacgagagcaaatcaattctgattcagcagtcaaccgatttcttaaagaaagctatagattcactcacgctaactcgttggctgatctgctgatgaaccactgcgttgacgatgtttcgggcgacatctcgacctttcaccgtagtcaacagatcctgataagtgaggtccaaaaacgattgttgtagctctaatgcacatctagatatcaaagtgccatcaataacaaccaagacgatgtgagtttgaaagcagtccaatgatagccttgtgcgatgccaagaatagacttacgaggagatagtctccggaagcttgtaatcaatcaggagcaaaacaaaggagatcgcctcaattgcttgagtaatcatagcgaccaacgcgttcacagacgactgttcagttcgccacgaatcgagatcgctcgatcgtgtttgagaatactcagaggcgggaccagtagtgaacagttgaaaattcctgacaagaccagatgcgagggattgaacaattttaagcaaccgaatttacagaaaaggagttgaacaaagagaaaactcgctaaccgatcgatgaaagccttaagagcagacatgttcctttgaacggagacgagcgtagactcggccacattagagatctgtcggttaggagacgttggcgatggactgcaaatgttggatgagtgaacgtttgccacagtagttgtttagtttcacttttgcgcagaaacctttcgtatgttgcgtagagcgagagaagagcgcttacctgagtcgagtgactttgtccctccaaagaggtcggatcaatcttgagaagtagattgccaacccctcgtgtctaccagagaagaacacctgactgctgacttcaccagcagctgtacccgggtggccgtatcctctgtcgactcgaacgggcttgccgccaagctcatagaagagtcgcttagctccagttacgacatccggagagacagggcccggggaggtgtccgtgtcggtagaagccgactctgcggaggacgctagagccaaacacatggcgcacgattggtctcgaccgtagctgaattaaaatgattcatgacatggaacataatcagaatgaagtaaggattagccaggtaaaagaagaaaagacgtacttgctgaagaacgcagcgatttctccctctcgtcctacactcgctccggcctccaagatacccttcaacacatcaacgggtctttgttttccaatcacgtgcattccctcgcttgttagtacgagcaagcttctctgctgaactcccgtctgggcagctagctcgttgagccttagttcacctcttccagatactttgagtgcagacgaacaaggtagatctgaaagagggtgaggcacttcggcaatagcccaagtacgaccctctataggaagcgcctgagcctgctcgatcagagccggtcgagaaggcgcgggaagtcctgctggttgtgaggagacaagctggttgttggggtataagccattctgacctccggtttgtccattcgagggaatattagtagatgattgagaaagtcgaccgatgtcagggcacgtcaagagcaggacatccatattatcttgtgcagtctgctgaggcgcgacgagaatgcctccgagacaagcagctgagccagagatagaagtaaacttgataggaggctgaggcggaactgatgttacaagctgttgatttgggaaaccagggaaagaggatactccctggggttgagactgactagcagaagaaccgtccagagtcaagtttgatggagggagtcggacatggatgagctctaagccggtaggtgggccagtagttgttcggacaccaccatagcctcttcggtagtacgaaaaatacaatcggacacctatgtatgtgtatgcacggaaaaaactattagcgaagcttcgatacgaccaaaatcccaaggcatgattgattcaaaacgtacctttgctggtaatggccaccatctgaacgccactatcagcctctcccctctgaatgggacagacgctcatgatgacgaatcctctgggctcaagtacaccttgtgcaccaggcgcgagcataagcgctgtcctaccaacatcgcccgctctgccaactttcgtcaaaccaacgcctgcttcagctccagaaacgacaaataactctatggccgaactcttcgtcaaagcccagataacattcctcgtcggatcgacagacagcctcacgatcggatcctcctgtttgctcttcaaaaactcaggaatcaagcctccgaggacacctaatcctccaccagaaccggtccaattgatgagtccagatcgtttagtgaaccagccttcgtctgctcgatagaccatctcgtaaaggtttccatcggaaccacacataaatgtccgtccgttcgggaacgagacgacgtccgacattgagattccatcagtcggtatcgtgagatcagtcgcgtagagggtaagctctgacgagggtgaccgacttaatccgaggaggagtagattgttcgaagtgcagatgaccagcagatgggtgatggaatcaatgaacactcccggcttggcttttactagaccgacatgaacaataatttcagattgttcgtcgtatcgactgaagtcagcgctgttgtagattaagaaaatggatttaagacgaaaaagaagacaatgagcggctcgcgtcgaaggtattgactgatcaaggaaaaaattgaagcgaacctctccccaaaatcccaaaggaacagcttattgtcgatcgtcatccaggcccgatcaatctcgggaaagatacccatgaagcatttatgagtgagagctaaggttttgtccagcaaacgccagatctcatcctttagttagccattcaaacagacatgtatctgggaacgagaaaagttgggtcaactcaccttcgtactcggcaaacagaccatctggaatgctaaacgtcttctgcttgacgaatggtgagaagagcgagctcagagagtatgtgtatgaagcggaggatgtacctgcagagtgtagtatatggttagcaatccactcggcttctcttctttctgtatttaaacgtgtttcggatacgaccctgttgcctcattttcctattttccatttctttgcagaaataaagaaagaaagccttcatataacggagagaagaaacgactgaccctgcagaccttcacccaaatctccgactagtccagcatccttcaccaactgctcattgactacctttctcgctctctctaaaggcccatacgttgggtcttctacaacaggttctctctgggaaggctgaacgatgacatcagtagaagatgaggtcgtctgaggtgctgttgagatggtcactgatgttgatggtgctgccgaggatccaattgaagatgtttgttccggaagtcggggatacatctgattttgctgagtttgaggagagtaagtcggatgaatagacgacggtgggcccggaagtcggcggactgccggagaagagagcatagatgtaaaatcaagaagatatgactttgcacaggacaaatacacctaaaaccagacaagtcaaagataggagggtgagagttggatggaatgaatgatgatggagagggtcggtggttgttgaaggaaaaatctgaaaactcctatttcaacattatcttatgttctattcattctttaatttctcttctcgttcaatcacgactgacaggagtgagacagtgaatcaaacatctttcttctcattgatttatgcatacttagcatccaaaagggtcatggcttctctatgtatctatgacttttttttactctgaaagacagcgcatagagacgtcagaaggtttgaaggaaaggaaatcgacatcttaaacggtcctttttcgtatttctttttatcatttcttcctctcttccaaacaaaattactctaccaccctctttgtcggccccgatatccttgttccgtcgctgaaaaaacacaaccaagagacgtctttcagattgagtcaaatatacatagaaaaagaaaacgatagatggaaacttacgcggcatgtttcgttggtgaggcggtccgttacctggcggtccagaaggcatgatcgcagtgattgcgtccgaggccaatagtcccattagatcgtccgttcggaattgaggtccttgttttacagatgaaatgaaataaaatctcaacgcctagaacgaagataaggacgtttcgcaaggtttcaagatttcaactcaccggcaaacgaggtcggagggggcaaaacacccaagaaccaatgcaatgaaacctccttatgatggaccggcgctcttgctccggtaggtgctgcgggttcaggtgatcttcctctctttacaggtacagtctgcccaccttgaggaccaatcggttttcggccccatccattgtctcctccctgttgctgaggaggaggcacatgtctaccgactgatggaacgccttgttgaacaggctgaacatggataggctgcacgaccgctggaccgacagcaggagaagaagtagtcaaacttggatgaacgggcgaaggaacattcatcggagagtcacctctaggccgtttcgacagaggttcattcctcatagacattcgttcactctcatccgttggtcgaggtctaccaccaacggacgacggtaaaggaagtgaaatggatccagtaacacctggaacagcattgagtggtagggaggaaagagcttggggtggtggttgaccagccatcataggaccattcacgttcgatggtaacaccctctgctgaccaccttgagggagaagaacaccgccgagattaccgggtggaccgagaggacgaggaggaattactgatccttggcccaaggtggtgactggaggcgggtgcgggcctaactgattggcaataggaagagaaggatgggacaaagaattggaaggacccagtgcagacgcggactgcatcggttgctgcactgtaagcgcaggtggaaccggggggaagattccgaaaccgaggtcgactctggcaatctcgtcgatgtcattatatatgtgtcgtctggcgaaatgttttgtcacagagtctatgagcgtacaagatgtaagtgacgacaaatttatctttccctcgcaagagcattaaggactcacctttagggaacatttccaagaacctagcatccagtcgttgagcagaagcaagatcgccaaacaggtattcgtattttgcccatcgctcccacaacggtcgaacaatctctgcagtgaacttggtagctgacttctcgaacaacaccctagcatctgtccacaccagcaggagaagatgacaaatggaagtgtgtttagaaacgttcggccgcatcaagtctttctctttgtgcgcttgtaagatttagcttcgagaacgtactctggtcgtcattgatggtgattaggaatgaaagatatcgatctacaaactcgatcttgcccccaaacactttaagacctagctcgaagatcctggtagccacactgggatctttactgcagtgatattccatgagagctgtgaacaattagagaaaagggaggtttcagagagtggaatatatcggtagaggagattgagagaaaaggaaccgtaccggaagcttcgtagacctgccaggtgatagagtttgattttctggctttggcgaacacagttcggcaatatttgatgccctgttttcattcgatggttcgacgaattaaacatgtttccctacgcaagtagttgcgcttccttgaaggaggacacaaaagagggagagaagcttacctcagaccttcggacggtccgcatatacataatccaaaccaggcccagtcctttttcggcatcctccacctctttggccctcctcattctaacgctggcctcctttgcttttctatcttcttctttctttctcatgatgtctgcctgatccagatccttgttctcgtcatttcctccacctgctcctccgccggcggtagatgaagctgaaggtttatcaggtgcggcaagaacaaaagcgacttcatcggcgatagattggtggagcttatcaatctcggtttgaaggttggtaatcaatgagtcgaaagtcgagtgaaccaaaatcatattttttcgagattcttctagttccgcgtaagagaatgagagtaagcagctagcgggcaacaagaaaaaggacaccaaaaagaagcagaagagtcaatattggcctcgcgatcaatttatcgaaagaaggtcaacaagatgttctaacctggtaggatttgcctgaattccgagcttcagataccctgcgccctcttcaaggcgtccgaccgactgatgatatttcgaagccgcgtacctaacatcaaagaacgtgattctcaaattagcaaggaagaggcacaaggaaggagagatgatagaaagccacaaggaaagagacgaaccaaagttcagggtaaaaccttccttcaccgccgacagctttcctaaatgcataaccaactctagcttggacttcatcgacagcttccagctccaacgggtttccaatttcccactccacatatgtcttccaggactgaataagaactcgatcttgctctgtccatttcggtcgttgaggtaatggggcgggaaagaggaaggcagaatgaggaagtttagtccgaagctctttaagcgtcgatctggcggtcatgtaagctggcgagcgctcggctaggaatttcttggcctgtatcaaccgaagacgaggaggatgaggtgagcatgtgttggagatggagataaaaaataggaagaacaagaaaaggcaagtacgaacagtgactttgttgaccatgccttcaaacaggtcatactctctccagattccttcgacatcctccaccggaatcttaatcacttttgagaaaacccttctcagctctacaacctttgcctgctcctcccatgtcgatctcgtctcgccttctctgatgaactggatgaattccttccagataggggtcgaaagagggtcggttccaatatgggacaaagcgtactcgtaagctttggagatgatgatgcgagcgttcaagtagtcggacggtaaggtcgacacgtttgaagggacagggggcaacgggtttcgcctacgaatataatggagataggaagctgataaggggtcgaaagaagagcacaaaggggagacaaaaaaggtcatcaaatgaaactcaagagaggtcataacaaaagaagtaggcggggcttactccataaaggcgggtaagcaagaggaaacacaggcccactgctggaagacttggcgaatgctctggagaacagagcctcaacttctggtgtatgatcgtgtgataactctagctcaatgtatgtcaagtattgaggagcctattaagggttgccagtcaccaattcaacaaaagaaacggacgcgtccgatcgatataaggaagaggaagagaacggatgagctcatattaatcgaagcagcatataaatccatcccccaagagaaaaacacgagtgaaaagaacgaagagaggagaaagagacacgtacagccgtagggtagagcttaaggaagatttcataccatttcctcgcgttctctaagtcgttctccgcggtcgacctggcaataagcgcgaggagcgcatccgggttggactcttcagtttcctccgggatctgatcggcttttggagtcgtcggggcgggagtcgatgcctgaccagtaccggtcgaggcgagagcagttggggtggcgacggaaggtgtaggaatcaccgactccggaacaggtgtagagacttcaagagtggccgtgtctgaaggggtagacactgatgaggaaacggctgctggtggtgccgctgccagcgacgcctcggctggttgagatacaacctgtttatctatctcgggtaacgttgtctctgtctctgtcttcgagagctcagtaggtgcagacacgagatcatcaatctcacggttctgatctgaagacgattgagccaccaactcgatatgctcggtgggcttggttggcgatgtctcgattggaggtacactggttgcaattggctcaaccgcgtccgtctgaatatccaagttcgcccgagcagaaacatcgagatcagacttagctgtagaagtcatggaatcttcagactgtatggcagtggatgtatttgtctctttgtcactctccgagacaaggatgggaacggaaacaggaaggaggagaggatcctccacagcaaccaaggcagagggatcctgtgaatctgcctgtttcggggaagacggctgagataaaggttggttgacagcctcgcttgtcgaatccgacgaggagggctcggtgtgtatctccatggatggtgagaatgtcctgaaggtgttcgagagatgatggaaagaagagaaggaggagaatgaagaattcatacgcgaccgggggatacccaccatggttacggtgcgcatggttacgctcccttccttcctcaaccgccatcaagactccccactttgcgcgctgtcgtatcaaagaatgatttgaagtggccgaggaggtcaagagaaggggcagaggcaaaatcaaggaaggttcaatggtggagagggcgccaagaatgagagtatcgctgatggagaagaacaatccttcgtagtctctgttcgttctaccgtcaaccatgatatgattccctaaccctcctttcgcaaactctacctgttggggtgcaagacacagaatagatctagctgtatctgttagagagttatgagcactctcaaggtctttccaagattgtgcgagaagagaaagcaaatgattccaaggtcgttcccgctcggtccggataaattcgtcatgttatttttgtttccttttttgatctctccccgtttcccttccctctacaatcaaccaccgttgtcaccacccctctcttccttcattgcactcatccttgtgtccgtcctctgataccgatgaacggttcctcgccgtcacatctttcgctgtctccggcatacggctcgccagagtcatacacagacctctctcttcggccaagagcatcgccgacaagtacaacagttctgaattctgtccatcggtcctctgttgacgcctactacaacgactcgcactcgctcagtccaacagaatctgaatattcacaactgcttgaccagaatccaccagacgagacatttaataggccactctgtagggaatcagttggggagaacaatacagtcggaaatctcgccgcgctcgatgctagcctgagaaaggaccggttggcagaaattaaggagagaaacaataaggtgtgtgaaaccgtcgacctatcttatgatttttcgacaagagggttctccattgaacaagcccgagctgtattctttgtttctcccacttagattctcaacagggtatcctctcattcaatgctcgtccgagatcgagatcttcggtcccaaccgggcacacccgagcctacacagagagcctcatcatccagaccagacggtcattctccctccggcgccgcctggtcaaaaccaacgaatgttgcctcctcctcttctgcttccttctcttcgcatctttatccagcagactcgcttccacagaacacctcggctggcgaagaaaccgaacaggaagactcatccccagcccttcacactcgttccgatcatttcacgcgtcgttcttctttcgacactcagtcggacgaacaggattccgaatctgattctgattctgaatccgagcccgaacgtgttctaggtgctcgtgtacacgctcgggctgcctctgccccgtatagatcgcgaaagagcccacagagcgagctcagtcagagaacacggccgtcaggcgagggtattcccgttggtcaggattcgtctttgccttctgtgtctgatgagcctaagagaatagggggtcgagagcgaagagaagagatactaaacagaagcagaagtagagcttctctaggttatggtactagagctgaggtcagtcttcggcttccccttctgttctgttgccttatgaccgctcaaccccaaacaaacggctttccattttttttgctccgacacatcccaaagactccttcactcacatcaccccgcgttccccgatcagtcacagtcgacgatctcggctctcctttccctcccgcatcgtcgtctaccgccagacacaggacgacttctagctcgctcgacttatattcgaggttggctcgatcacccaccagatcgcctagagaactcaatggatcccctgtcccccgacatccttcactttctgtctcaaatcgtcccgctcgtcgactgtcatcaagttcgaacggtaacccaacactaaactcatacacaagcgcagagttgaactcaagccgattcagaaatcgagtcagcatgcatgaacctcggagcgcgtctcgattagccgatcgagcggcatctagcatcggattctattctaagcatcctctcctcaacactgataaaatggaggccgattttttcagtcacgacgactacggccatgatcgtgatcgcagctcagcccaaccaaaagtagcgaataagacgagagatttactggagaggattgagagggagaacgaagcgagcgatcggaaaagacaggcattggttgagagtcaagctatgaaacgtgccgagagctccctgtccatgctttcgacatcaaaagggttcggttttcgaaggtcgaactcgagttccccgagttcgaccatagatttgaatagggtcggggaaaggacttatccgaatactacaggagggattatcagatcttccacttcactctcgcattttccagaacggttgtctggtgctagttctgctgctgccgtagacattctgaggtcgaggccgaagtctcatcgatctgtctttagcttaacctcacccgattcaccaacactcaccaacacttctaccgtcacccccaccgccaccgtcgctgccacaggacagaggagattttcaggctcgctatcggccaatgtgataaccaaccctagggtaagatcgccgctctctcgtgggaaaagatcatccatccttgccaactctcccctgctcccttcatccacatccactccttctcagactccgactgaaactcaatctggggatcagattcaaccggaacatatccgaaacctactagatgcgttatctcacctagagatgtcttttgcccaaatcaaaggccctgcagatccatcgtcagcggagaccatccgttcggcctcagcattcgtcaagtctgctactatccttcatcagaccatctaccaaggatctctgacaaatcgagagctcgtgatcgattcccaggtgaactgcgggtctaaccaagaacaagagcaagggcagagggatgtgagtgtggggttggtagccttaggtatgatatggaaggaggtaggaaaagtgcatgacgaacagatcagaactttgacgggtctgctgattgggttaccgaggtggatgagagaagtgatggagtcgagatcgagtgagagtgctcgtctagagaaacaggagcaagtcgagaacggtacatgctctttttctcctctcgcgcgctcgtgtatgagacaaattggttaacgttttttcttgggtggtccctcttttctttatagttccccatgcttcggccaaatcaccaacattcctacctccagactctgccagcatccatatttcttcttgcagagaccatattcaggctccgctaatcagttcacaaacagcaacttttgcccgagcatcactctcacctgctccatcatcagaatcagaatcacaagattcggcaacttcttctttatcttcatctctgagcaggcagttgtcgtctctcacaatcgaatcaaacgctgacgttgagattgaggctgaggctggacctcaaccaagatctcatgaggaagccaaggccagtcctgagcagaaagttgacaacgcaaaagagaaaccttacacggatacgcttgccgaatcattcgaatcacccttaccgactccaccaacaccaatattaacaccaacaattttacaccaaatatcctctcc

SEQ ID NO: 2503 - DNA, 9146 bp, Xanthophyllomyces dendrorhous
ccctcgttgcctccccccccctcgacaccgccgctgccaaccaaacctctctccggagccatagaagaaacctctgggcaaccaaccatcaaagcatacactccttctatctcttcttcctctggaccaagcaccggttcaaaccgaaggagctcactgttcccttcggctcctaaggtttcaccggcagctacgacagctgctactgccattcaagcttttaacttcaatcaatctccctccggaaggacatccgctgaagacccatctgatctgtccgacaactctactaacaattctctgcctcctctcgcggcgccgttgcctgcatcaggccagactatgaggttgaatatgcctttcctaggtcggtctaacacattaggtcggatccccgcttcgtcaagcgtcggtctaggtgcaggtgcagcctctgcttctaccagtggagggttagtagtgagagtatcaggcgggtcaagtcgacgcttgaatgtggggcagagtccgaatggccagtcggccgaatcgggatcagagaacggaaatgggaatggaaacggagtgaatggaaagaccgaaaggcccggtcccgtaagtagcgcgtttagaaagctgagcttctttggaggcaattaagatcatgaaccctatagatggataccacacatatatgcctttctctttctttggattcagactcgcagttgcacattctgttgtttttctagtacatgtacataatagtaatgattttgtaatcaacacggcaatcagacaggttactaacgttagtcatcacctccccttgatcttcctacatcttctttttctctccacataatcactaacaaacaacttctcatacacacggacaagcaaaccaaagaaatagaggaatcaaaagctatgccaatccttcagttctcgcccttgctttcttcgccatcacccgcattcttccagtcgctctcgaaacataaattagagatcgctaaattggatgacagggttgtcgccgtacaagcggagtacaccgagagtcggttcgttagggatagagagaaggaggagggcgaagagggagattgggtcgggttacctgggacggtcgatctaggagctggagcgcttgatccgttagtgacgtctctcttctttccatagactactctcctcgttaagtgatcatcatgtgtttatgttttggactaagattgggctgactgtgagctctcgtgtttctcctgttgttgccattttccttcaacagatctatgccttcatccacacaacattcagttcctatcagcgggatactcaagaactataatacgatcgaagagttcaagtcggctgacaagcaagccatatttcaggatgtcgttgatttagtacgttccttcgttgatctctccctgccctatagtgaaatgcagtggcttattccgtctttgagtcttcactacagatcaaaaagacatccgatgacggacttccctcactctcgcctttcctccttctaacattctcagatctcaagaagtataagttttactattggtttgcctttcctgggattgtccaaaagccagcttggcatgtgacagatgacggttggaagtctgttccatccgcgctcgtacgtccattcgtctacgtgtctctcttgatatggacctctttcctcacaatccatgttatctcattggatgaatgatattaggtcatgtccattaggagccaacttcctgagttcaaggcgctacatccgacagctccgaggggtagctacttgatgcgaaaggtctctaatgagttccacttgttggcacctcttacgtcttatcaagctttcttccaagggactattcctgaagaggtcagttctgtttttctttcatgaagtttcttttggatatgtgttgtttaaaccaaatgtcctgatctgctttgtcgcgctctacatgaatgtctaatcaagaggtacctcgtgttttctgacccctcggctctacctcaaaatcccggttggccactccgaaatgatttgttctatttatcatctgttcacggttgtcggtctatcaacgtcatcggtcttcgaggaggagaaggagcttcgatccaagggactgtgttcgtgcctgagcagaaccaggctgagcaggagtcggaagtagggctgaagggagagcaggaagttctcaaagcggttggatgggagaagaacgagaaggggaaacttggtcctagagtagtcgacctgggagccagtatggatcctactcggtgagtttccgatcaaactttcttcttgtcgaagctcaacaacaggagcttatcctatgtttggtggacttctttccatatgagacaggctggcagcgcaggccgtcgatttaaacctaaaactgatgaggtggaggattctgccagagttagatctggagaagatttctgggacaaaatgtcttcttcttggggcaggcacgctcggatgctatgtttctcgagtactaatggtccgttcatttactcgcttgtcattcatcattcctttgcttgctcacgttatctcttgcataaacaaacagggatggggcgtccggactatcactttcgcagattctgccaccgtctcgttctctaaccctgttcgacagcccctatttgagttcgaagattctctcaatggaggaaaggacaaagcaccggctgctgctgatgctctcaaacgaatatttcctggagtggttcgtttctttcattccatctcaaaccgttcctcgagttttgatcaacttcctgatggttatatttcacaacatacgcagaatgcaaccggccataccctctcaattccaatgcccggccaccctatttctccctcgtcacttatcagcactcaagaatctgtttcgaagcttgaagacctgatcgactcacacgacgtcatctttcttctgatggattctagggagagtagatggctcccaactctcttaggagcggctagaggaaagattgttatcaatgctgcgttaggatttgacagttatctcgtgatgaggtcagtttctgtgtattaacttgattttctcgagaggatatcactaacatatggagttttctcaatcggtttgtcttgtaggcatggagaaggacctagttcagagattggtaagggagatgagaagaggtctcgattggcatgctatttctgtcaggacagtaacgctttgggaaatgtaggtttctatctcagcctacctctttttatatccgattcttattcgacgtttgtcctctgatgctattttgtttcttgtggggatgttgaaagtccttgaacgatcgaacactggatcagatgtgtacagtctcgagacctggactagcgccgatcgcttcagccactgccgttgaacttttagtcgctctactttgccatcccgaagggtacattctcattgacctctgtcattttcctttgaatatatcattgcgtataagattctctaataaaaaaatctacatattttctctcatgctcagaatcgctgcgccagccgacaagcttccttcgaaaacaacggaggatctatcagataagatgtacaaatcaccactagggatggtccctcatcaactgcgaggtggtctttcaacgtatcagactctgaacctgagtggagaggctttcgaactatgtaccgcttgttcctctcacgttcgtccccttgctctctttttttttgctctcacttatcttctcttttcctctttgagtatgtactcacatttacgttgagatgatttctcctttgcgatgtaacaggtcatcgatgattatagatccaaagggttctcgatgctccttgaatcgttcaatgatcccacatatctccctcgattgacaggactagacaagttgaatgaagagacagagggtgtaatgaagagtcttgattgggaggatgacgaaggagatttgtaaatgcgcatattcagagacaggtttcattggctactgacagttcttcttccttgtcgactttcatgctttttcagcttctcctatctttctctctgtatgtgaatgtggattaggattgtctctttgaaatctttaaggttccccgatcgtatatacatgtcaaagatcgagagcgagtgttttgtttgtacatagtcattgctttacatgacgccaacgaagatcgaacgcgggaaagttgacagttgagatgaaagataacggggaacgaatgaaggaatgaatgagagagagagaatgaaggaatgaagggaaagggcccagatcaggtaaagctgcgtgacattggggcatgaatttgactaaagaagtcatgtcgtcgaaagaactggagagaataagaatagatgagatgagatgagaccgaaaggacacacatacaaaagcaaggggggaaaaaaacaacatgaggaaagccaaaaacggaataggtgcaagagaccaagcctccctagatcaagaacaaaagatgaagagagaagggagtataaagaaacacggtgtgaaaaataggagaggccgaacggcagctcctttatttctatctgtttatctggagactaggtctataattcataaacgtggccagcacaatctccacagaccgtgttcctgaaatcgatcgcgctcaatggagctgcgaaaggtttgggttgattctttggatcgacataggccaacggccgtttctttttcgtcgacaactctcttttcaaccctgacccgctcccaacggatatattcgacctgacggacgaattcaaaccagttgttgccgccacagacgacgaggttgattgatcgagcctcagttgagattgacttctggggattgaccatacctgcggctcgagcgagagcgagtctgaatgagggttgtgctgtttaagaacccattggccgctgaccgagccatcatcctcaaccggtggaacgattgagcatgtccctgcaacaggggcaattagacttccactggctgatcggttgagtgggaagacataggaaccaagtgcgcctgcaaatccagtgagagagaatcgagagggtgattcagaggatgtgtttaggttgcttccgaacgaagatgtggaggggaacgagttgtggtaagtggccgatcgagaaattggaggtgtcgctcgattgggagacgtgaaagagcggtagctctgcgatttttgattcttgtgcacgaactttggcggtcgggtcggcgtagaggtagcagcagacggagaggagatagatcctggtctcctaggagaagacgaaaacgatgctggggagagcatagcggaaggagggtcattgtatcctccagcagaggaaggagaggacatcgccgaagaaactattggtgggatgtaaagcgacgaagcaaagctcgaagaggagaattgacttatatcgccatctgggtatggggaatctgggacgacccaggtgccaaacggcttgatgtcctcatcgtcttccatatcctgctcaaacgaactttcagtaaggaaagaattctcatcgggaaggagcgtgttgataggtccattgggcatcttccaagtgcggacaagcgagtgatgtcgaatatgggggataggagccggagaaactacaggcggcggcggagatgagactacaggagacgatggaggcatagacgtaagctcaacaggattggcggccatcttgacaggtaagggagggtcgaacggagtaagcatcgatgggggagagtacgttgatgcataaccgataggcggaacaggtgtcggtacctcctcttcgtcctcctcctcaatgccttccgaatggtagtggaagttggcaggcgcatcgttatcataccctcccatgctgtccaggttatcgtccagatcgaaaccgagtgctacattgtcgtcactttcatcgaaactgctcgagaatgtctgatgttgttgagtctcgacatcttcttcttcctcttcttctaccaaactctccaatggccgaggcaaaggaataactccgaagtccactaagtcaaccatctctcctttgggagctccccacacggatgtcttccatgggtcaagcgtgtcctctgctggctcggcaacatcaggagtcgtgctcgctgatgaaatcacggagcctactcgggaagacgctcccccattgaaggaaaaccgggagaacgaactggagctgcgatcagacgacccagaactggaagaaggagtcggcggggtcgaacttgtcttttcatatcgacctatgaggtagtctggatgcatcactgactgccggtttcgtcggtcttcatcaattccttcagccactctgcgttcttgaagattgcgttcttctataagagcctcctcagctgattttcgagcttcttcagatcgagcaagagaggaagccaaagcaaacacttgatctcgcctacgttgtgaagcaagatgaaaacgaaacacagactattagtttaagacgagaaagaggttcaggaacagttcagagaaggcagtcgtacatttcgttaatcagtcgggtctgagcagccaggtgttcttcgatcgtggtgttcttgttggcacacggagctgaagacgacgcgccatccagggcagccaatctatctccgactgttgagaagaaacgccaacagagttgagtatatgcgagtgaaccagataattgttaagaatatgagaacaagacagactcacgttttcggattcgttctctagctaagtctctttcgacaccagcgattcttttctcgtcctttaacttctcctccaaaactctgcaccgctctttccaaccctcaacatcctccttcaacgagtctctctcgctctcaactatgtccaacagtgatggctcttcatccgccttctcttcttcttcctctccttcctcttctcggtcttgttctctcttggcctccaatagttgacggccgtcctcttcgcatcgatcgtctccaggttgttcttcaataagcgagaagaagaatgggtccgagtcggccgttggtatcctcgggcctatctttctacctgcgcccgattcattaggcgattctgtttcttctgcaacaagggaggaagaagacccgttgctctcgaaccgagcagcataagagagagatcctttacgcttattatccgatcctcttgttcccgaataaggcggcgaagagaaattagactggaaggacagagacccattgactgagctgggcgaaccgattaggtgggaccgatcggacgtcgtgctggaggagagagacatgctgaggggctttgaccttccccacccaaggccgacgtgctttgagtgagattcgctcggcgacatagaagatccgcccgatgaaacggaagatactgagccacctagatgtcggggagagtctctcaggctcgcaaatccaccaggcacagaaggtgaagcggccaggcttaggctgagaggtctcaagttggaccctttgagggagatggaagaggacgatgttggaagaggcagatttgtcggtggcgatgtgagggtgaggggtcgaagcgcccgtttagtttgtcgaggaggagtgtcaatcgattcaggaaccgaaggcgtagagaatgacctcgtcatagatggaaccggagcaggttgaaacttgttcgtagaggggttgggagtcttttcctcttcctcactatctggcaggcaaacctcgaactcttcaatcagctcggcaactggtgatcggggaggtttagtcgatgctgatgatacgacaggtcctttggggaaagagaaccctctaaaccgcgcgttctcggacagaggagtaggcgccggcccagttaaaggaaggataggcaccagcggagccgattgagacggagaaggaggagcagcaatgatgacagcgggcggagtttgagatggctgagagaatgaggagactgtcgcctcacttcttggctttgcgaaggtaaatccctggaatcgtttcttttcgtcctcgatcttgttgctttgatcgccaaaagtctgattagaagagaatctgccgccaccgaacgacccagtggaagagaatcgagggctgcttccgttcagccttccaccaagccttggcggtaagaccgactggggctgagacaaagcctgaggtgagggctgagactgttgaacagtcttcttttccttcgccatagcatcttcgtcctcttcgtcttcttcttcctccatgatctcaccaagtgcaccggcctcggctcctgcaaaccaaggagagactgaaccggctgggctgtcaaagtttgaggacgagaacgcgggggaagacggtgagagaagagaggaagctggcgaaaactgaagagatagcgatgaagatgagctagatggaagcgagagatgaactgaggcgggcaagagctttccaaatgagtctctcttggtgagacctgatcgagtgctagaattggaagacgggttggaggatccggaagatgatcccccgattagtggtgagcctgaaccggccgaaaacgatggaaaacataaggtgtctgtattggagacagagaagtactgctggtcagattgtttttattgctacaattagatatctcagtatgaggcacgagggtggggtgcatgctgccaccctctctgatagcgcccctgtcactccgattgtgatgtcccgccttttttgacagagcgatcctccagattctaagaagaaaacacttaccatcttgctcgatgtctatcgaatcatcactgagatcagggatcatcaccttttcaccccatccggtcgggccattgctaaggacaggacttcgttttctgccttcgagtgcttcaagtgctcgcttcctgccctcttgagaagagatttccttttccttttcttccttgacgaattgcttttcggctgctgccggaagaagcatgacatccaaggattctcttctcgtagacacacttagtgagcgacggtgagagtgacgtttggatgacgaagcttttgattgatgattggctcgattggctggtggtggtggtggttgttgttgttgttgtt

SEQ ID NO: 2504 - DNA, 29137 bp, Xanthophyllomyces dendrorhous
tggttgttgttgttgttgttgttgtgtttgttgtgtttgcgggaaactaaagttggaaggaatgtatggcgagttggacatgttgctggtcatgagcatgactggcgagaaaaaggaaaccaggtacagagagggagagagggaaggagaaaaaaaagcagaacgaagaaggagaagaaagctaccggagcaaggcgaggtgttttgggtaagggtgaaaggagacgagaaggaaggttaccaccaacaggaacagggctggatggaagcgccatttaactgcggatctgtttattacccttctcaaaatatttatgcatgcccatccacttttttactcttccttgcatctctactctgcatttttacatgtatatggttgtgagatatcgctgctttataaatcagatctcttcctcgaaagtctacaagtttgttggcaagttgctgcttctcagacacacgacgccattaacgcgtacgcgcgtacgctcacgaaaaacaaacgcgtcgatacacgaggtgccgccctcctagctgcgcaagagcaaccctaaccgatggtgaacgatgcatgcccttctggatttgggtgttctaagaccacaaatcaccgagatcccatcggtcagaggatgcgcgatcgatacagagacgagcgcagaagtagaacttcaggctctcagattggaactggggtgaacagaggcacaagggaacagagttgatagatctcgatgatggattacactggtgtatggcgagtacacgaactgggaacaagagcagcacggaggaatgacaagtggacgaacaaagggtccaggcttcggaggctatgctatgggtggcaaaggaagcgtgtttcatatctggttcccagactacggaggtactgcatggaggtagtatgacaggcagatacacagacaaacgtatcgcacgaaaggatagaacgacagggttgcacgcaagcagagatcataggatgtggccctggcacattcggtgtacgtctacatagttagcagttgatgcatcacccaaggagtaggagctctggcattggatctatggtactcaggctacagacggctaacactcagctcacatccttgacgattgtgcgggttgtggtctgagaggatccaagtccaaaagggccatttatcgaccatcatcggttgagatcactctcaccgtgcctaaggcatttacctttaaattgtaaggagagagccgtccgttggacggcagatatggccatgcgatggaaggcaattgcaatcgcacggaagagggcagctcatccgacacgcgcatacaaagatatcacacgtaaatgtcatctgtgactgctgaaagtatttctcactccacctcagcgacggctgtcttactcttcctcttaaaagaatgacgatatggaaacaagatcaagttacattctctcgttgatttctctttctccaacgtgttgacgcatacgatatcccaagcaagaatcatcaaagctcaaagttcggactagctagaaattgttacagaaatactagccagggatacttaagttacgaattacgaataattcgcggtgtagggtcggtttctgggaagtggttagcggcggcaggtaattttattttttttcacaggctccttctcgtcctaagaatccagcaaagcaagccgctcgttaggttcgtcgatttggtatacgccatgtcttgacacaagctgtggttggatgctcagtaaaacatcgaagaactaacatattttttctttttctcgatctgtatgattttttactttttttgtgctctttgttgttctcccgctggtgtacgctaggtctcaacttctagatctacctttgaacttctaagcaaagagtgagtttccttttcgcacaatggctcaaaaattccgttaagaacgtctagaaagctcatttggctggattatcagtgtcccacgagtctgtttggttctcccgaccccgaaagtacggaaagggctctcgacaatggtaggcttttccctcctgtagattcaatcagaaggaaaaccctcggttgaccaagattatggacctggttttcgcctcgttggttcctttgtatctttcagccgagtctgctccaacccctctggtcttatccgaaagtacggtattgacacctgccgacagtgcttccgggagcgatccgctgccattggattcgagaaggtacgttggcaaagcagtcattctcttagtcgatatctactttccctccgacttgaaatttagaacataagaatgcggagcatgtgtgatgaaagcggtgaagcaggacgaagtagtgggggagtgggggtatttgagacaatctgcaagcgagatgatcagtgttgagagaaatgtaggcgttgagtatgttggtctgaccgggactgggattcttgatcctaaatccgagaggtttgcattcaaaatcgaagcatcaggaggggcaggttgacgaccatggcctttttgatcttattctgcttccttctttctgagcaccaaccgcttctactctgcttccatcgaaccgattcttacatcataatgcgtctcttctgctttcttgtcttgcaacagaaccgataatctattctcggtcacatcgatcctttgatgtttatgctgctttcttaacaccttcgaactctttttttctgtcaaccacgctcgtgtttcttgttatcttcatccgtctcgatatcttatcatccaggaaagaacttgattttcaaaaggagaactgaggagaagagctggaaacgacaaaaagaacgaaaaaataagcactaaagagatcaggaagcgctaactcgagaggtgtattctgaactgacgacgcaagagatctctagaaaagtggatctgtgttagcttgttcagcacatattcagagctaaccaacgtctgtgatgtgattcggctgagcttactgaggcgtttgctagagatggactagctaattctgatgtcaacgaactgcttggcagatgaggcgcatgtcgtattctggtgaagttggcaagacgataggtgaaggagtctgatcgggtccctggtggttctttagtatatatctgcgctcctcgcctcaaatgtgcaggtgggacatactcatatacactgtatatgtagcctactttggatgtcacagatcttttggttttggcatatataacacgagatgtataggaaagaaagagatagcgagcgcagaaaacaaactgcatcctcagtgattatctgtaatctcaccattcgatattaagtacatccttgatagaacgaaacggacggatggacgagaaacaaccgcctgatgcatcctctcgttgctaaagttcttttaactattttcatgtctgcattcatgtcatatctgtgttttctatataaatatatatgtcatcgtaatatatcccgtgtctagataaactatggcaagacctcggtcctaatacaacttttgcagttcaactgatggaaagtttgatctcctctcttcattggctcatctgacttttgagtgaagcgaaaggtcagaaggacaggcgggaatatttgctgcgcaggtacatcgagaagaaatgcgcagcagttccagtccctcgttgggaaagcctggtgggtgggtacggacagacgttgtgagaaccgactttggaaaaaaacttctcccttcaccgactttcctcaagatggctgaacaaatcgagaaggcttaccagaagcagcacttgttccagaacaccaaggctaagggtgcgtccatatagttgtcgtctttgatggttggattaatagagataaattgctgatagtttatcttttattttcttcccttttttcttgttctttcggactggctcctttgcttcctacgggggggttgggtatatgctgctggtttggggattggacgggggttaccaaaaacttatccacactatgtcaacactgtcaacaacactcttcactcgtaatttgaaacaacccgaaaatatggatgtcgaaatgtgatttgggtgaattccgtgttggatttggtctggtttcgaaaacgggcattatttggaccgtgtgaatgtatcatttgggatgattcgataaacgcaactgtctgcaggtgggaagaaggtcgccaccaagaacaagaggtggtacaaggatgtcggacttggcttcaagacccctgctgaggccatcaacggaacctacatcggtgcgtttcctttaggattccctcgttctaccaactggaaaaccgagtttgggcaaaatgaggagaactagagaaagaacagatgaaaagttccagtctttggacttctgtctttcttcggttgactcaatgtccagctcggtttcttcagagccaaaacatcgaaacgccttcctgggaggaaacttctagtctgacaggtttttcttgttttttttttcttgctcccgccttggctccgattttgcgtttcctacccttccctatcgaccttcattctcggtattcgacgttcctccgactcccaaaatctagacaagaagtgccccttcaccggtgatgtctccatccgaggacgaatccttactggtaaggtcgtttccgctggaaagatgacccgaaccattgtcatccgacgagattacctcgtatgtgtccatttttttctctgtcagtcttttttgtttgaagaacagccaacccactttcttgtgtcttgtgtattttgattgtttctggtacttgattagcactacattcccaagtactcgcgatacgagaagaggcaccgaaacgtctctgctcattgctcccctgctttccgagtcgagaatggagataacgtcaccgttggacagtgccgacctctttccaagaccgttcgattcaacgttgtcaaggtccaggccaacaaggccgccgccaaggctttcgccaagttctaaacctagggactgtctggatgaaatgtcgaggtttttctgatttagggtttcatcccttgttgcacgtctcggttcctactctgctgtctctgtcctgctgcatcaatccggtagctggttggatattgctggatttgaattagcaaaggattgagaaacagtgacaacatttagacacatggaaccacacaacttccgaattagtatctctgaactcagacgtttaagaacattttaagctcatcaaatcgacagtaaaactgaacagagaagacgaccgaaggcaacaccaaagaaacgaacatcatacatgctcaattccctgctccttttcccgatgatgtctctggatatcgtgttcatcttaaatgaagggggggaaagcgaggaaatggcgagacagttgaggctagagaagagagaagagagaatctttaagaatagaaccagctggtatatcggtaaattcggcacgctttaaatacaagaatgaacacagagatatagagaacatcatttgcttgtcttccttccttctggccctttagtgcattgtcaagtgtgtaggactaagatagtcttctaagaagggcgatccttaccgtggttagggttatcgtcggaaaatggaagatactctgattacaacgttgtcttttttgatgtctttgttgttgtagttatttctataattttcctctcatttcgcaaactccagattgatgtacttcgcaagttttaaaacagaggaaagggcaatttcaatttttcttccataaagaggcatgacatatgacccaaacaagtcttttccaagatgttggatagatgacccgccagaccacaagacaaacactttttatcggtaagacttctggactcgggctcgggctccgggtcctccgaactctgtttaaccacaaccacaatgtgacgcgaagaaaaaacgcaaacacacacgaaaagcaagcaaccaaaacagaggaagcaggcaggtcggggccgattgaaattggaagcaggaggattagtcaaccgatcctcgcctgggaaagcgaaacctgcaaagaggtggatcacatgggtgttcaaattgaataaaaacgagaacatactcttgggctccattcgtcggggatcggcgatgaggagggttcggtcgtaggcgacgagagccttcttgatctcgagggcagaggcggcatcgacgttcttagcgtagtactgatagacgcaacaaattaggtagcaagtgagcgacagtgtttttcgtcaagaaaactccagaaagatagataggaaacttacagcgacgatggccttaccgatggcctgtcggacggcgtacacctgggagacgtgtcctccacccttgaccttgagtcggatgtcgatctggttgatcttctcagctccgatgacgaggataggctcgtagtacttgtatcggaggagagcaggctcggcaagtgagataggctgtccgttaagtcggatgagacctcggccaggggtggcgtgggccacagcggtggcagtctatagagaagtgaataaacagagtcaggattggatgtgaaaaattggcagctcggccaaggtcgttcgacacaagctagctctgcccatgctctcttccttttccttccaaactttctcaaaaacgcccctcaaagatagaagagagaggagatacacaccttcttcttaccgaaagtctggacagcgacggacatcttgatgtatagcgacttgtgaggaggtgaagaagggacaagaggagagaaaagcaaagagaatgagaaaaagaaaaaaaatgggacagggcggggatggaaatttcagcttccgaacgtgggtttgcctccgaatcaaggttacaaaagattacataagcgacttcctgttttgtgacctggtttcatctgtactctccgtctcgttcatgcttcgagtgcatgtatatgcatgtttgttctgtctcctttgcctccagcaagattcaaacttataagtatgcatgtctatcgttcagtccttcctgctaccaaatctagagagcgcgcccgtgtcctcagccttaacggcatttccagtcttggctgcttttgcctgctgtcggacctcgtagtcctttgccatctttgccttcatagcaatctattgtagattcaacaattatcttcgtcagattctgtggatcatttcaaagcgagagataagcgagaactaaaagaaaaagaagcaagactcacagtcgaaggatcaatcacgttcttcttctttttcctcatcaatcgagcgaccgtcttatttcttcctctcatcctctttttctcctttgcctccctcttactcgcgttcgactgtccatccgggccttcttcgccagatgatgcggacggatcatctgagtcttccagcccaccgttcgctcgtaaacgctcagttcgagaaagatgagagaagggtgtaggctttgttggtctgggaagatgtgtgaacttggtgggtgcggcgagagaaccaatatgtgattcgtccatagtgatgagctctggttgaatctattttttattgttatcgtcgtcgtcgtcatcatcgtttgtatgcgccagaagaaagtcaagaagaagtcagtttgtagaagagaccaatgaaagaagagaacaatgacgaaccttctccataacggcccggacctctcgttcctttcttctagccgtgctctcgaacatatctccctcgtaactatcgaagttgggctctccagctcctggaatgagcaaggtagagaaacctttttcgtgtccaactcccaacacatcttcgaacggacagaacctaacatcgttcactttcacgccgcccccaccaatcaagttcgacaaataaggtggcggcccgaacacaccaggtcccgaaccagatcgggcggtcgagcctctagaaacttcgggcgaatatacagagacggttgttccggcggcaacggccaaaagacctcgttgggagtaagaggtcgaggtgatctctctcttagaggtccattggttgacgggttgagcccagtttcgggaatcccagatcttgagggaaccatcaaggccagtggtagtgatatatcgaccaagagagctggacgatggatcaactgagactgaagagattgggccaagatgggctaatagtcggacgtgaggagtagacatattcggtgaccagagcgtcatagtacctgtagagaagttttatgagtacgaattagtagtctgtcgattgcaaggagtgaacagaatggaagaaaaacaaggaaaaaagagcaaaagaggaaaacgcaccattttggtgaccaagatgaacgataccgttgtgttggttgatctccatcacattacatcctcccaactttgttcggtgttcctgaacgacagatccagtcgaggtatcgtggtactttaggtaccctgattgagagattgaggtaaggaggaaatggtaaggtaggaatccgagcttggttggttcaacgtgatccttcaatttgctgcaaagaagaagagaaagtatttttgaaccaaaaaaaaaaagattactcataatcaggaaaaaaaaacaattgtcaggatctatgaaacagaaccaagcaaactgactgaagctccgttccatcctgatcatagatgaacacatatttcttttgggcgaccgcatggaatgcggatgtgtgcaagtatctatttccaaaaggagaaggagaaagatgggaatggaagcgttaatgaacgaacagactcggaaccagacgcgcgcgcaagacaaggacaaggtgactgacacaatatctctgcaggtctcattcacataaatttcggattccaacttagcagcctggaagttcatagtagagatatgtcctcttcgcgttgcgagtgccaagtgtctttccgacgaaaagagcacaaaggatcgagatatttggatgtcagctaaaggaatttatgcacaaaatcgagacaagaggtataagaaatcaggactgaccgtccatccctggtccaccgaccgacaactccgccgttccctccatctaactttaggtcgaaccctttggctgcactggctgtaccagccgcgtccttgatatctacctgtgacaccttgaaagtgcgttccataggagccgtagtttggatcattcctgcttggttctcgagaagctatccaaagataagcagggacaagagaaaaattcagtagtcgaacgatatggaaggaaaaatcgatgagtacaacgactacaaaatctaggaagtacgaaacaagtaatgagctggagattacgaaccatggctgcatcctctcgggccttctctgctcgcttctccgccaacgcgaccgctgcaaccttggaccgaagtttgaggtccttaatgttgctctttggggggcgaagctcgtcttttgtctgaagcgaggatggtgttcgagtctgataggtcaaaggtcgacacacagaaccgattcagaaagatagaaagaagtcgagagacaagcattatcagcaatcattcgcagaagagtgagaggctcgaagagggaaaaaaagcagagcaggaagagaaggaggacccattcatatctagaaaaaggaagagaaacaagggagcaatggttggactcacgcctggtcggagcgagtgtagcgttgggtcgatcatccctttagaccccgcatcgacagtcttgtgagggaacctctttggaggcttacccgatcctgttcctttggccttgttcccgcttggaacctggtttttgttcttccctcgataggactcgatcggtgtcgatgtagccaggaggttatccatctgaagtatgggtgagtcgtcggtgaagttgggagtgcggatgatttgaaggaatggtacaggtaaactgggatgaagacggttggacgatttttggatattggtctaacatggcggtgcttctatccacgtgacctggtaagctacacaatcacctggcttaggttcaagaaactccaactagacgatgtatgcccaacatcagcactctttattgatcatcttacgtgatagaattgatgtatgtcgttaattgtgtcgctgatctagacatcaatatactcagagtatttgatcaagggatctagaaagaagcaattctcttttgtcatgaaatttgcgcatagaaaaacttctgaatccgggagaatatcgataaccataaatgatggaagtaagtagctatgtgtccaagtcatctcgtattcaatgctctgtactgtgtgttcgcgcgcaactaagaggtggattgtatgatgtcgaatgagagggtgtgtcatgagtatctacaacggcgcatatcatcgtgcgcgtgcatccaagagaagacggaaggcaagaatggctgcacaacacaattaaagaaactcagactcgtctcggattctccctgattgcgatcaagttggtcttgccttcttttattgttccaaaggtccatctcttagacgcctcggatgggtggaaaatcaagatgatgaccagaggagttgaacatcaatataccttactacttctgtcattggtattcttaagttttcgtctagctgatcggacactctcttcttacgttcatataaaatatcatagatgtacggccactccctcgcgcaatctaaatgccaaagaatccctccgactccgtgtgtgtatgatgtgcgtgtgtatatgtgcgtgtttgttggctacggtttccgacggagtttcaatttagtcacgcagaaatttctcacctccgccttttctttctggcctttttacttgcctttttgcctgttcttttttctccttcgttgtcccttcaagaacatcgtttctcgcaatgtcgtgagtattcaagtctgtttgtcgtgcgaaaggccattgtgctgaccttggcttccgtcatccttctctcctccttcagccaccgaaaggttagtttttttgcagttgttcacgcctttcaaacggcgccatggccgggagactccaccccaaattagggaatattttcttcttcccttctccactttgggctcctggaccgggcacgagactgtcagcatatagactgactttctcctctgccgtccaaacaaccaaaaccacccacctatagtacgaagccccccgacacggatccttgggattcttgccccgaaagcgatgcgtcagaggacgaggaaaggtccgtatctataatttctcttcacagcgttcttttctggtctcagctattcacacaacttgtcccgtccattcaactacaacaggtgaagtccttccccaaggacgatcctaagaagcccgtccacctcaccgcctgcatgggatacaaggccggtatgacccacgtcgtccgagaccttgaccgacccggatccaagatgcacaagcgagaggttgttgaggccgtcaccgttgtcgagacccccccgatgatgatcgtcggagtcgttggttacgtcgagaccccccgaggtcttcgatcgctcaccaccgtctgggccgagcacttgtctgatgagctcaagaggcgattctacaagaactggtaccgatccaagaagaaggccttcaccaagtactccaagaagcacgccgagaacaacggcgcttccatcaaccgagagcttgagcgaatccgaaagtactgcaccgtcgtccgagtcttggctcacacccagatccgaaagaccggtcttaagcagaagaaggcccacctcatggagatccaggtaagcttgacccttgctctcgatttctcactcaactcgcttttgccttactcacacatcccctttcttaggtcaacggaggaaacgttgccgacaaggtcgccttcgctcagggtcacttcgagaagtccgtcgatgtcaagtctatcttcgagcaggatgaggtcatcgacgtcattgccatcaccaagggaggaggattcgagggagttaccgcccgatggggtaccaagaagcttccccgaaagacccacaagggtctccgaaaggtcgcctgtatcggagcttggcatccttccaaggtcatgttctcggttgcccgagctggtcagaacggtttccaccaccgaaccgagatgaacaagaagatctaccgagtcggttccggtgaggacgagaacaacgcctccaccgatttcgacatcaccaagaagaacatcaaccctatgggaggattcccccactacggactcgtcaagaacgatttccttatcctcaagggttgcgtcgccggtaccaagaagcgagtgcttaccctccgaaagtccctcatggttcacacctcgaggactcacttggagaaggtcaacctcaagttcatcgatacctcctccaagcacggacacggaaagttccagaccccggccgagaagcacgccttcatgggtcagctcaagatcaaggcttaaatgcgcttttttttctgcagatttcatgtcgtataaaattcagatcatttcataaaattaagaaagtgtacacaaagagatcatggcaagcgacacaaattttctcaacccggtgtggtaacgatgagatagggcaaagaatatgcttgtagaaattttagaaagtaaccctaactatatcatggagatatcctgattgaagttgttaaatatcatttatgcacccagatgtctcttctttttcactttctttgtcttcagaaacaagaatcagataaatttgagtaataagagcaagcatcgtagatagaaaggattccaggagaaatctttcaacaagaaaccacaagagaagaattcatcctaagcataatgataatgggtgaagaagcagaaaagtggagggagagatcttttctattactcgtacaatgttgtatgcaatcaaaacaagaataaggagaccgatacatagaacaataagcgtaaggatgagtgaaaacaggatagagaagccggtatatctgaaagagaacgatgtgtacgggaataaatagacaagaggaatagaaaacacaagataaatagagataccaagatgagaataatgaggaataacaagaccaaaagagaataatcagacgcattgtcgtcttcgagacccaaacaagagaagaattagaaaagttgggaaaggagtgcggtttgttgtaagtggattttacatagggcgagctagaccaatgcattagaagactgtttgcagcttttgaagtaattcgtcgatccgataaggttttacaaccacgtcgtccatacctgcgtccagagcggattgaatttgatcggcatgagcattaccggtcaaaccaaagatcctttgccgggaaccaatttctccattggactctttggaacggatgatcttaaccgccgaaattccatcaagaatcggcatgttgacatccattaggacggcatcgaatgtctgttttccattccccatggacgcaaataccatatcgacaccctcctggccgttgtttgcaacttcacacgttatcttggccttgttgagttgacgacgaaggaccttttgattaacctcgttgtcttccacaacgaggatatgaagtcgcttcaaagcgacgtcaatctgaagagggatcgcacgggccggtgagttgcctttcttgtcaactgcgatcgtaacctcgaagaagaaccggaacgctgatcatcataaaggaaagaagggagtcagacattttaagattggtcttgaggtatacggcaggagcgaaagcaaactaaggaggagcttactcgatccttcgcctggcacactttccacatctatgcgtcctcccatgatatcggtaagcatcctgcagacatagagtccaagaccactacctccgaaaacagtatgagttgttgagctagcctgagaaaacctccggaagagcttgagcagttcggcaggcgtcaagccgggtccagtatcactaacggcaccataaacaaaagctttggatccaggagcatactcctgattctcgaccaccggtggaggtcgacaggaagtatctagaggaggggctccccggatgtcaacagatatcgttatctctctcacaggcgcgtgcgcggtgaagcgaatagcctgtacaagtgcgattgagtagatgagcgatagacagccgaatagtataacaacatgaacaagacttacattggacaacaggttgatcacgatttggcccaatcgaacagggtcactcatgagtttcaatggctccagtgccaacaggctgtttcccaaatcaagtttgagctgaatatcctttgtgcgactatagatcacacacaattccagaaagagttagtaacacactagtgatagaaagaggtggaggaaatggctgaccattcattcgagaaggtgttaacactgaagaagtacagacagattggatgtatgagctcacgtccagacgaagcagaaatgaagaaaacaacgaacatcctccgacactcggctggcaggtcgacaagaaccgccgcaacttcaagagtatgaagctggatcttccccatagataagacatcattggcaatccgttcttgagagcactttttgcggccgagagtacttgaagtcagcaaaggcatggctaaacagagtacgaggacaacagacatacggccatttcatgtatggaattgagagcctaatttatcacaaatttttcttcagatcttgcatgacagatggtgcagacaagtttgaccacttacatccagatcttcatccatcaaattcagcagctgttcattgggctgataccggactttagtgtctatgcatgcttgcatttcatctcgcaaaactggaaaacaggcaagcagatcagagtttgtacaaagtaaacgcagttgtgagacaatatattcacagaatgtactcacattgtaagtttcctttgcacaaactagcacattgaactaaggatgcggcgaaggaacggcataatatgaactttctgacacaagcccaacaaacaagcgtagcacttacgaatagctgaaagagggtttctaagctcgtgagaaatcacagacaccaagaactcttgatgccgtctgtcatagtaggaagaatatgttcagcatgcctgaaactgatcatgtgttaattcagcgatgactgaacgaatcttacttctgttcgtcagctatacgtcgccgttcttcggcgtcttctgctcttgatcgctcggcctccatgttcaaccgtcgttcaagttctaatcgttttcgatcggttatatcggtctgagcgttgcaaagcgagacgcatctgtttagcacaacgtagcggttcgcgcgagaagctgaaagtcgaactaacgaaagagctcaggcaggtaaaggtttcgtcacttgagatcaccacagattgacagaaagtccagatacctgcgatcgaaattaaagtctcagctaggaatctagaattcagaatgcgagaggaagagctatggggcttgccattcttgaattttatctcggtggatcccgtttgaccacgcaaagaattattatgtatatgaacagccttctccacatagtcatctgcaacataatccaaccattcatccaaggacgcatcctaggaacataggtaatttaaaatacgtgtcagcaaccagaaccaaagcctcccagtttcaactgatgaacaaagattcgacatacaggaggaaatccgctttgccgatagaaggcctcgtttgcgtagaaaacaacaccttgcgcatcggttcttgtgattcctaccggcgacagatcggtcaataattcactattccaagaattaatttgttagccgatagaactaataaacgcagatgaatataagcagccttctagatataaggataaacactaactttgctctcagctgtgagaagaagaacccaaatcgagagtttagtctaccacagatagataagcaagcaaatggacacatctatcacatgcaaaactcacctgctccaggaactatgagaagaacagaagaaacctcaacgacatcagcctacgctcactatagttttctcataaaacttagaaaacctacctgatgttctagttgtatgcgccgtttgcccaactgcatttgaagatgtgacctcgcaataagctcatttctactgaaaggtttcgacatgtaatctgaattgcaaaaacttttcagtatgagaaggaacaaaaaattcaaagtaacagatgagactcaccctctgcaccgatgatcaagccattgattctgtcttcctcagaggtctttgctgttaacaggataacaggaataaggtttgtctctttattcgctctaagagctttcaacagctgatttccgtccatgattggcatcgaaactattccaaaaggcagtatattcaaaagtcaatgtcttgctctattcttgtacctgaaggcataggactaaggaagaacaacataccatctgaaatgattagatccggcttgtgtcgcaaagcttttgtgaaggcctcttgaccatccgaagctattataatcttgcagtacgggctcaatatactagataagtacgtctgcaataagatcataacgtttttgtcagctctataaacttctcgagctaccttgatacgcgaatatgcttaccgtcatgtctaagtaaccatcaaacagagtggcagattgtttcagcgacaaacgaattaacgagaattttatgcgaagcttaccgtgtgaatcgtcgacaaccaagattgagtctctgtgtttattccaatataacgcgttcacatctatcggacttgaagactgatgttgaaaacacagatgacaatggttagctacaatcaacaacagtcaaaagcacggtatggagatcgcaacctacatcggaagactggaagacaagacaaatacaatcaaacgttcattgagcacatgtatctttatatgagatcctgacacaacagcacacgtctacttaccaagccgccatccgagagattagcagaaccgttgttcgagtctgtattgctcccgctgccattcttgtaccatctagatgcctcgtcaatgattccctgaccgtaagtaatacccgtagctgatacattcaaccgagaacagacaaaacgagcgaaggtttagttcgataccagaaaccaccaccaccaccacgacgtgttctctgaaaacaggataggacgtacatagatctctagtatcttccacctgggcaacaggtaagtgagcccgaccatatggaatttggacggtgaacgttgacccatgtgcgcctgtctcgctctcctcagccgttgatgaggtaacggaaagagttgccgagtgaaggttgatcagctccagagttaaggaaagcccaatacctgtgcaaattaaacccatggattaaccgaacgattctctatcgaactatataactgacgagttcagcttaccagttccttcatgcgatcgagaggtagaagcaactcgatggaaacgctcaaaaatacgactctgctcgtcctctgtgttacagaaatacagacagttgagcttgcctccctcttgataggggttcgacagatatcatgggcactcactaggaattcctataccggtgtctgagaccgaaaagacgacatagtcatcctcgtaggtgagcttgacatcaacagatctacgaggcaaagagaaggttgtcagtctattgatttccgagaggatggagcttgaatgcagcattgtgatcacggaccccgaaagagtgtactaagagaaagtcaaagccgatgaatcgtcagtgtcggatatagatggaggaagatcaaatacatatgcaactcactttaaaagcgttcgataagaggttgaacacgatcttttcccaccactctcgatccactaagaaaaaatcacacatgaaagaaccaggttggtatctgccatacagggtcatgagaccagaacgagttcaccaaccatatactggaacttctgttgaagactcgcagctgacattgtactcaattttttccttcatatcggtggaaagagaaaaagttggggaagagaagagaaggtaagcgtcaccagatattcacagtcaaggatagtccaggacggaaggaaataaagagaggaaaattggacgcacgacctcgatcgcaggacggaaagaagctgccaagtcagctgtgagctctccgatattagccggccggaagtggcctgtgagtcgaccagcctccaattttgcaaaatccatgagtccatcaatctaaagggagaaaagagtccgcacaaatgctcagggaatcagcgtacgtgagaagagatcaagacattgagaagtgctggccttactaatctacctagccgagtagcgttcctcatggcgagcgtaaaaatcttcttccgacttggattactttctgtcgcacagaggttttccaacggccccgctatcagggtgagaggtgtcttaagctcatgacttatcgaagtgaaaaagaatgtttttgctttatccatgtcttctagacgcttggttcgcaggacttctgattcaaacagagagatacccctaagattcgagagcaattgtgcactgaagagaaaccgatgcacaggcatagaatcagtatatacttgatggtcaactatggtaagatagaaatcttaccgaagatcttctataaactcttgataatctgcgtcgtaaggccgacgagctatgagataagaataccccaacagcggttagtgaatcacaggcagtacgtaggttgatcacatatgagaacaacgactaactgtttaaaccgactgtgagagccagagaaacaattaagcagtattatcagtcaaccattcctgaacaagaacataaaccgatgtagagcttttcatactgataagaaaagcctagagacgagaaaaacatgtgaaagagaaggcgctcagcaacaatagataattgtctgatggaaaaaccaagacatacgagtcgccctccgttataatcgtccgatattggtatcaccacactacgatcagaaatccgccgcaggagatgcaataagcaatgatagaaacaggagatacacagatgcgaaccggactgaactgaacactcacgcagatgtaggtgactctccccaactcctaggttccaaaatctcggcaagttccggatccaaactttctacgtgaacaactcgctgagtcatgaatgcttctctgagcggccagggggaccgactctttccacttgggtccggcatctcttgtggatttgacttattgaactcatatatgttgagatcaatcgtcaagggtgccgaagcgtggtcttcattggctcagacggaccgatcgttgttagtgctgtagcttgtgaaatatgataacgacgagggaacacacgatctgaacaatcacctgaaggtactccaactaaaagaacaaaattggcattagctcaaccgacctcgaaacgcgctagaagagcattcacacatgggtagaaagagagggaagaaagcagtccgacgaacctgttccagccagatgaaggacgatatctctgttttcacttgtggatgaccctattttttgtcgaaaaacacacaaggtggtttcagagtcagatttgaagaactacttgaagtgatgcacgtcggtgctcaccaatatctttggcgtgatagagataagcaaatccaaagtcaatcgggtttgcttctacgcactacgagtaatagacaagggtcgaataaagaggttaacttctgagatactgtggtatgggtgatgaagacaatggaaaacaaattcacttttaacagcccggaagagaactctaggattgatcgggccgcggctacaaagtaatacaaaagacacagtatcagtatggcctcttttgtagaaacatatatccatagaacgcgagctcttgcacaaagacggcgatccgctgactaaattgattctaatcaccagtatgccttccaatatctcgaacagatttcagccaacgctctttgataactttccttgtggcttctaatgagttgattaagagaccacctagttataaacaaagaagaggaagatggcgtaaaggccgggtcagaagaaaacgtgtgttccgtaaaggtagtgtttgaacaaactaggtctttcacctctcgaaccatctcctctggtcaaaggcgtccacctccaactctgatacgattccagcccccctatgaacatgagatctagagagaagatacgaacgagaaatatgagaaagggaatagagctgatagattgtaagacaacaggaacatctaattaccatcgtccctcatgagagattggcctctgatcacgacgtcttcggccattgccgagtactcttcccaaatctgtttcaataaagatgtacatttccatcagatttcggtctactaagtgcatgattcaaaccatcaaacacagttcatcggaaattactaacaggagcccaagcttccgccgcaactaccaagaattaaaaacttatgtccgcttcagtcccaagagcttactgaacggcggagaatatatatgaaagaagagaccacgatgagaatgcaactgaagggaagaggactaacgtgctccgaaagaatcaggatgctgggcagccacagctcgagcatgagcatcattatagaaaatggtcatccctgttgcgggatgtccccaccctgagtaagagaaaaaggcccatccataagcataatcagtcaaagatgaatctcggctgtgtatctacagagacacagaaagggaatataacgttacgaacagataattgactcgtttggcgttcgcagcatgatcgatagcgctgctcttagcgagcctggccatttattctttggacccatgcgggtatcttcccacttgatcgtgtctagaagttcttgacaagagatgatactgtcagaatccgaggtatcagcctccatgaaaaagtcgttatcacgatcatccggtccaatactctcgttcaatccggcttcatctttttcatctagcttttccatcattcgggatctatttggctctccaagtccattgccatggtggaggtccgcatcatctccctcaatggcttgagttcctgctccaggagctccatttctcaagcgggtgtacgatccaagactgctaagcttgctactcaacgtcgagcgtgttcgacccatatcacttcccgtcaaaccggaccgaccgccaactgagccaccgctgtacgacccggatagactccctcctccgatccctcctcctagaccccagcctggacctttctttgtaccagttccacgaacggtaatatcctcacggcgggtactgctaggtgcgattgatgaattgatcatcggctgacgaataggtattttggcgtgagtacccgcactggcgaatttttttgtcggtctgagttgggcggctcggaccggctgtgggtgaagatggagaacaaggaaagatggatgggaggaagaggtgagaatagcattgtatgttttgccctgtatccaagagggaagaaaaaggttgatttcgatatacgtctgagactcgtctcggaaggaaagaacgctatcggtgttttcagacgcgtcatctcgggctagagcagcttcagaggtgatgtagtcggtggcctccaagtctctggttgtgattatttgtttgagagcctcaccctcggcttggtcgatacattgttcgaacgatccatccatcaataatcgtgccgcttggttgtaccatagcggggtaagacaagctgaagacgaggaggatctggtttgaacaggagacgaaagtaattttgatcaaaatcaagcagacgactacgcggattgcttgattcaactcctctttccttgacattccagaagggcggtcaatatgcgaaatagacggttttacaacagacttacaatctaggagaaggaagcactaatgctgggtgcggatgggaatctagatacggcaacaaagaaagattatcctggccatcgtcgaacatcgtcccgagagatagaaacaggataagcgagaagggtgagtcagcccgaaggatttcttaaacatatataacaaaaggagttcaagcagccccatcacactatccaatccttccatcaagtagtttgcagggtatggatgatctctgcaaccctctcgatccgcgacactcctctgcaagaggctgtctttcgagagcttcgaatatcgcccttcaagacttcggcggggtacgatggaaagatactcacaaccatctccttgaggatcgaattgttgtcctgttgggtttgagaggacaaggtcgattccttcctgttcaatgtgggtggcataggttgaagcttgccttgaggagagagcggagaggaaggcaacgacggctgaaaggcagttgcccctggctgctcgagttttgttgaccttggcatggctcaacaaaagtatgacaggccaggagagagagcctcctagattaaggagagggagaagaaagaaggtaaagtatgagtttctaccaaaaggatacgttctgttcaatgaaaagacagtgagagagaacgtggagggacagtgattgaaggagcgatgagggcaagaacgtacgggaagctcggttagctatcataaagatgtatacggcaaatggttacaggctttacattgaacgcccgaaggtctagacattctatatacagattaaaaagcggggaggaaacgagaaaatacacgtcgagaacacgtcatggttacagcataattacaatcgataaacctttgtttcttctgcgcttatttcagtcttgtgaaaacaacggtctttttcttttccagtccttgagtatgcaaaatccattgacggagacacttttttgaacaacatatgataaataaattgactagatgatacatatatgtgattcagcactagttgtgaggggagaattaaccaaacagtcataaacaggttccttttcacggaaacagtccgtccagattactatcgttatccataaagtcgttgattccaaagttggaaaggtagcctgggggaacacgagaacaacaaccattgttcagaactcgttcacatacagagcagaagacaactgaacaccgaaccggtaccgaggagagaactccagccttgacaagatgagctggtctccatccgtctatttggattggcattctggtttgatgctgagaggtcgaatggaatatgactttgttcaaaggacaaggggcattattagttcaaacatacaactaaaggatgtatcaacagtcaaatcggaacaaactcgactaacggaggctcatagtcttctggtagatacgactcctcccgaatctctggtttcatgactatttgtaaatacaacaagaaatgaataaatgaccagcacaaactcttattcatattcaaagtagaagaaaggaaagccaagttaaagagctgttcactcacgtcctatccagctggccacaaaagcctcatcatctgacttgggtaaccctcccgccagtcgcattggaggtatcgtaactatggttcataacataaagaaattcaaccacctaattctgttcaaacttgcaaagaaaagagactgaacctacgatctggattacgagcgtaacgacttggagcaacaccatccgatgtcgatgccgagtttgttagcgaatgtctatgcttctcttggtcatctttatccttgatagatccctcctttttccaaggatcttttatacaagcctcgatgttgcacagaatccggtagcacctcctagccgtctttatcacagcgttcggaggaaacacttcctgtcgtccgtttgtgttgaatccatctgaagaacgccagccaagctcttgaaggcaggtaaatacctgctgagcactcttgtacgatctatcactggatgccttgtcaggctcgatgccatgggagtattccacaatacgttctgataccctcaaggtagagaaaattgtataagcaaagaaggcacttgcatataaatgtatacacaaagaatgaacatagtactcacgtgcaaggacgatgagagcactgctgtacagatatccaacgttgagccaccagaagccgagtagctgggtcttccagttcgcagagatcaggtcaatcaactttatggcagaatcagcgcacacagccgcactatcaatcaagacgcaggataagagacatccatagttagtttagaatatgtcagaacggcatgtaaccatgatccgaacgaacctttttcgagccatcaggaacttaagagatgctggtacagggtacgatccttcaggtgtcgtgcaaaagtaaaacaagaaggggcgatagacgagaatctgaacgttaagatatctagaaggttgaaaataagaggagaaggtcagctagatcagttcgagcactttcagtgtgtaatcgaaaaggactaaccggcaggtcaggatgagcttctgcttttggtaaatcgcatcgaatggacacttgtctttgtccttgagaccttcaggaaggctctctcgccactttaacagttcctcctctaaatctaggacttgacttgtatccggaaaaaacggagggtgctccagattatacaacctgttcgcatcagtttccccaccagtttgtcaatgccgtcagttcgacgtcaaaacaccgatttctctatgcagtcacagatgaagacaatgtaagattgctgctttacctggtcaaaattttgttcttgaccgagaacagcttgatagtttcgaagaaaaactgtgtttttggaatttctaggcgatcaccctctggtggaacgagcatcgcatcatcatccaaaagatcaggagtcatcaaggaatcaaagtcgaccgcgctcgaagatgttggtcggtagagcatcaccgatcttattatatattcagaagatggaaaccaaatcacaaccatgatgacaatcaagagccattcccttttcaaagaggaatagatcgtcaaagttaatgacttacgaggtagcctccatttgaatctattgataattcgacgcatgagaattcacaccatagagaagagagcgggccagacgaacatgctcgtaacattaacacaggagtgaacatatttgaggtaaaacaatacttacacaacccgcccaaacccgttgacggatgcaccgttccatggtatcaaatgtcttattcactgctggatcattcagttggagtcctctagccatcaacaaggctagccctgaggcattggctgcaagatttctgtaaatgcgagcggataggaggtaagcaagagggacgtttgatcagttgatatgatcgaatatattgatattatggctgggcatgtttacccttttgagcaactacagtagtgattattgaataaagacaatatcaaataagcttctcgccagacagtattgaccagaatgtcgacattcagcaaacctttgagagtggaaacacagcaagaggagatacgtgatgacttccacattactcatcaataatacttttctccaaaatagaaagtgaacgaaagctattcagtcttttgaaccactgccatatcatataatgggtaccaaaaaagaggcgaaacaggaaaaattaacgaaccatgcgtagtactcatcagtgcctgactgttattgaagcaaactccagctctctccatatcacccgctcttgatcgaatagcacaggtcaagcaaaatatcaggttcaagctagccaaataaatgtgatctgcagctgtgctggcctcccgaagaggctgccttcgaagagtactatattttgaccggaatgttcggaagtggatgataggaaagagccaatgaactgaacagcgtaaaagtaagattaaatggcctggtaattgaatatagataagagttttcaaggcttactatgttcttcgtaaaagtctaacaagtcatcagctagtgctggctccggaagttcaaactgcagaaccgagggacataaaatgacagagaaccaacaagagatcgaaactgatgtaagctggactaaacgaaaaaaaggagggaaagatcaaaattattgagcagtggagaaatgacaaaccatttcatcataagccgggctcggggtttgcgctgcatttcagaagccggcattatatatcagtaatcagaggactattgatgaatctaatgtaatgtgctgtatgttgggttaagagagtcttgaattgaaaacacttgccctgggtcagaaatccatccgatggtctccctcgaattggttgccgagtaggctttgctctctgtccagtcaaccttgcagcagcagattctacaatctctgtggtatgcccgtcatctgccataaacaagagaaagaaaaaaagttgagcctcatcaccttatgatatgtgtcttctaactcctagtacgaacgcatacgcattgtaggagcaactcacttccagctctctcccatcgaagtctaggagggtgcaacgaaatcatctttctgatgcctgtttcactgcctgtgcccactttcccactctcagtctgattctcgtcctcactttcttcttccgtgtagtctgaggcttcttctacatcgaagatcacaggatgcccaggctcgtccaccacattgttcggattaggctggaagtcattcggatcaggttttattgttgattgagagtagctatgatagaacggggacgggtgcccaaagttgtatcggtgactactagaattgtcagagcgccgaaagggatccgaaggaacgtttgaggatgagttgtatattgaattattcgagggttgtatattcgaatgatatcgattttgtgattcatgctgctgctgctgttgctgttgtttctgttcataactctgaggcagatgtaattgactatttattccgaaggaactgtcattggaagactttctttgatctgtttcaaaggatgatcgagcacggtcaggctggtaggaagacatatcgggctggtcgtggattcctattccaaaactcgactgatctctttgttcgaagggatttattgactgtaatgatgctcctgtaggataagaggacggatggtatgcagccgaggctgaggggtgcattggagctgtcgatgaggatgatatccccgagcttggagtaccaatgctagagattcctgatagctgagcggcttgttgaggttcgtttgttgcctgagctagctgccgttctagttcttcgacatatcttatttccgagggacagcagatcgaggtcagcaaaagaacaaatgacgaagcacgaatgcttgatatcacatacttgactgttactcttctcgtgggaggaggctacaagatttccaaagtgtacacaatcaatcagtcataccgaaaacgagtaaactgcttgatggtcaacgctactcacatagaaacatgtttcgtcatgttgcagacagattgcacatctcggcttgccatcacacttcgctctcctctgtctacagcccacacaagctctctcgacccgttttctcttctgtttgcccacaggaccatccggtacaattgccgctgtcagtacagaagagtctgtcgtctgaacaggacctgtgttctcggtagacatatctggcgccgcaattggtcgaggtgaaggtatgacatttggtgttgctatggtcactaccgatggtgacgcagacaaagaatccgttcgctctgtctgctctgacatggaagatctgttttttcttcgaaagctagaggttggggaatcaaaagggacagaaaaaggaaatagaaagatagaagacaaacttcaagcgactagatgaatgagactttcgtcactacgatcaaatgcttatgtaattcccctttggtctagcggcttttttctcaagagatattccagacatacagctcttggttcaatgcaatataggatgatagacaaggttccacagaagttcacaacataatcaagttgaaatgtgagaaacaaatagagtaaaaacaaggataaatgtcatagatagaataaagagaaggacaaactcccatgatgcaactgacgaaagatcaacaaaggggataaaagaaaaatccagaggaaggtatagaagtagatgcaagagaagcagagaacagaaaatccatgttagacccaatctttcttctcgctagcactcatctaaccaggaattctacaacaattgcaagaagacagaagtgttagcagtcacactatcgtgatcaggagaaaaaacggagtagaaggcgttgatattacttactcccggccgaggagcgtcgtctgtcatctatatggcaaagttatggcaaatcagatacaaacgagaaacctaacgatcaaagggatgagttggttgagagagcataatcttacctgttcccaggtggtgatgttcggattagcgtatccttctggatataatgcaatatattctataatatgacagagcatataagaatttaaatcgctcgtcagtcttttagtgttcggatggagcgggattggagagacaaccgacctgccgtaggaaaatcgtctggatcacaacctgtcaaacacgaatagaagccaggcccgttgaatatcagtgtatgcaggagggtaggggcaactaatcgagcacataccgatgtttttcaagctcgggtcttgatacactcggatgtagtctacatactgtacacgaaaaagttgtactcttgctgtgagtaacggatcgagaaaccatcaagagcacaaacggctggcagcagcgacatgggactaaccatgtgaacaggccatagatcttccagcccatcataatcaatcgctccgaaggcagtcgatagcgctatcaccccagtcgccgacgtcaatatacttaatatcagttataagactcgataatatgcacc

SEQ ID NO: 2505 - DNA, 1084 bp, Xanthophyllomyces dendrorhous
gcaccaacgatttatcgtatttcatgagaatgtatgggaatactaacccaagtttataatgatatacatcggttcttgcggcactggtcggtctgatacttccaatacagaatttgccgccatccctccttcttgatactgccaggaaggcgtgtcatcactaaaccaggtgatgtacctatcatgtttcaaatgaagtgatatatgcgcgtggattagtcaaccacccacatgaaagggaaagtttaagactaagagaagagaaggatgtaaaataacgcacccgtcactgccaggcaagtattcgaatgcataaaccgaataacaatcgtcgccatcggttaaaggatgttcatagcagttttgatttgtgtacgctactcaacccgaatgaggaaaacaacataatgtcagatacgattcttgtatccctatggtagtttcgggtacgtttaatcagactcactgagacaggatgtagattgctttggtagattggcaaaacaattcattatcagtaagaactgtacaccctcctcctgtcaaacacgaataagatgtgtaataaaaagaagtacaaacttgttcttgacctccctatgaagtcaaaatgacaaaaaggataccatgttaggacaagctatgttgctaccgtaaaagaaaacgtatcgacaatgaaagactgactgaataagagtttaacgctgtgattgatgtgttatatatatccatattcgtctcgttcaaccactgacatcagaaagaaatcgaaggagtcaatccccacacattgggaaaacagacactgcgaacagaattaagagacgtacaaggtaataagggttgaacggcgcgaactgggtagcaaagaagaagaaataaaggtgcgtgaacatagaagaccatctatggtaggaagcagctgttcagacatacttggcacgactgagaaacttgtccttctaacactaattattcgattcaggtagtcaccaaagtaaattcaagctcgttagtcagattgccagctgcaagtctgaagatttagatgatcaggtataaaataaataaaaggggttgaggg

SEQ ID NO: 2506 - DNA, 7540 bp, Xanthophyllomyces dendrorhous
gcatacagactcagcgagaacagtacctgagcttcaaacaaatcaatctctggggcggatcgtcctacccatgtcccgtctgagtgcttcggtcccgggtgagctacattgtcaagaaggagcagattaagtacacatcatatcaaaccgacagacagtttttatggggaacgataaaactatgaatgtatacgtacttgtatcattcgcgcatgtgcacctcgacagccgttggccaggcaagtaagagaccggggtgccccctttgtcgagtaaacaaagaaaggtggcaaggaagaacgcataagtatggctgtatgatcgaggcggaaaccccaaaaacgatgcagaagagacttacattcctagtaaaatccagaaagaaggagaaagagttgtgcacgttacaaacaggtctgtaaatttcatactgtaaaaagtaaaccaaaaaagcctaatcaaacgaacgttaagattggaagccccttccggaacaccatttttggactggttcgccacagctacgaaggaagaaagggcaggcatgactatccatcagattcgaacttcgtttgctatgttctcatgtatagagagacttacttccgacatcgcatgaatcgtacgagtaaggccatagaccatccaacgttcctccatacccgactctgcccaagttccctagtgtccatacggcaggccatactacgagcagacattccattcgggcatgaatttcaaaacgataagcgcgttctacacatacatgtagacaaacggctgagaatacacatacatccatatacatctggtcgacccggaagcttgacagaagcttccagacgtccgccagtgaagcagaacttgttccaagaactaatctctgctccttgataataaaggtcgtgttgagtgatgtttgatagtgtgaggacgagcgagccattggctgtagtgactgcctctggagaataccactccagatcgctttagaagggaagattgtcccaaggagaggaggaacgacaaaatcagtctcctgttcttctcttcctcttttttctgccaatctattgaatctcagctttacgaactcagtggcccaggcatgtaaatcgttagcctcccagtaagggtcatctccggaatagaaggatcttccgtcgacgttaaactcgtcagaaaatacgagctcccactctacacccgtgttggaggtcattgtgtatgctgattcgggtgtgtcatcgtcaatcaatccgagacctgtttgttggcggtgattattgagacagaaacaaacggtcaatataagaacgatatgggtagattggtgaccgagatcaaacttaccagatatagtggctggcacttgacctgtaaagcaaagcgagaaggactaagtaagcaatattgtgaaagttgtgaatagtagaaacgagaaccgaccggatccattaacaccacccagactgcgagacaacaaagaataaacatcaagcttccttatgaaaatgtgttcagaaggtgtgtaaagagaagtatagaggaccgtacttaaaagcgccgcctgtggatggctctaagcttcggacgtaagtgatgatcggatatcccccactagaaaatgcatttgatgagttagttgaccatcccgcgtcagacgaatccattaactcaaaacatggaaaagacagcttacaagagcacaagaagcgctccctatggcaggttcagaagacaaagagcaaacacttgatcaactctgagaatcctttagagtatgtggcagtttttaaataagaagaaatccatacccctaggacaaacagacagccgaggttcatgaatgctctgacagagaacaatcccatacactagtagcgtgagaaagaaaacttagaagcaatgagtattctgctacggcacgattatcattattgaacatactaatgaatcatcatcatctggacttgggttatgaaggtagtcatctgcttccggttcccaatcttctggcccgtaactgatctaaaaaaaggcgtccagagaagaggaataagccagtgttctgaacgtatgaaccggaggacgagttgtatgactaaccttctccattctcaaggcgctgcctgcttcgagtgaactgctgtttcgttgatctaagatgttgtattggaattcggagaatgatgtagaggacgattctctggaaccgtcttcaggaagcaggccttgataggcctgcggagaagatgataagtacggtctggaacgcatctagtcaagttgaatatgacggcaatggcggcggcagtgatagaggaagacgaggagttgatagtgttgctggtgttgctggtgttgctgttgttggtgttggtgttggtgcaagtagtggtagtggtggttgctaaattgctttcaaaatctaagcaagagaagaagaaaaaaatagagaaaagagaacgggaggaaggtgatcggagagtaagcacacaatgtttgtgcagcaggctagatgtgacttgctaaagtaggacagatgaaaaccagtgctcgccctcttctctggcggcacagttaaggaaaggccgctaagtcccggctagaacataccaactatcaaccaacgatgacatcagctgaagcaaggcaatcagttgaatattcaggcgcgcaatcgttcgtatagtattgaaccaaggtgaaatctggtataaaaccgaagcaggctagtatgagtgtgtatgagtgtgagtgttgagaaggtgtagttgtttgccagaagagaaggagtctcaacgaaagaaatgatgatttaaaaaaatagaaaaaagaagaaacgagaccgataagcagtgtcaacgagaggaacttatcccacaacagctcctcgcccacggggtaagcactaacacactcgcagtcaacttgtttagaaattttgccggtcagttagcgaaaataacgagaaaagaaggtcaagatctatctttgtcaagtctctacgggccagatggagggaggaggtcgaataaaaaaaataaaaataaaaaggttgaggcggctagtcgtgccgcaagaggacaaggtccagaaaactcggagcgcagtcgatctttccaagtgtcctcatatccagtcggtcgggagatttacttatatgtccccactatacactctagctctatcaatgttctctcttgctaatatactcacgcccgcaagcatacccgtacgcattcgctacgggctggactctatgcagatacagtggaaatatctttagtcggacttagaatccgggaagtcagaagcacggcgatctatgtcgaaaaattggacggacatttgaccggcgaaatcgaaacgacgcgacgcgacgttcatttaataatgtcacgtcatgcgacatcgcatgcgtcacgcgtctgtcacacgacgcgtcttcttatatagtgtctctcccatttccatctcctttcgccacaaaccaacaatctttctctacttcatccatccgattccatccattcgtcaaactacatccaatatgtctgactccactactgctactaatatcgttcctgaagatacctcttcatctgtccagacgaaacggcccctttcctcttcgaccaaggacacggtctccaccacttctgcgactgcctccgaagagactatcgccccctccgaagattcattaacagaacctccttccaagaagactaaggtcgatgccgaaatgaataatgagaacagcaaaaaagttgatcctgctggccttccggcggatcatttgaatcaccaggtgaggttttttcctatagcatatacgcgtatctctctgacctgtcgtttgcatcaatgtacccatctggcattgacaggaaaactgggctacaggtgagttgcctacgaatatttctcttggtttctcgatataaatttcttcgagctcttattaatgtcagcaaactgtgtataactataaaccaattgaacaggcgaagacccagcaactggaccccaattgggtttcatcgacgctctcacttccaaagctggcttggttccattgtcagccgaagagaaagcagagttgggaaagagcgcggcgagtgtgatgatcgatgatctgaagcatggcaagacaggaaatttgaaggctgcttcttctgatggcgagtgtgacaggcctgctgttgcagagaagaagacagtcgaggagacgaaggaatccagagagacgccctcgaccaaagacgagactccttcgaataaaacggaccaaaagccggaaccagagacaacaaagccagaggcagagtcagaggcaaagccaactaagacggacgaaccagctcacaaactggagaacacgacggctgccgaacccgcgccgagtgatgttgatccagactctcatctcgctcatccagagtcttgggctaccggttcgtctttctctatattttctcttctccttctcgtctgtccttttctttgcgcatcgctaatctacttcacgatttttgcaatcgaaacatcccatgaaacgattgttctctttcttcaataaggcgaagatccagcgacagctaaacagctaggctacatagctgtgctcgccgagcaaaaaggtgtggaactgacggaggaagagaagaccaagatgggaaagagtgaggctagtgagaagattgacgagttgagacaccagtgatgctctttccactcttactttcgttctttctttatctgccgttcaccattcgttttttccttattgattcatctcaagaagagtaaagtcaaccaatccaaatactatcctacatttcccccattcttatttctgtgtttttgtctttctctctcgttttgtttatttccccaaggcttatattgtcggaacaagaaccttacatgtacaagtgtatctgtctcttctgtactgtttctgtacttggtataaaacgatcacactacatcttatactccgtaatatgtatactgtatgggtattatgctcgtgatctttgggttttcgatcttcagtttgaggaatcgatcagcctgtcaggcatcgccctacgaaaccagacaaaccagaatcagggaacagctgggtacaggctggacgctgagatgtatatgggaacctcaacaacagctttaaagagactattcaagaccaaaatgagctgaattgtttgtttgttggttgcttgcttactcgcttacatttctcgtcccaagggagatttttaggtgttgaaccatatatatatatgaaaaacgcttgcaaagcaggaccagaccgagggatgagggaacgcaatctaaaaacacaatacaagcatcgaaaaggaagagagggagggggcgacgtgaagaagtggggaaacatggtatgaggagggaaatgcagaatgagaagaggaaaaggattaaaaaaatctaaaggacacatatgatcgacaaggcgagagataaaagaacactaatgcgaggatgagctcgcttttctaaacgggttcccacttgggaaccacacaaaaagggagtgtagagagaattataccgaatgagaccccaaaaggaaaggaaactagaaaacagagagccgaccaagacggactttgatcatgaagaggagaccggaaagaacagaaagagaaaagagaaagaagcttagaacttaagctctcggggctgctcccaagtgaactcgagtcggccgaagtgtccaccagaggcagtagctcggtagatgggcttctggaggtcgagctccttaacaatgactccgggcttgaggttgaagttgtttcggatgacctcgacaagctcctcgtcagtcttgctggaggttccgtaagagtcaacaaagatggacaacggctcggcgacaccgatagcgtaggagagctggacgagcactcgtcgagcgaggccggcgttgaccaaagacttggcgatccatcgggcagtgtaggcagcagatcgatcgaccttggaccaatcttttccagagaaagctcctcctccgtgggcaccccatcctccgtaggtgtcaacgatgatctttcgaccagtcacaccggcatctccctgaggacctccaatgacgaatcgaccggagggctggatgtggtagacagtcttgtcgtccaacatgttggcagggatgacggacttgacgatcttctcgataagctcggttcggaggtcctcggtggtgatctcctcagcgtgctgggtggagatgacaatggtgtcaactcggacggggatggtagctccaccctccttcttgtactcgacggtgacctgggtcttggagtcaggtcgaagccatccaagggatccgtctcgtcgggcagccgacatagcagagttgagcttgtgagcgagggtgaccgagagaggcatgagctcaggggtctcgtcagtggcgtatccgaacatgattccctggtctctggaagacggagaatcaagagaaaagataagtatttgtacaaagaaacaagttgaaaaagaacaagcgaacgaacccggctccgtggttctcgaggtttccgtggtcgagaccctgggcgatatcaggggactgctgctcgatggcgacgaggacgttgcaagtcttgtagtcgaatcccttgtcagagtgatcgtaaccaatgtgcttgatggcttctcgaacgacggcctggtagtcgatctgagccttggtggtgatctctccgaagaccatgatcatactgttaagaaaaggtatcgaagaaaatcagtaaagcggggaaagaaagaggagatggccgaagaacgaacccagtcttggcggcggtctcaacggcgaccttggaccagggatcctgggcgaggcaggcatcgagctgtgtagagaagagaaaatatcagtaagattcatgataaaggcggaacttggaaagccattgagacaaaggatcgaaaaaaagactaacgatagcatcggaaacctgatcacaaatcttgtcagggtgaccctctccgacggcctcagaggtgaaaaggaagctaaaggacaaggaatcaacgagtaagaatcatggaccacggatgtgtgcggttgacaaagaggctcaaagaatcctttgcggttcagcccacatgcaggcgagaaggctcgaattttctttcggtattcccgtatctcttctccttatcctatgagatcgaacagaagagataaatcgataaaaacacatagaacttactgtccgacgggaagagcggatcgggaaggaccagaagacatttttgacagagaaagtacgaaggagaagagaagaagtgtggaagaagagaaaagaggatgatgtgggtggaagttagaagggaaagaacggaaaagagaagaaaaaaaaaatctcggacgatggcggcaagcaggtgcgatttttttttttgaatttctttcgtcctgatggcgtctttttttattttggttcttatttatactttatttaatattttctttctt

SEQ ID NO: 2507 - DNA, 14669 bp, Xanthophyllomyces dendrorhous; identical to SEQ ID NO: 1026

SEQ ID NO: 2508 - DNA, 2634 bp, Xanthophyllomyces dendrorhous
aaagagagagagagagagagagagagagagcttaccgagcgtagctttatgtccggccagtacatgtacgagatgctctttctgtccctgagctgaaacctcggtcagatcgttcttatgctctatctagtgacaagaacagaggggaacaagtagagagtgagctttgctgaacttcttctagttaatgcataggaggatgatgaaggacaagacctggttcaacatctgttgggcgtgttcgtgagccaaatcagacgccttggactgagattagaaggtgggtggtacaaattcatggtcagtctgacaagccagttaacgaggcgcacttaatgataaaagctctcctcacgttgtgtaaagtggcctgcgatacaatgatgatttgttttgttttatttcatttcatttcagtttgatgttttgaaggaaaggcagggtcaagccaagatgttgaaatcagggtcaatcattccttcagatccctgcatcaagtcgattaaacgagaagaacaaaaagaaagagcgaaccttataccctgccgccacgcgaacaggatccttcacatgattactcttttgaggagatttgggagacaccggagacattgcctgttgtttatggatctgtttggcagagtggatggatcgaaggggaaatgatgggatcaacaaggattgacgaaaacggatcatcttaactagcgcgtttctctctttcgttcgttcttatttttgaaagagaccactttcgagcgatggacgatcagcaggttcttgtctttctcttctgtctatagtcttcgatagatcgacccgaagtggtacgtgtcatgaggtcaagcgcactttctttgatgaacaggaaagagctcaaagcaaggcgtcatctgcggaggattattcataggcatagtagcaaagaggacaggctgcatgagatgccgtgcgcatgagtacgattcacctggtttcgtgggaaggatgaaaatcaagcgttgtcgttggaagggtgaactgttgttagggttaacactgattctctcatcacgtttgatcggctccctttttcttattcacactctttttctctgattcacacactttgaaaaccaaggcggttatctgatctgggcagtcatggttgttcgtcttattctctttctctctggagctcactctgattgatatttctggtggttgaggatgctcatagagagggcatggctttttcgaaccaactgactttggtgaaaactcacggacacatatacggatagaaactcactctactcctcaaggcgactctcgacaacgtgacctcgctcgagcctgcctctgatcagcacgagttctatctcaaggtgagcttcgtttgctgggaaggaaaggtataggaaagacgcgagagtagaagggcggaagagaagaaacggggctgacgtgtttgttgtctagtctttaggtccaatgttcgagctgtcatgaggttcacccaaaccatgtccctgtgaacatgcaggtgagttgaacagagaaggagagagagagagtgtgtgtgtgtgagagagagagagggagagaagtgggttgtctcgctatctttgcactcctgctcacccagtctgcttgggaaataatcaggaagaacacgagttgagctctggtagaggaaccgcgtcgttcgtgtggaaatgttcgttctgcaaggtaggtgtatatatacgttcatcaggaaatctcacccagttagatactcggcgtgggttttgggctctttgatttgattctaattttttgttttctgtttttgacgaaacagagagaggcttcgctctcgttccttcctcctcaaccaccttcccagggtgtgtacgcgccaaagaacaagaagaacatcaagattcctttttcgaacaagcctctgccgatcgtcgagtcggacacctggacggtcttcctgacggtcgagtgcagaggtctggaggccgtcgggtttgattgggagggaacgtggcggtgtggggtaccggatcgggagacgacgtttgaggatgtcgtttttgaagatggcaggtgggacgaatatgacgaagaggtgagtagtcagggtggttttccggtcaatctgttcttctttcccgcattgttgaccctttttttcttttctttttttcttcctatgtttgaactcttcctaaacaaatctaaatccacaaacgtccgctcttctagtcggccgcaccttgttcgatcgaagagctcgagtctcaatgggtcaaagtctagactggactagatgtgtttctctctctttctgtctgtttttctttttgttactttgttttgcttctgcatgctttgcatggctgggtgtatacgttgaatatggtatcggaaggcaaggaactatagaacgcctttgtgtcagagggtggtcgatgagaacatcgccggttatcgggtgaaccgagctagcgagcgagatctctaggtacaaccggccagctagcaaacgagagacacattgcgctggccgctgagaatggagaaggaaaaaacaaccagaaagaaaagagaggacgccaaggagggcggtgtcggacacagcctcttttttttttttttttt

SEQ ID NO: 2509 - DNA, 547 bp, Xanthophyllomyces dendrorhous
tttttttttttttttttgggttctttagtgaagatccttagccacagagctgtgcaaacgcgtcatgagatttatccgatccacttgttcttcgtccttctttcttcgttcgtcttcttcccccccttttctggacgccactgcggatattttttcttttctttttcaagttttgttctggaatgtgactatgtgtatgtgtacgtacacatgagagacacatcaagaagagagggagaagaaaagaagaggtcatgacgatattggtgataccgaaagcagagcgagaacgtgtaaagagtgacagatacgaagagacaagaggaagaaagagcaagtcaagagaagaaaagaatcctacagacaacggaaagcggcattatcagagggaaaagaaaaaagaggaagagcatcatcaacaacaagactgaaagcgcatcatcagttgaatgatccgttcggtttgaggtcgatcgtgaagaagagaaggaaggacagccgaagaaccgcgcgccgaggagatcttcccatcattctcttccccccc

SEQ ID NO: 2510 - DNA, 616 bp, Xanthophyllomyces dendrorhous
aaatccaagtttctcccggagatttctctttttcggtgtgagcgagtgcaaataaagtgtgactaagtccggatgagcgggtgcggcgtgagggagagcggacgctccactaaatccaacgaacagtgacgattgccttttgttctttcgccattcgccttaagctctctctctctctcttttcttacggagtagagcgtccttaccgaacgattgaatcgacgtcttttcgtttcgcactctcgctctcacttccactcctactttctatccgcttgcttgctttgctctctacatacaaacataaactaggtatacactcgactgttttctctcctcatcgccacataaagaaagtacttttgtgagtgtgtcttggtttccttgtagagagtccagttcgggtctgactgacggagcgaacgccacggattgatcaccccatccgtcctatctatcttacagcgcctccagctttccgccacatcccatcgagaggcagacagaaaggtagtacgaaaaccagaccagacgaccaagaaacatcaaagacgtagagaggaaccatacaacacataaataggaaatagatagaaacatacacacacacacacac

SEQ ID NO: 2511 - DNA, 613 bp, Xanthophyllomyces dendrorhous
ccccccccccaaaaaaaaaaggaaagataaacatgtccatcaagactggaacgagctcgacatcgactgattcgaattctacgtcctccgcgctctcgcctctctcggccgatggctcactccccgtgtgggactcgccggcgggtatcgctgttccgacgcctgctgctgcccctccttcttctgccggtggcgtcggcgccgggatgggctctgggacggccgatgagctgaacgggcggtcggttgggttagagaaggatctggaggcgctggatctcaaggctggatcggagagacaatccaatgggaaggaggacgatggatcgtttggtatgtccttcttttcttttctcttctcttcttttgctttcttctctcctttgggtgttcttgtccagcggcttatgcgaatcgggtgtatgcatgtttggggggtctcttcttcttcctctttcaaacccactaaacaacagatgattccgatcctgaacggcaactccggcggtacgcaagagatctcacgaggtatcaccggaatctgtttgacggtgtgaaaaccagggagcagagaaagaagtcatagagaggggcgggacagtcgagagggaag

SEQ ID NO: 2512 - DNA, 817 bp, Xanthophyllomyces dendrorhous
cttttcctctttttctttggttccccttccgtataacgctcggacgatgcttcctcttcttgttttctatttgatatccaacagtcttccacctcgagcgagaacgcttgttggcatgtatttcttttctttcaaagaatccttctttctttctttctacgttcagatcttgtgttctattcttcatgtgtctcccttcttttttttttctttctttcttttccgtttttcttgcttgcttgcgctgtctgcgtttcgttcagagtcttctttttcttctttcttttctttttttgtttggaaacatgtatcgatagaatgccctttgtccttgattatctctgatgtcaatgggggggggggctttctgacgctagacactggcaagaggagggatcgtgaacgaagtggaacggatggagacatgatgattttatatggctacgcgggaaagaagagagagagagagagagagagagagagagagagagacagaggtgcatgtgaatgtataactagaactggaaatttgaactagatcttttcggcctccttcttggcgttgttgagctgcttctcggcctcgagctttgcgtcagagccgaccttttgagcatccttgagggcactctgggcggaggcggaggtgtccttggagaggttgtgtgcggtggcagagccagagtccaaggcttgttcagcctgtgccttgaccttttgggcgtttgtctctgtgtgggtgggtgggtggaaggcaacatgaggttaggaggcagatgacggggggagaaagagagagagagagagagagagagag

SEQ ID NO: 2513 - DNA, 1224 bp, Xanthophyllomyces dendrorhous
gagagagagagagagagagatgaggaaaaaaagaaaaagaaagagatggggaaaggaagcgaaagaaacgagatgggggtgggagagaacgaaccgacagagtcgactacgtcagcgaatgcctttctggcggattgagtggcagcggctgcctgctttgatgcggcgtcagcgagctcggctggaagagaagaggaaaagaagagaaagaaaagaaaagacaaaagtcgagtgagaacagacaagacggagagaaagcgagtagattggaaaaaaaagggagcagagacgaacaggccgattgggcgaccgtcttttggcaaggtctggagagagtgagcgatcggacgctagtgaaggcaggtctggcggattgtctggtgagcagggcgaacatggtgggcgagaaagtaagtaggtaagtgagtgggtgagcaagtacagtgtggagtgaagaaaggaagagatgaagagatgaagagaggaaagaagtagtaaatcggatacacacaagacacacacgcacacacaagagacagaggatcacagaaagatcaggaagaaaagacaaacgtcatcgatggggtgtgtgggtgtgtgggtgtgtgggtgtgtgggtgagtgtggcgagcacagccgagaaggcacgggacgtcagacatggtgtaacagaggggacgtaacagaggggatgtactagagagaatgtactagagagaatgtactagagagaatgtgatagggggatacactagagaacgcactagaaagagagagcaaaagccaaggcgtgatggcgagtggcgagtggagcgttagagagtgtggggtgagaggagagatgacggggttggttacagtttcgttaccgagcctcacaggagcagtacactgttacaccgggctgaagaatccactacgggatacgttctaataccctcacccactcacccacaccaagaaaagaacccaggctgtgctatcgtcctctctgtctctctctctagtgcgctctattgccttttttctattgccttttttctattgcctttgtctattgccttttttctattgcctttgtctatcgcccttttctatcgcccttttctatagcacctgtattacatttttctattgcatctctattacattctttcattccatctctattacaccactctattagatttttctctattccctctcatctccctccctttcccc

SEQ ID NO: 2514 - DNA, 379 bp, Xanthophyllomyces dendrorhous
cacacacactatgtcatcaacaaaccaaacacccaacaccagccatcagtcatcagaatcagaaacatcgtcaacagacccttcctcgcacaaagaggcaagtccatcccatcgagttctgtttcgttctactctactctgttctccctctccctctccaaccaacatgtctcgagtgtccgatctcttgggcttcctttctttcttcctttctattcttgtcaactttttcccccctcccctccccttttctcttcctcttcctcttccttctctctttctcgtcttcttctttttctttcgtttttttcttctctctctctttctttctgtcgcctctccctccaacttacctttctgtctctttttccttcattcc

SEQ ID NO: 2515 - DNA, 4049 bp, Xanthophyllomyces dendrorhous
ccccccaaaaaaaaaaaaacagcccccagaacaaaacacaataaacatgcctggtctgtcttaccaacagcccgatccggcagcagtctccaacggacacacccccggtcaaccctacctctcaccctccccatcgccctcgtcctctcacccacaaccggccacaccgatggaccagcccttcttcaccaacttttcccatgccttccaatcggccacctccccagccgcctccagccccggtctgtctgacccgatctactctcccggcgaacagacctcatcacacccactccccgtccatccaggtcaagtccaacggacagcgtcgaccatcctagaatccgcagacgaagtacccgaattgccctccaccgctcttctcccatccggtcatcagtcagacatcagattgcccctcgacccgacctcacccatatcggccgtcagagagaactctcatagcagcagcagcagcaacaacaacaaccaccactaccaccccaacagcaacaacaataacaataacagtagtagtcaccctcctcactcgggtcccccgccagcatcactcaacggtcgaccggcagactacaaacgaggccgatcccactcggccgcatctacaaagccaacgatgctcgtccagatcggcggccaaaagtctgccaactttatccatcgcatgttccacggaggaagctcaaaggaagacaacaagcacagctcggccaccggcggtacctccgcccgggacaccccctcctcctccgcccacaccggtgccccctccccggccatcagcgccagacgctcgccctccagacggtcgagtaacgccggcaaggacccggacggtcgtcccatcgccctcgacaccaagcgaaacccgtccggcagcatgtttggtttccactccaaggacaccgattccccaccgaccaccccggggagcacgtacgattcctacatcggcagcggcccgacctcgaccgtgggcagcaaagcgccgagcagggcgacgtccgtccgggacgtccgacctcaactcggctcctcaaagtactcgtccaacagacacccagaccccaacgccgtccatccgttcgccctggccgacaagctggccgggatatcgctccgaccggacggcaagggcaaaggtggccagacctactctcctaacgcaccgacgtccccccggctccatagccaggaaggttcgacccccccggccgtcggggccacaacaacagcagcagccgcccctcctctacccacccctggtggaggcacaaagtttacctttaaagacctcgtctcgtccggaccaaagctcagtaggaaagcctcggcgtcttcagccgcctcaaagtctgaacgggccggtggatcggagaagggtggaccggacggagggtccaccaccagtctactcacaaagtacggggtttgtgaaaagaccgccatcggcaagggtgccaccgccgtcgtcaggctcgctcacaaatgggaccgaacgagcgaaaagctctatgccgtcaaagtgagtctcgagacgacaattcccccccccctcctgatgctttatctaattctcttttttccttctctcaggaattccggaagaggagaaagaacgagacggaaaaggactacgtgaaaaagttgacctccgagttctgtatctcttcgaccctacaccacacaaacgttgtcgagacggtcgatctcgtacaggacgaagcccaccattggtgcgaagtcatggagtattgcccgggcggagatctctacgccgcgatcaagaaaggaaacatgcctccagacactgtcgactgctactttaaacagatcctagagggcatcgcctatctccactcgatgggtgtcgcccatcgggacatcaaaccggaaaacctcctgttggacggaagaggtcatgtcaagatcaccgttcgttccctctccttttctttgtgtgtaggtgttttcccggaggaaggatagctgcacaaacttactcgaccctttttctctccttctctttctctccttctcactcactcacccacccacaaacaggactttggagtctcggatgtgttcagaatgtgttgggagaaaaagactcatctcagcaaaggtctctgtggaagtgaaccgtacattgctcccgaacagtttgaacaaaaaggtgctttcttttgatttcgttttctccccctccacccctcagcaattcctgatgttgatcaagtccctgacgcttcactggttctatcttatgtttctcctctctcacccacacactctcctctctccacagaatacgacgctcgactggtcgacgtctgggcggccgggatcgtgtactactgtatgcaactccaagagcttccctggggattcgccagaaagaccgatcggacgttcaccacttacgtccagcaatacgcctcgctcatcgaggcaggttccaattcaaccccgtcgccgctgacgaatctgtcgagggagtgcaggaatctgttgaaacacatgctcgatcccgatcctcgcacgagatggggggtggaagaatgtctcaaggaaaaatggctcgcccaggtgcccagcaagttggactcgtagccacttctctcactcttgtttcatcttgctctcaaagagattcaaataaaaaaaaaagatgagatctctcaattctctttgtatcaaaaagaccccagaagaaggaggaggaggaggaggaggagggagagggataacaaagggggttctatagttccgttcttccccgttttttttcttgttctcccttgtctctctttcttctttttctcgcttctctttctgttttctatccttttacccttctacccttcttgcaacccgcccgtatcttgccttcttttttttctctctctctcctccccttcccgcttttcactctgtcgcatctcaacacgccttattctcttgcgtcgttcccttgtctttcgttcattgttttggctcatcgccttctttgcgatttcttccctgtcctgcttaccccatgttcttacacctgatcccctatgatcgttttctttcttcttcttcttctcctcctcccggttgttcttctcccccttctctttccacctggtctaatttactctatccattgctgtacggtgtctatataacgacaattcacgaaatcatccttacgattctttcatcattcgtttcctaacagacgcatctcgagcaaaagcaaagcaaaggaaagcaaaggaaatgaagacgagggcgcggaaagtggataagatccggaccaagcgtaaacccattacgtcagccttctcgaccgcgttttcgtccgactcgattcgacccgttctttcccatccaagaagcgatcctcgttctcgtcctaaccattcccactagacaatatacacgcacacgcacacacacacacacacacatacgcacgtatacaaagaagagaatagaagagaacagaaacgatcatcgctagagaatgttcaccggattggtaagtctctttctcgcacctggcgagatcctcacttgggatttcccatcatccttctttacttgaaccctcctctctcgatcgaccgctcgcttacccactcacccactcatcgcagatcgaacacagagcccaactctactcacgtacgcctcaggactctacagactcgaacgcgtacgccgccggagggttcaccctgaccttccaccacgccggacccatcctcggggactgtaccgtcggggacagcatcgccgtcaacggggcttgtctgaccgtgttggagtttgatccccaggggggcgagcacggacagcacgcgcagacgtccggcagtacaggccctatcggtggttggttcaagatgggtttggcgccagagacgttgaacaggacgaaccttggtgtgtattcttcccccccctctctccttctctgtgtgtgtgtgtgtgtgtgtgtgtgtgtgtgtgtgtgtgtctctctctctctctctctt

SEQ ID NO: 2516 - DNA, 3677 bp, Xanthophyllomyces dendrorhous
gccacgtagacacaacagcaaccatcacgtccaaagtcccagacggcaactcgatccggtacacgttcaccctgaactcgtccgccgtgctgccttctccattcgagctcgcccgatcgttgatccccaaggggtacatcacgctcgacggcacgtccctcacgctcaccgagtcttccgtcgtccccgccaccgccgcgccctcggacggagcgcaggtgaacgagcaggtctcgttcgggatcatgctgatcgcccattcccaatccaaagtgacgctctcctccaagaacgtcggcgacacggtcaacgtcgaggtcgacagcgttggcaaattcatcggcgtcgccgtcgatagcgtcctcagcggctcgggcggcgcggccggaaagaaactcgaggggctcatagaatccatcgtggagagggtcctggagaagagaggcttgatctgatctgatctgtccatgtaatatcgatcgtctctcgcttcatccaacgtttggcttggtcaaatggaacagagtgtcacgttgtttttgtctttccgaaggaaaccaaaagaaaagaaaactttcttatttttcttatcaagatcatattcatggggaacaaagggagaaaggaaagaaaagaagagaagaaaaaacgaagggataaactcgagtaagaagagggtgtcacagaaagcagacaagagaaagagagcgaatcagagaatgaatgatgatggtatagagaaaagactagtgagtggcttttcccctctcgaatgatcaagtaaaagaagaggcaaaagaagtagagcgaaaaaacgaaaggaatggaagggagagcacagggtccagatgcaaagatgaaagatggaccccattctcagagaagagagaatagtcaagacaggtcgaggcagagagaaataaaaatatatggcgagaatcggctgaaagacggatgtaaagagacaggaacaaatatatgtagctggaaggtgacgcaagaaaaacaaaacgaaaggatgaaaaacagaacccgaggaaaagaagagaaagacgcgaaaagtgaatatttgattgggtagatccgggtgagcacgcgagaccagtgcgatcgaggaccaatgcgatggtgaggaacgaggtgcaaaggaaacagaaggaaacaccggcagagtcccttcgtacagagtgaaagaagaaaataagggaaatatggctgtatattatggaatagaggtcgatgcttgtttggttttgagatgtatataccttttttgttatgctctttagtttttttagagggggatgattgatagcagatgttttctgagaaaagtatttaaaattcgtattgaccaggagaaaactactaggaagaaaacaaagacgatgagaatttaatcatcgaccttgcatgaagaaacgaagcataagaggagaaaaactcaccagaatagaatgttgttgattttttgtttgttttttgttttgttttgttttaagaagataggaaaaaaggaccgagtcgaacgaaagaaggtgtcgttgagaatttgtcatgatgtacgattgacagtgcagagtcaaaggtacccgtcgttaaggtgtgaaaagagatgaaaaggccgatttcaaccccggtaggtggcgtaagcattgtagctgttcacctgaccggggacggactgaaaagattgagttgggatccgtcgttggtggtgatactggtaagagaattgctgggcagaagatggattgtaagccgggagagtctgaaagttgacctatgttgatcggacgcgtgagcctggatcggagcaaatttgaagagatgaacagacagaagactaacctggttatatgcgccaatctgctgttgctgttgctgaaccaaggccttaccaggtcctctagccctctttccgtttccagtttgagaattagcctggggctttgcctgacctgctccgctaccgctaccgccaccaagcttgacacctccgccgagaacaccgactttgccaccgtcataagcggtgaccgagagttttcctccggcagacatgggcgagacagacctggatagctgatgggcattcacaccgagaccgcccacggatgaggcatccgaaaccttccgctcggtcgtgccgtggtgggcatagatcgtggggtgggacgaagacccctcagacagagtggaggtcgaggtgaatgtggagaaggaggtatccgattcagcagacggagaatcgggccgggtagagagtgaaggcagaggagcgagagcgtcggcgacgaaagaaggaggtcggatgggaattgcctgggaaggaggcgtcggaagaagtggacaagaccagatcgttcggatcgtatctggatcgaatggtgacaataatgaggcaaaacgtgggtcagtaagagatgctcaaagagagattcgccaccaaaaatagatgttcgttctggccacaaagagaagaccactaacctttccaaccgccgtggtaaaacacaccatcctcccactcccagccaccttcccggatagagattctaccggggtcgcaccagatctgccactcatccttgccgccggcgagaccgtctcggagagcggtctcccagagaataggatcgagaacggcctcggcggcggcgaacctaagagcagcgggtagtttgcccgagtaggcaatcaaggatcgggcggccgatccccttgtgggttcagctgggtgccagctaggagcatactccatgatgaaggcaacgagcagggcctttcgtagcttcagctggacgtctagtgtgacgaggggctcgaccggctttgtgagtgtgttgatgagcacggccagggcagggagcagtgagtcggaagaaggggtgttagacatggacatgttgagtagagtgttgaatgctcggagaacaggaagatcgatggggtgtggagggcgaggggtaggaaagggtgtggatctgagtgtgtgtgtgaatgtggatgtggataagtgtgtgcgtgccgtgcgatgagagtggagatgagaaacgaaaaaaaaaaggacaggtgaatatagaaaagaaggaagacaggctataaagaagagaaggaaaagtgcaggagaagaagaacaacaagaaaagaaagccaacgacccaaagatgagaagaatgaagagagtcgaaagggaaagataaagagagtcgaagtacgaaagtgaaagtgaaaggagaaggaaaaaaaagaaggcgagaacggaaaagacgaaggagagaaaaaacgagaaggagagcgagcagacagacgtggaggtctgctgcgcgctgcgcagggaacgcgttgaactcaaaaggacgagcgggactgtctgacaaagcgcgcccagcaggtcaagcacacgtctttcgcgacattcactcaacattcacccgggcgatcaaggtgagctcacgtgcgaggggcgctgcgggctggaaggggtgaggattaattcatttgtatgttttcttgtgaaacgagtggctttcacatcctattcctggcgcggcgtctgcgttcgatcgatcgtacgtcctgacgcgtggggacgcgtctggaacgcgctcgttccttcgcatgtcacatatagaaggagagaagtctagatcattctctgtgtgtgtgtgtgt

SEQ ID NO: 2517 - DNA, 39427 bp, Xanthophyllomyces dendrorhous
tgtgtgtgtgtgtgcacagagccaggcaaggtctcccgaggcgtactcttactctcttctgcattctacaggctatctatccgtctgcgcaacagatctctgcactcgatctgccttctcttgcctacatctagctacgtttcgatcttatggtcggtggaaccatcggatggcgtatcgtcttgtggacactgtggatgagtgcacttctcatcggactcaacgtgtatgatcatatatttttcttagaagttgtgatcagggtccaaacgatgtggtcacgacctgaagccgtcgttaaccgaatgacctatccgctctgaagcgtccctctttgcctgtactgtatcctgtctatactttttttggtgcctacttcttctgatctcgctctctcttcttcttcctctgattgcgctcacgccttgggcctccttacgttgctactgcaaaactatatatgctttgacgtcaatgacctctacctaggtccttgatgacagccacgttgataatctgctctagtgcaagatactacggagcacgcttgaaattatcgacttctggtgtttcgacgaccggatgattctcgacaacaaaacttggaccaggagagacaggacagcgcgacgggacagaggtaagcccatagagaaagatcgtttcactgtgatatgtacatgatacaacagctcaaagtggaggaatctgagacgtcgtcgaagagagagtagaaggaaataggcaacgtcaagatcgtcaaactgttcttgtctttttttctcttgacagtcagtcgcgcgaaaccatataagctattagagttgatatgaatgattagaagatatccacatatgcgagatgacacgaaacacttgtccgatcgagactaacgtaagagggaacatgcaatgttgggatagtgacggtaagaaacgattcctcaagttcttaccgataacattgctctttctcaagtctttcaacataagttttctactctacccagctgatctaaaccgtaagacgtgatactaaaaaccaaggacaactgcaaaaggaagaaaaaataattgtagtcaaaaaagacaaaagtaatctagccccatgggggggtcgaacccccaaccttcagatgccccatagcttgtaaaagtctgacgctctaccgattgagctaatggggcggttataatggttggcatcaattagttctaagatcttcatttgacagatatcaatccattgccacgcatcaatcatcggccataggtcatgatatcaagatggtgtccatgatatgttgatgactttgcctgtgaggtatactgagcagatggtacatcagagagtttttgtggcagacgaggcagatatggcagcacatgtttcgtgttgctgtgatcaaggagatgtctgtgttcagaagaccctctgtgaaatagttctccgaggcggaagatagcaagcggcactttgatgtacagagagcgcgcggaaacctcgttgacagggcgcggccgaatacgtttcggaatcttgaccgacgtctcgatatcggtcatcggccgaacgaggtgtcgcatatcgcggttaaggataagatataagaaagattgcgacgagattgaatctgagagtcatttccatctcaagagtttaccatcatacaaccactaatcctccagtgctttcctgaagattctaaagaatactatggctatcgctaaagaagacagaaacctttatgaggcaaacatgcggaaccacaaccctgccttgtacaacaggtgagttccagacgatgtactggatgatcactacgtcattacagctgaagacctgatgacgatctctactctgtttacaaagcaacgcgcactttgtgtatgccgatgcatcggtttggccagtcttgcagctactcgaccttcaaaggggagaacagattcttgatctcggctgtggaactggggaattgaccgccagactcacggacaccgtcggcgaaacagggtctgtttggggaactgatgcgaatgaggaaatggtaaataatcatatcaatatgttacaagcagaaaggaaacacagtctgatccgagacctgactccttatcgcagctttcgaaagcaagaatggcgcattctaaacttcgcgacaaggtcttccttgcagacgctcaatcactggaagttcccgaagggcgaggattggagaactcgtttgacaaagtgtttaccagtacgtacctactttgcttatatatcctctcattatttcccaaggttactttagatagattcttctcggtctcttcggacgaaagacctcttagctgatgttttgagtgcttctcaacagatgctactcttcactggtgcaaacgtgatcctgccggagtcatcgagggagtcaagcttttccttaaacccggaggagcgttcgttggtgaatttggaggttttcagaacgtttgtggttagttgtttactctcttcagacgatatggacagagccgatctaactcgatcattgatcggcactcatgattcatcatagctgtcagatctcacctccatcaagttctgcgcgagcataacatagatccagttccattggacccgtggtactttcctacggctgaagcttactcgtctctcttgaccgcgcatgggtttacggtttcgtcgtgcatacttgctccccgaccaacgactctcccaacagatctgataggatggttgcggacatttgcgagaaactctttcctgtccactttgagcgatgaggaagcggaacgtatcatgcaggagacgtcgaagaggtgcgaaatagattgccgagatgaacaagggagggatagcgtcatgtacgtcagactcaggttcgcagctcatctttagtggaccttgcgcggccacgaggaataagactgtagccgtttgacatatgtgaacgcagagaacaggaaaaggaaacagagatgaagcagtggcttcagatggttagtatggagttttgaaatcagaatacgtcgaaagacaagagtatgttgatggcaaactagaaaacaaacagatcatttttgatccgttagtgtacgcactctcaagctatgtttagtagctaactattcgctatataccagagtcagagcatgacccgaatcgtgtggatctacttaacagctagctagctagctagcttctggattaacaactgcacaagtcgatcaggaagtcgacgattcaagacaagtatcaaacaaggagtacaagagtttccctgtattaggtcgaaagtctagaagtgctatagaaaaaaagaaacaagatacgacatgagaagtaccgagtgggcatatttaggaaaccctccgtttatgatgccggggatgtgtcagtcctaaattctgtgctgaaactaatccgaaagaaagacatttctgaacatagagcgttaagaacaaacaagaccgattcaatgcgcgtcaccaccgatttttttgggttgaatatttctagtcaaatatagacagcactaagctgattacaaacaatcaattagcttcttattcactgtacagaacgaagcctgagttgtgtgaaattgagcagggtcttgaaagagaataagagatcagacacgcgaacgagtaggtctcaaacttaaaccagctcatcggctgcctgagcacgatgaacaaagagacaataccgattcaatgactagactcagctttcgccgagttcatgtctgggctgggggaataatcagagagaggtctgcatgaccttctgctgacagagctggacggacagacagagaaacagggaagaaccctaagagaatatcggtaactcacgatccgggattcatcggcagcaaaaccttggttagtcacccaccacatcgtccgttggggaagccgtgcgcagtgaatatgtttgattggggacccggctagacccgtgcccctgggcgagacgaacttggggaaggggaaagaaagcttgtttattatatcccgtgctggctgatagaagatatcaatgctatatctacgttcgactttcttcccttcttcccgtcgctcaattacttcccgtgtggtcgtcttctttgccgttcagacatccatcctcgtctcctcgtttaaatacaaccagacgacgcactcagatacgttcttagattgttattgaatccgtgtctttacaatctcgcgctcccttttgtcgtccgaccagtccttgtgctcttttctacgatgcgtaagtttgattgagcatccccccgttcactctttcatctataccctcacgatggtttctctagatggatgagttcttgagatcatgtctttcacctgttcacttactgatatgcatccgtttgcggattattattacttctctagcgtctcagacactcccttctttggctttgaactcgtcaggccatctggccctgaccggggatacatccccaacggatctttctctttctagccctccttcgccgaacgtgtatcaacctcgaatcagatcgccgttgacaactccagctgttaccgatggatcttttggcttcccctcggcttcttcgaaaccgagtgttcagatgattgaacgacgaccgtctccaccttcattcccacgctcccgtcctctccgaccggcggtcgttcggttgacaaacattgacgatcccgttaagaaggcaattgtaccgcttaaccagaagtctaggatcggaggcaatggattggggctcagtacgggaactggtccgagaaaggccaaaattcttacagggcgaagcatgaaggtttgtatcatttattcgtcatgtattgttgttcctcccgctcgtctgccagaccagacttactgacagtctagtcccctcatcttatcctcaatctatcttagaactgtttcgagttgaatctttctggacgagagcttgctcgaagcgattaacaaacgcgtcttctggttctaagccagttttggtatgttctcttttaccttgtactcttaggttcgtctgattgcttatctagatttctccactgcgaccccaacagaatacttgtctcttgtgaaacaacctctactctctgtcttccaaaaccactcttgtacaaatatacttcgcatcctgccatatcggttcgtttcgtcactctgtgttatgactgattgtgaatttgtggttgagccaacgcctttttcttctttttggtagtcaaatattacaatcgcatccctcacactcctcattttctttcctaccctgtcccttctttgtcctccgaatattcacggactataacgccctggccatgagatgccgtttctatcgtgcctgccgtcggctatcattcatattcagtctcttttcgcgcaatactctaggcggttttggtttcccttattgacgatagttcctgaggtcctctcgtcattattctgaccagactgaccagctctctcaatagagttgttagctcaatttctttttacatttcgttcttcgaactttaatctttccgcaaaatactctgtcatcatttagacaggttttttgcgttttaaccaaccttcggtttcctccttcccttctcttgcctatctctcttttcttttctctattctagagcgtagccatgtgtgcgcttctcagagatatgttatttgtagactactttttaagaaagcattatatatgttctttttcgaataatttctacatatttttctctctgaaaattgactgcagtgacgacttgcgcggaagagatgacgtcgacgtcgattgtaaccaacggtgtgccagtcacaaaaggaggcgtgccctaaaaggacacgcggacgattgctcgtctccatctaaactctgcctgttctttcgacctctgatacctctatctctctactttccccctctccttcatcttaacatttgctcattgaccctctggccatagctgtatctataaatttaacatggctatcgatcctcatttgtcagtctttcaattcttccacttgatcctatccttgttcttttttggatgcactttcaggggtgatctacttactcatcaccaatgttctttatctttcaatctgtcttcgatcggtgctctttctctatgctctcatacacccactttcactttccggtgaatgcctaaaccttgaatacaggctctgggccataggccatgctcttcttcttgttggttccttcaaagtgggacttagctctcttttcttcaggggaactagtgcttggtggtacaagagtacgttccttcttcatctcttggagaggagcgagtgatggcgagtacagatacaacgtccagatgtgtcggtattgaagatctctcatttaatatcgatcaatttgtcagcttccttttctggagccatggcttcttacgctatcgtctgcctgtaagtatttcgcatccttcgtgtacagcacggctgtgtgggactaatgacgtgtctcctgggcgatgatagcaaatccgtcggatctcccacctcgcagcctcccttggagtatgcccaaaaagcccttctggatgagaacgttcagtacttggtccttgctgtttactggtggatctcaaaacctattccttgtacgtcgctgtgttgctctctttttctcatctcaataaacatgcatgcatgtaacttccatcatcacgctgatgcgctgtgtgaggtttctcccgttttgatattcggatccgcagtgaccctccttccctatgccacattttcactcttccatactttgaccttccttcgatcaaaccttatccctaaattcttccccccctcggctcacaaggcgccagctgcagcagccggaactccggcttccgttcagccaaaggctgcccccgagaggatctctagagctatccagctctgggtgaaggccaattacgatactgccatgaagttcgttgcctatgtcgagctcgttattctcctcagggtcacgctcggtgcattgctgtcagtttccctatctgtcttgcttttcaacatcagatcttggaacaatagaaaggacgcgatgctgatgtatagttgtcgtgtgacaacgccaccgttattacagattccaaaactctttccttgcccctattttctatgcccatttcatccgacttcgatactatcattccgcgttcactcgaagtgccgtcgacaacatcaccgctcggtatgttagcaatcaagtcgttctcacccttcgcctgaatgactactgatgacgcctgttgttccctccgaacagatcggacaaaatcgtcgctaaccaggcccctgcagtccagaagggttacggcatcttcaagaacgtcgtacaaaagtgggctggaagcagtgagttcctgtgtctagtctaatttgttcttctttctttgttcttctttgcctgtcgagcataccaatggattacattctgacatgggttgggttcgactatcgtcgtcactttgttgcagtccttgctcgaaatgatggcgctgctcctgctgctgctggcactgctcctaacactgggcgagctcgttaaaacactgtcgtgtcgttacttttactctcttcaacagctgtctactcaatctcctaagattctgcccctttctttgatcttcatacgtctcgattacagtagtggtgatgtgtttgcttttgacgataactgtatgccttcttacttgccatattgccaactgcaatacaaatgagctctgcagtcaactcttactagcaaaagaacgcttatcacatgacaaactgaaagatgagtttcatgaaaggatgtcggaacaagtgttcgagccaaatcggactatttagggttggcatgcgttcgccgcggatctgtcttccaaagatgtacggagggaggtgatacggattgttcccgctgccaaccgtcaatatacacctagatttgacatcatgtcgttcgtcatcgccgttgactttgatgatggttggtctcgttccttcatcgttcttaacctacgagaactaggatcactcgcgataggtgttctagaagttgttgaagatcgtaactgatcttggcttcgtttgttgatcatcagttctttgtcaggtatgtggtgttctcttgttcggatcaaacaacagtcccggacacagaccaggctgatattatgatttctgatgatctaaacgccggtgactgatagacgaacttgaaagtagctgagcgttcgtccttctccattccatctacttgtctatctgagtgaatgcaccggatctgtttttacatgagggctgagaatttggatcattcgctattcgggatgaacccgctcgatctcgatccaaaaatgaatctacactagtccacaatgctcagtacgaaacggatatgacaatcgatgatttccgatattatcgtgcgttcttaacctcggtcgtcatgaaacagccctgaggtagacatcagtgaggtgctgatcgtcgatcctatacgcttcgaatctgggtttaatctcgatatatacagactactggaggaaccggggtaagggccactcttcgactaacaagaagatacatagtgtgtacaacgactcaaaaaattatttcttgggcaacgcaaacccgaccgatgatcgttaggctggggtaaccctgaagagactctgcgcaaggttcgactgatgtttgctcaaggggtctatagagatcctcttccaatcgccgacgcttttagcgcactggaagcgatcaaagcgattcccggagctgagctggtcatcgtcactgctcgaagtgagaactctagggaagagagccaagcatacctggacaagcattttcctggcagtaagtcttccaattccatcatactcatgtatgctttctgactgcagtgacgaatgcacatttccgatttctggttatcctttatacgtaaagtttttagtaaaatatattttaccggagctttgtccgtcatcttcttgccgatgtctatgcgcttcccctcctcaatgcactgatttttctctccatccgtagcactcacaccgaggctgaaggtgaaactggacccgttgtgaacaacagcaagactaaacactctcttaaaaaatctgaggcaagtacaacgcgttaatttcccactggtttgctaaagatctgatgaaaatagctttcactgattctcaaagaacttcctatctttgcgcgcgtggttcttctgatgacaggtcttgaccctcatcaacgcatccgttttgatcgacgatgctatcgagaatgctctagataccgcctcggaaacgtcgatcccggttcttctctacggagactacccttggaatctcaggtcttcatccacaggaaaagatgaacgggagcatatgagctacaacgaggttcgcgagcgaggactggagcatctggaggatgaggaggacctgatcaaggacctcccggctacagtccgtcgggtatcaaactgggaggccgtggtccagtgggtgaaggagaatttgaaaggacaatgaaggcaaaagacaaaaccctgtctggcttaaattcaacaaagaacttgttatagatttcaaggactatagagtgttaatcaggactgatataaggagcgttcgataccaagatatcggtcaatgagacggaaagaacagtatcttatatgatctgaaacaaaaaagaacaggagatatcaagctcaaagaagaagacttgttgtagtctaacagagagaaataattagcgggataggggtcagtggtatgataagatagaacctagatgtgattgcaataagatgatgtaactattgtgaactactcgtcttcgtcatctccatcgtcatcatcgtcatcatcatcttcctcctgaaggttgctagccgtagatgaatcgttcccttctctgctgatgggatcctctgctccttctagttcgagaccaggctcgattgtttgaaggagggcacgctctagcaagaagcagttttccttatatttctcagattgctcgaacgatttgatctgttgttatgcgctcatttttcgagagaccgaaccaacaaacagagagaaagaaaggagccaaaggggaagatgcaagtagagtaataagggaggaatacgaagagaggtctaatcagagatcgtctgtccgtgtacctgtgtgtatcgcgctgccaaagtgagcagaggacgcacatatttccacccgagatacgtttcgcacttcaaacacctcagatcgaccacagtgtgcagcccggtggtcatgcgcctatcttcagggggtccctccaaaacattgacgactgagtagaatagggtggcctggccaaacttccctgtaaagcgctatagtagtaccgtccgcgatagacagctcaacaggagatcagccaaagtgacttcctttgaatatcacttctttgaccctctcgattcaagcctcaaaaacttccgatgattttctttaggtccgtcacagtgatctatctcgaaatgagcccgatccttcataatacacgtccctgacagcttaccttgcttagcaaagcttccaccgtcgtcagatgagtgccacaacggccacatccgtagatcttccggcccgtaaggtgggcccttgtttgttggcccatccgtaaatgattatgctcgtagtcagcaagatatgagcgggtgaatattgacgcttagatacaggcttaaaaaactaccgctgagagaagaaacaacagttagtcgaagatgagtgtgtagatcaaggtgcagacgatactggatgaagtgagtaatctaaggtttcagtgtcacgccgggatagaccgcagctatacgggaacgatagattgcgtagataaatatcgttctctcaagagcgctctcaatattgcctcttggctatcagccatatgacctcagacaacagttagaatgacatggtatactaagaggcctggtaggtaaatgaggagaggggcagagaagaaatggaagcaagaagtatggaaaaatgtatgaaacaaactagacagaggagtagggctggtgaggagaggagagcgttcacgagtgagaagaaaatgacgaggaaaattgtagaggcagaccaagctggcatccaggaaataaaaggatagatgcctaaaaagtccagatgcatcctacactaggatatccgaagattagtttagatgttgatcctagagctcaaccttgagaaacgacacactataaagggcagaaagaggaagtagagagatgaaagatagaaaagacgagtcatagtacaaatatgaaacgaatcccccctaaagccgagaccagatcgacgattaaagaaaggctagacgaaaggatagacacaaaacagagcaaggacaagagacaacttgtcaagcgagcttcagtcattatttgcccaaaccaaatcgcttcttttgggattgctgttgctggatacgagcaaaaattaaatttcagcgcatgtacacttctaaaacaagaaagtattggagatagaagagtgaacatacgccaacactaggtcgatcaggagtaagaggccgacccgattcctataagcagaaccatttatttatagcgactgtcaatgaatgcagctgtgtattcttttgaatcgtgacagggaatatagagcgggaaataaaacataccactctcctcttcttctcctcgagttccaatcgttgcttctccaaggcgtccttcatctccttgtgccgagcatagagttcctcttcagactgcttgagtttggcctctttctcctggactttctgctgaaagaccatcttcatctcagcttccatcttggacaacttggcttcgtgcaaggttcgctcctcagccatcttagctgcgggactgtgatcataaaatgaaaagtggcgacttagaattgattaataattatgattcaatcacgattaagaggggagaatgcaatctaggtatgagacacagtgatacgaacttaatctccttgaagactgttgggtcttgagccacacccatgcccagcagtttctccgttcggtacctctcatagagtaccaagttagtcctctctcgaagatcctccatatgcgttcggataagcatttgtcgcagtttgacaaagtcgcagtggtcctcattgtcaacctcgacaacaccccaagggtagctcctcccacggatctcttgccctgtaatagctgattggacaagcgaggttgagccaacgactgcaaaaggaattttggactgcatgtattcacggtgccgaggaaacacaacacgaattagttagatcctaaaagtatgtttgagatttagaacgaacagcaatggcttcattttctccaagagtctcttcatcctcattgtcgtaaattggcgcagagaatatctggatctgatgataattgatgtctcgcaaaacctgggtgtatgcatgacaaaacaagaatagcagattagtctagattaaatcgaacacagaaagagcaaacccgtaccctttgcttgaagaccaagatctcttcatcagtcattgtatcactcttggcgattatcgggatcaggttgactttctgatgaagccgccgcatgaattctatatcgataggcttaagcctggtatatgcccaaaaatcgttttggacaagttagagactgaggtataaaaaagctagcacatagaagcttaagaaggacagatgcatacgaatggccagtaggctgaaggaagtacagacaggcgtgtaccctgttatcaaccatcttctgcctgttgacgcgattctcctgctccaaataggcatcgaatcgagcctcaatattgtcgacgataggcttccaactgtcgtgttcggaacaatatcaaattcttgatttagaatatgcgtaacgacataacactaaaagtgttccttacgattcatcattgttgacgtagtcaccgaatccaggcgtatcgacgacagtcaaccgtagcctaactccattctcctcaatatctgcgatagggttcatggagtcataagcatatatcgaggttcgatggtacataattgatagaatcttacctgcactagtgctctcaaccgaaacagttgagggcaactctgaacccggctgggagtagagtctttgtggcttgatagtggttgagaagagagtgttaatcagcgtggatttaccaagcccagactcgcctaaacaacaagagcaaagaagaggaatctgttcaacaaaagcttatgtatgccaagtgcggcgtgtcagaatactagtttaaacataccaacaaccatggcggtgaattgaaatccctttcgcacactgaaagtgttatatgaactcaacgggtcgtcagcgtccatcattcaagcagtatttaagggttcgatgaaagatatcaaatgtttaaattcaagactacaactgcacaagtcgcaagagttccgtgtcccttaattgaagggtacttaaatcttggacatagatcacgaggcaagctgcgaactgatcgagctcttctctccaggtttagatctcagaccttcttattgtcatgtcttcgtccgcccatattagatcactagtcactggcatatatgcagctatacagtttaaggccctaaaaggaccttgacttatccagaataaaacggaggaatcgaggcgaggaagaaaaataggcaccagaacgaacctctttcggtgaacctggtttgggagattagcaaacccgacatatccactgagcttcttcctcgttactgccggcgaaggagccttgaagggttcttctggctgaggagaaacagatgttgcaggagaagagtagccgttgtgtgcctggtcattgacaggagtcgatgagaggctgagggaagtggtttgtgcgcgtgggtacgagggactgagttgactgtgttgagagctctcgtaagagacaggagtagagtctacagagtcttggtgcgaggaggattccatgatgagatctggacagctttgtcaggtcgatagtgtgtttgtagaagagaaagatggtcaaagagaggaacaagacgaggtaagaagaagaaagatcagagtggaagtaaagaacgaagcagagatggaaaaaagggcaaagaccgcgcgtcaaacaaagggagattagtcttgccttgtttactcctagtcgagtctatcctgtcgctgtgacaacttttaatgaccgaatgctcttgtactcatacatatgtccttcacttttttgcacgcatgctaccggatgacagtaaaccgcatcatcatcaaagcagaaatgacatgctccatcttacatcgtgatgccgtttacccagagccaaacttctggcttttgtatcttcttcgataatttctaccacgttaacatccagttcctccgattttgaatcactctgtatataagacccggctgatcttttgatcaaatcaacgtgcccttgacctctggagtcatccaccctgtcttgctgatcagaaaagctacttcaccctgcccttctccagtcacaaacatcaaagtcttgatcttgtgccctggatcgatgtcccagacgtattgcaaggacaaccagataggttgaagtgatgatggccaaatagtatctagagaggttcgaagcgcacgcatgagcgcaagaccgcggctaatgaatagacgggatggtcaggtggagatgaaagatagaaagagtcaagacgataacggcaaatagaaaatgaattgagggttgcgcggggattataggtccaggtgaaagcttaggatgatgcgcctccagttgaaagggtagggaagtcttccaggtcggtatcgtcgtcaccaatttcggtcccatcgccttgagatccatcgcctgcaacctggttatcgatgctgaattcagagccgttcagatcagaataatctccgaaatcgatcccatccagatccgacgcgtctaacactcctatgtcatctaaaagatcttcgtccgaccaagcgatctgcccgttgctctgtccggccgaaaaccagctttcctcaaaagcggtaccataaccatccataagtttgaccccaactttggccaacacgctacctgcgtacatcaccaccgggctttttctgttttcctcgatcttgaaactcaagaggtacaacccgagccattgaagggatcccagtccatcgtcgcctcgacgaacaaggtttgccacatgtttgcatgttgttatcactttgtcccgagagccggcaagcaaagaggtgaaaatcgagggaacggcaagctcaaggataagaactttgagcttcggacaaggaggaagatatggtagtgtaggatcggatgttcgaagaaggagttctgtcaagttgggacactgatacgtcaaaattgaaaggtgtccaatccagttcagtttaccaaagaaattcgagttgctccctagaacaaaacaggaaatagaagaacgaccaaccattctaaacacttcaggagaataatccggacgtgagtcattagggtatagatgaagtgtcttaagtctcggtccaactagagcgccgttttgttcatcatgtctgatcagtctacaaaagacatttattgtaaacacacatgtcagtcaagagttggactatacctttggccagtgtcatgagcaaaagactttcttgacgtctgtagtcaactccgaagaacctgagatcctccacagtatcgggcagatataataaaacactcgaggtataatcatgaaatgtcaagcatgagaatgttagccgacagagctttgagagatcgaaccatttgcggatgtcaggctttggaacgaaagcctcgaatgcaggaatgctcagggcgcgaagtttaggacgaagttctggacggcttggtggtggtgtgtccggaagaaaattgtcgaatgtaatgaactggagattggggagattgtggaggttgtgaagaagtcgggaggctggccaagtgaattttccactgtcggatgcccctatttgagagatttcacatgcagcccaacaggaagggttcaattgatcgttagatgatactctgggaaggagatatgaaatacaccaagagtactgacattgtacactatggatgagggtgccgagctctggatttttctgaagagtattgttgagcttttccatttgaacatgaccatcctcttcaaaatggaagaaggcaatttgtgagtagagcataggaattgatatatctctgtagaagggtaagttcgacaagtttcagtcgcgtctcttcattcatacgtgtcggatgatgattgactcggcttacctccatgttcgacagactaacgccgttttatataggagcagattccttctcgctattgaggctagattgtcattctcgattatatctgcacacatttcagatagagcaaggtgaaggagacgatgattcagcttgttgatagatggactggctacaggaacgaggtggtcacatacaatagtttctttctgctgcgaacgatatgatatttctctgaagttcgatcggaaggtttctcatcacaggcagttttaagagggaaagatggaaagatcgagcgcactttcggaaagagatcaggaggaaaagtaggagagatcttgaaacctgaagagtaagagaggaagtagatgggtagacgcgcaaggaggtcacgtgaagtgattggaaaccattctgaaaccggccacatttgctgtacagacttcgacagatcatcgattgatccgcgacgcttctggttacgtctaagtatgtggcatatataccgacgtaagaaaattcaaagagagagtggtataaccatcgagtgaggtatagcagcaaacgcgcaggaacagcgtccgaaggtggaaaaaaacaatcgttcgacatgtaaggaagcggaagagggacgagagaagatacgtattaaaattcaagaagaatttcagaggacaggggcgaaacaaaaacagggaaagagaaaaaacgagaaaggaaagaaggaacaagaggatggaacgttaaaagtaacgatacttcagagctcgaatagtcttcgagagttcgaagaggttgtagttgtcgtcgatagacccgttcccctagaacaaaattaacatatgttagtgcgctttccatatcaaacttcgaaaggatgttcatgccggacacttacttgcactgaaatgaagaaagaatcgatttcataggtctattaataaaaaaaagcagcagaagacatagctcggacagatagggaattgaatcttacatagtcggttgccttgacaggtagacagctgaggtatcggcaccattcgcaactggcagctgagtccgccttaaagaactatcagccgaccaagtcaaaggtgaatagaatgcacattcagaagcgaggtatcgccgctcgtaagcaatctttgaactcggcaccacgagagaagatgaacatagcagtcacatacgttgcgtgttatcaagacgaaagccaggacaatcaatacagctgaaattacacgaagcacccatacgatgatcaagtgcttgcgagttggactgattgcaggactaaggtcatccgttgtttccacacaatgtgagatatggtcagaacgaaatacgttggaccggacagagtgaagatcaagaaaagaatagacagactacaaaatcatcccccaaaggagacccatcatgaactgagacattcagacgaaaccgaataggttatcgatagcccgttagtagcctgaggacatgacggccagcagttacaaacaatgaatgataaggaacgtactcctccgagatgagaaaaattctatatatcacagtgtgtattgttttttttttgtcagtcagactaaaagcaaatgtgagcacgaagaaacaatgacataggcttacatcgatgagatatggacttgggtgagaaaaaagtctcgataatttcagttcgacaatacgcaaagactagaaagacaaagagtaagagtatatgttcgtacatatatcccattccaactaggttatggccacaaagttattcccaaaccatccaatcgttgaacatgagagatttcccagacagagaacgcattgtgtatgtgcaaacatacccatgatcacaaactcaatgattaagaacgccagctttgtttttggtttgctctcaatctatttactcgtcaaattggcatagaacgagtgttaggatatgtgcgagagcagagcatggccattgccgggtcctagtccaactctgctcacagattatcaaagattgcctcaaaacagatatgtataaggatacgatacttaccttccaatgtaggaaaaggtctacaacagtaacagcgttgacagcaaaaattccacctgatgcaccaacagagggtatagctggcaaactgaatgatcctccaaactcaaacctgtatattatataatagttataatggcatctagaagtcagatatgaagaggaatagatgaatatatgaatgagatccgtcaatgataccaacccaaagatcgctcccgcaaagaagacgattgagaaagccaacgatcctgcaacacaaagaaatccagcttagtccatagagcgtttgaattttacagatacttcccatgattgagaacaaaccaagatctttctcgatctgagctcctgcgctgagcagaactagcaggttcagagaaacatgaatgatacccgcgtgcaggaaaattggcacaaagaacctccacgtttggtttggtacatctgttattctcaatccacagtaatcggcaaccgtacaagcctcggatactggcctaggtgtcaagaatatattgaaggacatgattgaaggttagtgtggcattataacctatctagactatatcctagacctacacggaagtgcgcgtctcgttgaagcacgccactggatatgtgagaggcacgtccgtcaagttctgtgagggtgcaagatcagatagagcatgggttagacgacacacgtatatattcaggctggaaacatatgaatcacttgccttcatacatggcacgaaacgagctcctgtatgaatcaacgtcgccgaagaaggcccaacttgtgtgttagaggcaaacatgtataaagaaccgtatagtcagacaaaaatccagaacgagatatcaaaaagactctcaatcaagcttactcatccagttgaaactgaaaaggcgcaatcaaaaggtattcagtggttgattctgcttccttataagatcgcgacaatttttatagagcagactaacgttggcttgattgcgatcactgaaccagtcaaattcttgttctttacaagggtatacgccatgagcgctatcatcactgaaggagtgttggtcatgatcagaacttgttcagatagtctgtgatatcataatttgaataacaatgtacgaggtgatgtggctcaccaagcgatagaaggtagcagacccaagctcgtcgctgtcgtcctattcctcttcctgttcgaaatgaacaaataaagattaaaatcaacatcaaatgaagacaacaaataagagcatacgttcatgtttgacgttcgagattagacgacaaaggtggtcaatgaggggtagacatacgtcgattctcaattctctgctctaacgagtatcgcgaaaatccaattccaagggactctagaattttatccttggtcgatagcttgtcatatacatcctgagaacgatcttctgtcagaagctgtgggccctcagcatagtctatgcacaccaggatttgtatgaatcagggcaataaattcatagatcgagcaacagacagaagtcaagacagtcaatcaccaacttgatcaagacgcctacagagcggacgacatacccatctcataagacgagcccttcggcccttctcggagcccgtattgccacccgtcggctcctgcatcccgtccaaatggtgctgcaccctttaccaaacccatgccgtcctcagtttgttgtccgtacagacgttcgttcagaggctgtcggtaggacgaagaacgatcacttggtaaccactgatcgttatgatagtatccctcttggccgttttctaaatttgattgatgcatgtattcaaggtttctcggtcgagaagatagatcatttgtggaaggagtatgggcgtatgatctagaattctgaatgtcttgaaagtcagaatctgaagtagaagaggttatatgcgaggcatgctggaagggcggtgggtcaaacgtatctggatgaggcgacgctaaagaaggaggatatggttggaacccataaccagattcctcattatacgatctgggtctatccgactgcatatctactggataggagtgatggctttggtcgaccaaacgaaagacagaaccagggcagacagttgcgttgacgtacgaggaagtctacctaaatatcgtctgcgctttgtttactttgttttctctcgtcactgcaatttcttttagtccttgtgcacacatttaacatcgcatcagtcgtacatcggtagaagcagaaaatagtgtgacaacacagggggagatccaatcacagctaataacaaacatcacggcaaatctcatcaaagaggcagacaacacaaatctcctacccagatccaccattcctctctcaaactcttctatctcagtctggatgcacgttccatacgacaattcaacatatagaaaagagcgagtcacgttacgattaaagcagaagatcgtcgaacccgtcccctccagaggccttgggctgttgctgttgttgctgctgttgctgctgctgaccaccatttcctcccatgtttccccaaagcatctgctttctcttttcctcttccatctgagccatcgacttgacaggtcctccagcaccagatgctgtcttcacaggcacagtcttacccatggatcccaatgaagaggaccaaaggtcatcgaaacctccgaaaccggatccagccgccagcttggaagcagcagaagagggtgcagactgagctgagctaaacgaggattgaaaggtatagttaggcttcatgggctgctgagagaacacaggtgcagcagcaggcggagcagtgtaagacggagtttgcaagaacgtaggtggccggacgggggcggcggcagcggcggccacgacaacagtaggggtgggttgagaaggagtggagtcaaagaaatcgaagagatccgcagccttgggagccggagctggtacagcgttcggagctgggggagcagagaaagaaggagtggacgagggagcggactggaaatcatcaaaatcatcatctagggtaggcgccgatgcaaatgaagcttggttgggaagcgcggctattggataaggaattccgagaagtatatagagtcagctcgagtactcgtaggtagaagaccaaaagcccgaaacgtaccaggagggacatcatcattcccaaagtcaaatagatcgaccgccttaggaggtgggggagcctgcttcgaaactgaaggtggaggggctgcggcggccttcttctgttcttctctgcccttagcagctacgctgatacctccaccatttcgtctggccggaggaggatgagggctcacatcttcttcgtcgtctcctgcatcgtactcctcaaaccctcctccccttgtcacaggatccctgaaaccgtttcctctacttcccccgccagatgagcccccagcagtgcgttgattgctaccagcatactcgtcatatcctcttcctccgcttccactacccgaaagggagtcgctaccaaatccaccgtaccgtgaaccggtgttggtctggaaggaggcgcccgagagaccactgctgctacctccaaaggaggtcccctcgtttccaactccaatatacttcgatcgatttgccttcgctttccgacgttcgacacggatcttctccacatcggcaagaagctcggaaatctctttagatctgtttcgaactggttgtgcgaaaagaacacccaaaaggacaaagacatatcaactaagtttcagaaacacactagtgattttgcacaagcgggtctttaacataccattgataccctgatcttttcccttgtcatctacatagtggaaatttctcagcattttaatcgtagagacgtgagcccgagcatcgtccacaactctttctgagccattcttgaccagatactcgagcaagactaatgcctttgaggtagacggaagataaaagtaggtaaaccaacaggtgctcgaagaaacattatggatgagtcgacttactttgtaaatctcacgccattctcgggcttccttctccatgaacctcttgtagattgtgggcataatctcgttgaagttttggctagaatttgatcgacacaacgagtcataagctggaaagcccaactgcgagatgatatcaaacaacttccgagacgcacaagttgaaggttctgcgttttgaacagcgcgagatatgcattaaaagtcgatgtagaggtcagcaacggtcccatagatatcttgattaataagaacaggacttaccccgcagcgatttcttgcatcaaagatgatgaggcacccctatacattggaaatcaagagtgatgagtacgggttgttcaatcgggcggtcccgagacctgctcgttctatctacaacacagtatagacgagatctaaagactctattccgtagttctctagaggttgcaactaagcattgaagtatgtctcaaggacatttttggaaggcctcgcatcttgatgtacgcgacgtgagggaggaaacaagaagaagagaggaggaagagggacgataaacaatggagagaaatctatcatcgagactgaccatgcatcgctattagtcgcttctagtactttagcctcgtaaggaggtatgttgaggaccatgttcttagcagtcgagtaatacgacttgaggtcgtacatctgagagttacgaacatgagaagaatgccaattgaacactgatcaaccttcgtatttgagcaagagaagtgtaccaacagtgacttggctgagctgctcgcccaaagcctagaggacagttgtcaatgcgagacacgcgattagtcacagatctatgcaacccgacagtaggtgtattccagagatgatccgtgccaacatacagtgatcttgtccatggtgcgtgaatatgtgtgtgatgagtgtcaagagcgattgatgaacggacagttgaacaggatggaagaagcagaaatgagatgaggcgggcagtcatttctgatattttgggaatttccttagttaacatcagggaaaaaaagatcgttggaattctgttcagcattctctttgtgtgaccatcatcagcccatcgtacaaatccctcatcctccttgaaagatggccttcagcaacactcccacatatggagacctcatagactcccttccttacatagatagagaccttgaggatattccaggtgagtctatgttcactatcaacacctctcttgtctcgattcctagacactttttctcgctaaaccaattccaaacaatatgtttactaacctttgaggaaactctgtatctcgacaggacttcgagaaaaggcagagagccttatccaggttgagcttaaggagtcaggtggcttgaccggtaaagtggatcatcctcgaatgcccaaagagttggaccaggatctcttttctgtacgtattgaagattgatctatcgacctccatcgtttgcttgagctgcatcagcttacaacctttgaacaatattttatctttgtacacatggctatatctccaaacgaaaacttgatcgaacagaactcgccagcactgaccgcgctgttgcaagactacccaaccaaacctgtaagtcggtcgcgtgtctttgcctatgacaccttgcttaaggactaaagcggctgatagatgaatcatctttcaaaactctggttggtttgaatggggtttttgctgtgtctaatggagtagctctcggccattgacacatcccgatatcaactccccatgccttcctcagacgaagccactgaggaagaatggaaagctgctagcgacaacgcgcgtgctcagttagagcatcttaacatccggttcgtttcttctatctttcatcccacaagacactgtctttgtcgctaatcattttaaatccggatcgtaaacacatctctccaccatgattagacagatcaacttgtcccttctctctcaacacggctcgaatgctcatttgatccacaatcatcttctagagtcggaagccaaacggctagaagctgcagttgaatcactgaaggctcatgtggtggacataaaccgaaagcggaagaatgctcaagtacgtcgattagatcacccattctaaattagcctgtctctgaccttctttttctctcggttctttggggttgttctcattcacctttgccttccaccaccacggtagacggacgcttctcagccgataaacagattaaattctcaatggaatcaactgatttcgtctacgttacaaaccgaactcgcaaacacagctttggaagcggaggtcgaggagctgaggaagaaagaacgagcattgggcctgagttagataaacttccattagattatgtcctttttctaatcccttttacttctcttttagggaagacgtcctttccttgttgaaagggcttgtaatctggtgagtttcgtgattatctcatcaattttggcttgatgatactcccctcgacgcgttctgactcgtttaatcgtctcattgtcctcgaatgtaaagaagtgtataaatgaactcttcttacggtgattcgcttcaatcatcaaacgtctttcaggcgtgatcccacgaccatagtgtctactgctgcaaagccatcgatacaatcgcgcgaaggaactgacactgtcttcgttactgtacccatcgctagcgagttctgagtagcagctatagggaaggtttcagaggcttctatcatgccgacaatcttgttctcaattaagccaaaaactaagaatttctttcgagacctgttatggagatctgaagctttctcgcacatctgtctccacctgtcggggctcatcccgcagtcaagagtgtagctaatttctcattgaatatctgaaagtaatgatctattcagagaagagctttgtacgggacctaagaagcaccggcaacgacgccaaaacatatacggcttaaaggcaagagaacggaaacggatatagaaaggaaggataagttctggagaacaaagaccctctagtcgtctccggcgagctttcgaactcgcttcaaaacggaatcgcgatccggatcgtacggatgagtttttctatatttgagtcagagggacaagagtacaagaaacggctggtcggtcatctggcagcaacacgttcaacatggtctcaatgtggtctgttgctttaacgtacgagggaatttctagcagagccgggaacgcctgagaatatttatcaacagtgggtcgaatcatctcggcaatctataaagccagttgtttattggatttcgataaaacgaaaatgaagaacgttttcagagaacaagtcgaatcttgatacattagaattcaaccaaagagatgcggacgaacatattggttgatcagaaggatggcgatatcaggcctctgagtaaactcttcgaaggcagcctctatcgttgacggttgggtctctaagaaagcgaaaaacccagagatataaaggaatattgatcagatgcactatatataaagaggacagaaaaacagaaaaaagaagaaaagagaaggaggtgtatagaactacaatcggcacgtacttgcatcgactactaagaagttcttctttcctttctcgatgtgtcctgttcctgctaacaggagtccagtgattgaatcctaagaaacataatcccaaaagacatgcccagatattcagccgcaaaagtgaggaagttcgcattcattcaaacagccagtcttccattcgagatcaagaggtcagtcttctgaggtcagcgttaatctgtccaattgataggcagaccatcttttccctcaaaccactaggtcaatcgaatcatattcaacatcacccctctctttgtctcctgtctcgctcatctccgtcttgatcccagaccttatcctccgcaaaaaaaatctcgaacaaagatgactgaaatcttgattgaaacaggacagaaaggaaatctggacggaactaacctcgtctccgatacaagcgatgagcgttctgtttttagctgaaggatgagacattgtgattgatgcttaaggtggtgtgggcagtcgattgttggtcaatgatggccactacagactcaatgtgatggccaaagacggaccccatatcgggggtatatatccccctttcggttgtgttctcacccgcgttatgggcagatcttacattcgtgctcacaactctatctgcagacgatgatactgtatatagcaaacaacgataacaagtcttccctcattttgaaagatatgcaccgatacccgtcaattgggaaaataattaagagccatggtagaataagacaatttgtatagacgaaaggaggataaatcatttttgatcattccgcaagccagaacagcccgttaataaccacccctgctcttatcaggggaaaggaccactcaaaggatagtttgtcctttgttccggatgattacccaggaactacacccggtcccagccgccaacccattaccccgacaggcgttccgggcgcgggggacccctcaatattacttgcagtcgaaagcattgcctgtctacctgtcagagcggtatcggagctttgtccgggagatggctggtagcctgatgggaaagaacgtgttgatgtttgggtagaagttccgccattgggtgcatactgagattgaagagatctttggctaggcgagtatagtgactgctgctgctgctgctgctgctgctgctgctgctgaggctgagactgttgtggggttgatcgtgaaggtggattagaggatacagatgatgatgacgatgaggcatgtgccaacggaggtcggaacggttgaggcctagcattgcctggttgagctgatgttctttgcgatcctacaggtgtacccatccgcccgacaccggctgaaggaggttgcctgttaatcaatcctgcttgctgggacggggctagagaatggattcggacggttgtgttgtccttaagggtatagggttttgtcgggtcaagtgtacctctgtatgaaggtcgcgggttggaaagagagattaacgattgcagattgtgaagctgagatggggtgataagtttgcgggtcgcaggggatgagtaggacatattcttcgtgtccgtggaaggagcagccaaaaaggagaccagccaagctaaggatgtcgaaagagattgagctgacgaaagatgacgatgaaggcatcatcaagtaaaaaatagataaatctgatcagatgtggtttccaacaatcagagaaagttgctagcgcacggcaccagagagtagaccaacctagtcttgtttcaacctctccaacttcggattcctctcttctcaccctaccaacctgcaactcttgaagcagccgtgctcttctccagttgcgctctaacatcttgtccacatcagcatcttcactcttgagatcatcagttccccaaacatcgtcaagcttggccaaccgatcgatcgtgtttaaggagtgatctacctgaacagctctgtgcatgagttcttggagatctcgtttcgattgttggacggactctgtaaaggacatggtggcttgcgatgaatcatacgaggggcagaatgatgagaatggacttggattgattatcgatactaaacaaagaaggcattgtttggtagggaagtggaagatgatgatgaatttagattcctttatcaggtgaattcgaagatgagagcagaggaaaaccaaccaggatgcagggtcactccattggtttggcgaacatgaactcgtctaattctggggatcgacgcctcccctaatttgggctcttgatcaatcggcatcaaaggagttggatgaatctcaatctgattggcataacctgcagagtcggattatagagagaaggttttgaatcagactgccttgcccaacctcgcacagattaatacgaaagagaagcaacaaaccgattcctgtcaaaccaacatcatcttcgctttcactgtcatcgctgtcgtcgttgatgatcttatttggaagatcgacaaggaccggatctgtgaagaacgtgccgccccattgtgggggctggccccatgagggtaatttctggtacagagagacgagcttccgaggttctagtcaaggtcaatacaaaacacaagggcaaaaataggatcgtttcttgaatcagtgttctgaccagttatagagacaaagaagagaatatcagctgaaacgatcggaggggctcactgttgtcgatgcctgtaccacgctggcctttgtcaaacgcgtttagtaagtaccggacactccgcgcccagttgtgacgagcaactagagctttgtttgaagtagcgttcgaggccgatcgatttggcgacaactcgatgggtgagatgtttttcaaaaactcctgcacagcgcagggggcaggttggtgagtaaggtggacaagaagactcggtgagctcgcagatctagtaaatcctaccaaagacagacttcaagatgacaggtgatatttacaaggataggttctttgggaggcgcgtctgaaacggtaagaaggttgtacaatgtcgtggtagaagtcggatcggaagatgtcgcagaaactggaaagtgcgagtgtaggaggaagagcttttgatccattctgttgaatatttcgggtaaaaaggaggtggtgacgataagcaaataaataaactttgaacttcaaaaaactgttggataggaagagggagagagatgaaggacggacgttcggagaatgatcaatagtttgtctctgctctcagtgtccaagagatctcgcccgtcagtctgatcgcctagccttccggcttctttatcgagtccgtgtctctccaaatccatcacctcttcttcatcctcctcctctaattctccctcggcatctaagtcttcatctagcttttctcttttggctgaaaagtcgggagcgtgcgaaaatccatccagggcggtagctatcgagcgctttcttttgtgagcgttgtgatcgaggacgaagttattgggggatgaaactagaaattgtatgagatcagaacgaatattttatgtaagaaacagacagacaacgagacatgcatctgaatacggagaacagcgagctggaagatgggcggagaaatgggtatattggacatgtttgataccaaatgtcaatggggaccagatctgatgtttttcaatctggcttggcacggagagtgagagagtacagaacttgctgaggagaaagataccgacagagacggaacgagtgagggtgagacgcaagacggagcaagtaaactgacctaattgttctggattacctttaccatttgagaacgaggccgaggagaaagatgaactggtcgcgtcggtgcgcgtcggttgagccatttccttttttttcgccttattgtttctggatgtgccgtcgtcaactcaactctttcgagtccttttgtatagtattgcttatttgatatctgtgttgaagcaagcgtggtccaaaccaacgtgctgtagggtttggttggatagaaagacgggcagatagaaacaagaacgggagagaattcgaatggtgagtccaatggcgagcaagatccaagcgaccatgaatccaggtttcggtttcaggaaaacgcgtaaccagagttacacgagttatgttccattacgtgagcggctctgccgtctaggcggcagagcccagtatagtgagcatttgagatcattgtccggacaacatgtttctatacgagcgatggttgaagagagggatttataaacacaagtcgccggcatatgctgttcttgtcgttatgatttggctctgctttctaggaaagtgttatggccgcttatatatggaaccaacgggtgggagacggacaggaacaagaagtattatcgacccataacaactttctaatgcacttttgactgttactacaaacccttgtttgatggatggcctaagcctgagtatggagaaaatgtatactgcctccaccgcaatctcccctcatttcatcacgatcaagcaaacctaaacaaatactgtttccttccggacaacacacttttaatcagctctcatcagcatctacttgaacatacactcacacgtacctccttgattcgacaaatgaacggtggctcggatgctagaattggatctggtcgttcatcggttagtcatttcttgtttggcatgttttatctatcactgtaatcagtcccattagatcgtgcctgttcatctcgaggattgcctttcgaagaaggatacaatcgattatgtcaggcagaacttttttgttaacatcggtcgtgccattgactcatcgatagattgtccttgtttgttgagcatatgaaccactcacgacggcatccaaactgattcttaccctgcatttcgtttgtcgcatttcactcggttatcatccggtaggaagaaaccgatcccatggcctcctctatgcgcaactcattgtcaaacgatagagctttcctatcctccacatcgcttccatatagacgccatgctcaaactgctgcaaattcaggaactagctcgagtgtcaataacagtagcagtagtaaatttcgccatactgctggcggcaattctcagcatcgagcttcttctctcaccttgactggtcggactttaaaacgaaaacctagtctcaacataggctctgaacgggactgggaggacgacgtgcatgatgtcaatatcttggacggttggtctgattctgatagaccaacctcaaatacaccgcacgcctcgacgccaataataccttcagcttccacctctgatctgtcctccaggttcaaaccaaagagagctaaactttcgactcttcccacagactctccgaagtcagagactgaatctgaaggcgatggactcaacacgaatccttcttcttaccgttctgtctctcctagccgttctgttcaagttcgaccacagaccaaaaagttacctcgacaacagtcttcctcgccttcagaagtccaaagcggtagcatcgctcaggcgatcacttcttctcaagacaaaggcaagggcaaggctcttacagacagttcccccatttttgaggaagatgattggtgctgttcgatctgtcaagacatcttagttggggccagtgtgctcggagcatgcggtcacgagtactgtgggaagtgcatttgggaatacatcaaggcaggcaacgtaggtccaactggccgactacatttttgactttctatgtctgacttcctctttctcatttcttgttcttcttgttaaacggatatatcgtagacacaatgcgcgatctgtagggtgacgatgaccgagcctaaggcggtggtactgtacaagttgaacgagttgatcgagaagtgggccgagaaaaccttgcgtggcgaggagaaaaagaattgggagatccgcaaagagtgtgtcctctgttttatccatcgtctctcaaaactgtctttgttgacgaatcagatgactcatctacgcattgttgtcattatttcgtcaaccgtcttgaagtgaatggcttggtacgtacagtcggtctcgactcgtcgtcagagcatgtctttctgacgaacgtttgctcaactgttctcattccaatcgcttgcagcctataagttttcattcattgatgaggaggcagcgacccttgcttctaggaataatagacgcgctcaacaagcatatccattaaacgacgagagcacttcatatgatgtagggcctcattgtctgaccgaagggatggtttcgatttgttatggtattgattgacttgatgagtatactcttttatcaacagaatctttacagaaattcttacaattttgacaatgggatggtacgtcaccttctctgatacccaacacacatatcgtctgagcccaccagctcatctgcgctcttcacctttgattgatctttctgcctttatttttcagattcgacgttatcaagacgagcgatcaagtgacacaactgtgtctcgcgggaaccctttcagtgttgtaagtctcgctctgttgcacttcaagtatgtatctcggaatatgacgaacaagatgtaactgaacctaatccttgccggctgcttctcaataaatgtagcggtcccatcacgcctttccacctctaggtcctccggtctctcaacgattgtcaaccgatactttgaacgcttcctctgtctcagagctggccctaccggtctttcaaaggataccacgcgtcgatcttagttcttccatttcctcgtcttcctggagcgatcgatcaagtcaaagacgaccaccatccagcgggttcatttcggcaagcgatctccaccagcctaacaccgggacgatgccttctcgatcatattcatccggctcggtctggggcgttaggccttcggcatatacatctacaattcgaccccgtagttccgccgccgtttattcttggatcgggtcgactaattcttcttcctcttctcctgcaacgagacaatcacagtcctccagacttattcaaccaggttctatgagtgcacctgcgagacgttcaagaagccaggctgcaccagaggtggtagatcttaccgctgattgaagaattttgagggaatgtgccggggttgatgagaggttcatgcggacgcggacatcatcaggaattagacacgagatatataatcgatgaccctcttatcacgcttcttaaatatcacttggattctccctcggcctggtatcaatatatagtccaaccgagcgttgcaagatagatcttatataatcgaacaaaagaagtgacaggtagactaagggcaaaattcgagtatccgcctgtatacattgtggcctctgcctaaatctgctccacttcagtccctccacttccatcttcaccgttgctggccaatccgttcaagtggttgaaccttgtccacatccttaacatgtctcgccttgcatcttccgatcaatttcagatcgattcaccggacctgattgagtctgcctctctgagcaaaccgatacagcaaacgaatacactggctcttttactgccccacccgttcctatttcacccgtcgattcttgatttattcagaaaatactatggatcattcggaaagatacatacatgggcacctatcaaggcattcgggagggttcttatcgttttctacgaagaagaggatgccatgagggctaaaagagaaggtgatagactcgaggttgggaggccgggaggggtgcaagatgggactactcaacaagaggtggcatacgatgacggttctccaacgtatctcaacggacaacaacctgggtgagtccgcttggattacgcatcttccttgggtatgaagggcgaagcgaagctttctacgtcttgtttatagacctaatcttaagcttgtgtgcacactctgaacccgtgtttctctttctttccacaaagacttgttcttcgtctgtatcttgctgcacccacttccttaacaccgcctacagataaacatctcgaaccaccgacactcacccgaaatttcctaatttcccctcctggctcgcctcctgaaggatgggaaccgatcgaagaagatgcaccaaatagcatgacattggctgctgatctgataaaagccttggaggccatcgccgtcggatctgacactcgacgacgacggcgaccaggagagatcgagacgattattaattcacaggctgaaggaagtagtgcgcaaggaccgagtgtgactgttcaggactgtaccccgggtatcttagtcaacaacggcaacgcagagcaaggtgcaggagaggaggaaggccccaacgaagaaataccagaagaaattttcgagagtttagaaggaaggaggatcagtttagtcaaagctacgatcgagagtatgggtggaaaaccacaggataatgactggtttggaggcgaaggtgatgcgttcgctcatagtcctagttggagtctgatggtcgacgacaggtcagcaaggatcccgaggatcgtccctacagctatgccccctcgtacatgagtcacggacgaaaaatcttcttcttcttccttaatcattgactctgctaagggagatgagaaagaaaaaggactcatcttctgatctatccattcataacaattgttgtccatcatcgtccgtctgtgttctcctcttctttctttccttttcgtaactggagcgagccaaagtgagtttcttgtccgtggtcgtactaccgttcgattccctctgtgaataccacttccttaaccgtcttgccttgctctactttcgaagaatacaaagcgactatcactcgtctaaacctcgactcggccacctcgaacctcatgtgatttctctccgatcgatccttactatagactaggtctcactatcttcatacaagaaacggagagagcaaagtgaccaaacgaaagtcaatgaaatatatgtaacggcgtttccttctgcattgttactctggttctgcattgaagaagggaagagaatctagaagatctgagataggctccagaggagtaaggaggcagagtggttgagaaaattgtaaaacaaacacagaagaaaacgagaggattataaaggatatatgttcatgcaaaacaaagaggaaaagagaagataaagatagaagagtgtagaggtatgtatagagagatgagaagccagataggtgctcattctagaaggaaggtttaggtcgaggggtaaacttgaggtgaagaccatctttggggaaaagagtggcgatgaccctgcgaaggaagcaagcgtttgacagaaaacgaagacgacacatcagttaaacgtaagcggaagggaagaaccccaagagcaggacaatatatctgaagaagagaacgtactggaacttgcccgtgtcgggagtgatcttgtgatgccagtccatggtgacggacgcggtccccacacaggcggccaagtgcatgtaggcgtactcgaacccgatacacttgtgggcaccggctccccaaaccatatagttctttgggttggcttccgcgcttccacccttctcgagccaccgctctggaacgaacgagtccggctcgggataaatcgtttcgtcgtggcacgatggccaaagcgaagggatgagcatcgttcccttcggcacggtgtagtcaggcaagatagggaagggcttgagagtcaagtaagggacctggagtagtcattcaagaagatatcgtttatttcagcataaagatcaagaactcctcagatgagcacaatcaggcgcggacggaaagaaatctgcgaaggaaagacagaacgcacgaagatgaccggggggatgagtcggagggcttccttgaccatagctcgggtgtagaccatctcgtccatctggttgaacgaaagcggggcatcaacgtcgttgtgtcgaacatagtactgctcctctcggactttggccaaaatttcgggatgatcggccaggagctcgctgtgcatacacgaatatcgtcgacagatgagcaatcgagaataagtcagagagggaagaaagaagacttgaaactcacaaagtgtttaccaaggccgaagtcatggcgtcctgactagcaaacaagaaactgaggacaaccatggcgatctcgtggtcggaaaactctctagagagagctcttcgctcctcggccgaactctctccttttccggctttggcgtcgatcatttccttcatccaggcgtcaatcaaacaagttggctcgttaccctcggccatcgatcgtttcgacttagcagagacatcctcgagaatagtcatcgcaatttttctagccttgatcgcattgtacacctttgttccaggcagggcaagagggaagttgacaagctggagagcacaggtgatgagccagtacttgtccgaaatggcaaactgctcttcctccgacatgtgttcgccacaaaagacccggagggaagtttccatattaaggtctcgcatgaccatcatgtaactgtggatgtggaaaagacagaagagacagttcagatgatgaaaagctttgacgttgaaaagaagaggccaggaacaggcgtacggcttgggctcggtgtcgggatcgttcatccactcgttaaagtatcgacgataaatcttctcctgaatgggcaggtagatgctgtcgagaagtagagacgaaacaaacaatatgagaccgggtactttggaaccaagaaatgtgataagggacctagatctaacctgagagcttttcgggtgaaaagaacgttcaaggctcgcctatactcggcgtgaacctttccatggaggaaaaccctattgagaaacaaatcgatttgttggttagtgacagaaactccggtgaaatcggctgcccaaagttgtatgatagtgatcgaaactgaccagttctctgggagaagaacctgcttagcactggcaacaagacagggctcagcgtaatcgggcgagttgaagatctttcgagcgactctattggagacggccatgacaaggaaactgtggccaaagacaagatagattattgtcgtaaggatcaagccggatagcagagcaaagagaagatatgacgagaactcacagatggaacacactgaatgcgctgagttctccctgggcgaattgagctttgtaaacctccatggtgggatgaagcgagttaaggaactttccaatgatggggatcgtccatgttggtccaggaaggtgctgcttcttgtttcgataattgatctatcatgaacggaaaaaataacagatgttaagcgacccattgaacgtgtcaagtgtataagtcgcagaaggaggagtggatgtctgtatggttgttgaaaaagagagggaaaagaaagaagaacagaagatccaagatgaaaaggaatgagagcaaaagccgagaaacaagcgaggaaaataatgcaattcactccctccgagccgatctccgcgacataggattgctctggactgctccctatagaccacgatcgagtagaaggagaaaggagcatagggatgacagatagacgaaggaatctgaagaacggacctgttcgaaaatcaggatggacgcaacgacggtgaggatggagccgagaagagtcctggtagtaagctctgggaacgcgaacgcctccgtgcctgagaggctgaacggaaaggcggacgcggtggaagaaggcgctggtacgtgttgagaagccatgtttgactgtccttgcctgatgagcgtataaacagagacagatggatgtgagaagccagagaaagaggaaaacggacttgatagtcagatgaaatcgacggctataagagagtgcgttaataggccacaaacctgattccaggtttttctcgtctcttaggtaacgaaaggaaggaagatagaaaagagaaggcagagagaaaaaaaaggcgcgaaggtgtgagaaaggttgattatgtaagcaactatcaataatcgacccactgtggtttggcttgattcattgaacctacgtaagcctgaggacgcgtatttatccgcaatcaatggttccgcgtggtgcttgcggtgctggaccggacgagcttgaacttaatgagaagtagctatgtgtcgactgtaggattgatctcggccgagaacctaccgtatctgctagctggccagctctatcaccaggcgataacgttggactcatcgatagattctttcggctatgctatggctttggttgcaatctctggtgatgaatctgccgacattggcatatgtcttgaataaggagtgagaggtagtatggcctagttgtactattttgccataggcaaacgaaatgtgaacgaccagatgccaagactgatgaagatgattttcttacttgctacgttgttgtcagtttgcgttctgcagaaaagcttctgggcgcagggcttacagcaagacttgagtctgtcgacacattttatcgcagctgatttgctcgagacatacaatatgtacgggtttacatagttcgtctccgtcgttcacttctaccgcgcttagcatttttatcggtacgctggctatctttctgccttgtgatctgatctgagttcggacctgtttccaggtctattttcttggctgatgcaagcattactagtgttggctaaatagccggcgctatatatcttgagtcaggataggcaaacgacaaaggagattgagacccaaagaaggcgcctgagcagatgcctgggtgtgcgcttgaatatttcctcggctcttggagcagtacttcaaaatgttatccttatcaagaaaacccattgcgatatatacataatacaactgcatgttgaaacacaatccaaaacgttgctgaatagggaaaaagttagtattttgctagcatgttaaatttgaagaactacaatttgttttgcagagccggttgcgttcggaattggtgctctgttatcaaaagtagacaagacaaaaaaacaaaaagagatgttatgaaagcagacatcgagcaatggtcagcttagctcagttggtcttctactacgcagataagcacgaaccagtcactcctttgcccatagcagccgttgaggaactgtgaggatagggatagatcgcaggcgtcagttgatgttctggtcgataagaaagcttggatgaaatacaagaactgtaactcacactccaccagttacagtcattaacaagttatcaatgaattcggctccagaccactacaaacatcaataggtatgtataatat

SEQ ID NO: 2518 - DNA, 4809 bp, Xanthophyllomyces dendrorhous
agaacagaacagaacatatcatatcatctcgtcaattcaactatcactgttagaagggaagatgattgatatcaaactcacggtaatgaactgccagacgaatcccagttttccaagtgcccagacataatcttgcatttcggctgtaccaagcccagctgcatcccaattgaaactgggactgaggttgtaggccaaccattgagatgggtagtgtttgtgaactccatcagcaaattctttagcttgggcgtagataggcgacttcgtctccatccaactgatcaaacacacgtcaaacgataaaaaatggtcagatcctcaaaaccattctgtttttaaaagatgaatttccggaatgaggcttacaggaggtctgcgtaaggagcaaaggctactgctctgttgattgcacattgagtgcctccttggtagcctgacaaaagaaaaggcccaaactatttcacgtcaggtgccgttttggagaaaagctcgagaagaggaagaacgctaacgcacggtagtagccttccctagttctaggactgtcccaatcccagaaagggactttcgtgaggccgtagttcttttgtgctagttccagggcggccactcgagacaaatggctagcctcggaaacgaacctgtttttttttttttaccgaaaatagtgagaataagaatcatcgggtgagaacaagaatcatcagtcaattcggattgaatagataacctacttggaaacctttgcggtgtcaacgccttgcgctcgaagagcgtcgcccaaagtctcagaatagagttgcagcttggattctgcggtccatctaaccaaattagcagcccgagaaggatgagtagtttttcttttgatagggagatgctgtcctcaacttacttgtcctcaatctcctgcaaggcagatccactctttccttctctctctgcttgggtcatgacttgaaccaaaggcagcagtctcgggctttaagacgaagaattgaattggtgtcagaatctcacgcgaaatgttgaggaccaaacaacagaagaggaactggactacttactttgtacttccgaggatgaaggcatgatcacgttcatcgatgttggttgtgatcagagtagcagcctcagaatctgttcgggctacaacaaggttggaaacgcccaggatatcatattggagtcgaatggcgaccaatcggttgatgtgctcagaaatagggaccagaacctgtaccagatcacgacatggtatcagcatccaaataatatatgcccatatacttctgtgggctttgatgcttacttttccagcctgtttgagaatcccacaaaaaatggaagtcagatagttgagatattgcttgaaagtcaataattgaaaacgtaccaagtgtccgcacttctttgttcccggagcctgatcctcgatatggattcctgacaaatgaagaaaagaagatttgaggcgaagtaacaacatacatgagcttggtattcgtttggtaaaggagcaacatgcgcacaacttaccagccgctccagcctcgacaaaaagcttggtgagcttcatgacggcggtcaaccctccgtgactaggtattttcaatttgatatagagaacaaggcagggggttagcatcaagccatgggtactagaacgaccgacaaaaaggctaaaaaacgtacccggtatcagcgtcagccacgatcggcctaagatagtccacgtagggtgttttggctcggtcagactcggtcaacgagaggcgagcatgacgttgctttctatttatttatttattgaagttcggagaagacagagccagaaccgagataccatactgagccaagatagttctttcggatgaattggaagctttgtacgaacctgtcatgaaacagttgggcctggaagagatgagtaactttattgggcacggtgttgtaaggatagtcggcaagatccggtccaggctcattggtcgaactggcggtactcgaagactgccatccagagacatagaccgtctctaaatatttggccatctgcgtcacctggacagggtccaatctgtttgagatgaatcaaggttctcaatgtcggggaactagatctatggggaatggacgcggttaagctcagacgtacgctccgtaagtatggctaactccgccattcttgaacttttcgtccagcaaagagtactgatatgccaagatcaaatataagcatcagcgcacactcttttgttgatgttgggcgagagacaaggtagagcgtacaagcttcttgcccatctcattgctaggatattggatgtcgagcgtgcctctcatacgagcaacatcagcagaagtataaggcctcgtggtctttgcgaacctcgggtcctgcatcaccaaagattgaagtcatcagctctggccccttgggcagaaggaacgcatatcagactgtcgtaccttccaccatttctcgatctgagaaatctgctcattgagatgaagctgctcgttcgacgtaaagggatgcaatagggaagatgatgagggagacatgatgaaaaacagacgactgtgactctctggatgaaatcagttggttcaaataggttttctgtgagatgaagagagaaacaaaatcgattgaggatacgtgcaaagggagcatatatatggcctctccaagatgtacaccactggttcctaacgagtcaaaaggacaggagactgggttgacaccactcgttcagattgacaccactcggtcaacctggaattgaacctgagatgagaatgatcgggtgtctagctgtaagtttcgccggttagctcgctgactcgctcgaacgccttcgggtatttcaggaagccagtgagtgagagaacaatcgttctggccggaagaacgagacgaaacatgtgagcagatgagctctgccagcccagctgcaaggggtggatacacatttcgtttgcttcggcctgcattggcttctgttcttctactgctcgaaacgattctttccgatgctgacggccgaacacgttcggacccagtccgaaatccatcgaccaatgtttcatgctggattcggaagtaacttttggaaaagcctacctactcaaagattttttattccttttttttattaagacatgtatggctcggttaaacgatacctgaacaccaatcatcgtccgatgaaattgcataacacactcgatgaaacttggtgccgcctggccagaaaaccttgagaaaatacagaattgatagtttcataagagaacattgtgatagaagccgaaccaagtgaaattaaacatttaacaaccctaaccaagtttcatggttcgtcaggtgttattcatgacaggagtctggcagactctggatttggacagtgttgtcatcaggtgtgtttgttcctagctctgtaccagcgtgaaaaagaaagcatgaatcatgacttgagaagcaatacatctcgaaagtcgcctactgatagagaaagacatattacaaccagcaaaccgagcagacagacggtcaaagtagtctgtcgagagaataagatatagcctagagggtacaacaccaatcgcgggaagatcaggtaatcatcgaacacaagtgaactacgttcagctcgttccctagagtgaagcaggtctagccattccgggatccaacctagccatcagatcactacatgaatcggtgttccgacagaagtaccaagaagatttatcagtatcctcttcaagactattgatgcgacaccagctacaaagtggcacgtacgaagtcaagaaatcgctcgggtattttgcattgatctcgccctcgaggtaaactcgcgcaatctccacgttctccaccgagatgccgggagagcttgagacaagcttctgagactccgacgtgagcacttttgagagaagagcaggcgtgatggcatctcccgtgtcgagcttggccccatggtgggcccattgccaaagctgggttcgagcaatctcggcagttgcagcatcctcctaaggtatggtagaaggcgttcatgacaagaagaagacaaaaccgatgagaactttgcgctaaagcccatagacaggtattcgacaagagagacgtaccattagatagttgataggaacacatccgtttccagagatccaattggcacagtatgatagagctctgttgacaaaatatacaagtactcattaacaaagctagcccgatggcgatgacaatccagaaaaaggctaacgcacgccgagacattgcctgtaattccgccgatagtgatttttcccggaacgttacttgaaacaagatcctcaggcttgacgacgacttcctctcgtcgaacgtgatactaatgatcatcaaatgccaatctcagttttagtcaggcttcctctctgatgcagatgtcagtttaaacttacttggttaggtccaggcatatgctcattgaaaatatcgagagcaatcttgacaagcgcagggtgagcgacccaactgttctcattcagatcccatcaaaagagagatcgttagataccaaaggcaattaaaaatcatgaaagataagttctcgataactcacgttccatcgtgtccagcagtaacctctcggagtttatcagctttgactttgtccatggccttttggtttgctgccgggtcgtctttgatggggatttgtgcagacactaccaaagcaaacagagtagaattctggtgaacaactgatttctcagcccgtatacacaagcagataa

SEQ ID NO: 2519 - DNA, 3487 bp, Xanthophyllomyces dendrorhous
ccgtatacacaagcagataaggcactcacttcctcccatggcagctacctttctcttatgacaagtcttgattaacaaccgaacgtaagcatccatgaacgggacggtcatggttacctcagatcgatcaggaagcacgtgcttcttgtgcgctcgagtctttttgatgtacgagaagatctgtgaaacaccaagagaaaccaagacatcagcttcgtccaaatcacttcatcagtcatggaactcacgtagtcccatcttccacagttcaaaccggacgagtgatctcggagctcatagatgatctcctccatttggaaagcagcaggaagagtctcaatgagctgtgattggtgatgtgatacggattgtcgggaattagttcgccgatctcttttatgaacaaggacatatcctgatgactcgagtacttacgacagtagctcgaatagttcctggagtgagcttgatatagttctcagaaaaattgaaaacatcattccaaagtctttttatcccatcaccaagcccaaatgaaagtcagtattgagggatttctatgtatgaggcgggtgaatagaatccgcgagtatgtaccttgcctccaagtaatgttccatcttgggaaggtagaagtaagggccaaggcctcgctcgactaaaactttggcgttgtgtaggaagtacaatgcgaagtcaaacaacgagccagaaatgggaacaccatccactagaatacgaggctcgtaaagatgccatcctcgaggtctgtgagcgtcaagcgataacaattattgagtacagaacgtcaaccgcatgggcacaagaacaagatagacagacctgacaaggagtactgcaggcttatcggaaagcttgtaagactttccatttgaatcgaaagtcatcgacccactaccagtaatacaacaacgagaagctaagtgtctatccgtcttaaggaggaacaaggaaacgagatatacttacgtgcaggcgtcccgcatgttgatctgaccgtttagcatattctcccatgtaggagagctagaatcctcaaaatcggccatgaatgtcttggctccactgtttaaagctatgaatcaaaggtagtatataccgaatactcaatacaagtacgtcgacgggcttatctggacagtgaaattgacgcaccattgatgaccatctttcggtccgtgggacccgtgatctcaaccctatatattcaaaattcaactcagtcggtataagaaccacaacactctccatccgtccaagtatggctttataagcgtagacgattaccatgacttaccttcgatcttccagcccagggccgatgggtgctcctcgccagttaggatcgtcccttacatgttgagtctctggggggaaggtcagctgtgctcctttgtcaagttcagcttggagggtcagtcggttcaacaaaagctatatcgttggattccaagagagcgatgatcaacgatcggcacgtctgagatgacagtaggtcgggccaagagaggaggcaacgaacctctttgcgagtcccatcgaaagttcggtgaagggtagcgatgaactgaagggcttcaggagtaagaatctcggcttgagcagatgatactttgcctgagaatccatagggttaaaccaacagaccagaaagctgtcagatgtgattgaacaattgagattgacgaaatctagatcacaataggcagatacacactaagaacttgaacgcctttgatgtttgaagacattgtgtatcgagatggtatgcttgtgaatgaactggaagatggatggttgtgagcgaatatgtatagcaaacaagagacgggaacggaagtaagaggaaagaaaaaacgagaggacagacggttgagaggacgataaaaagatggtgtccgtctttatcggcatgtctttttgacaatacccggattagatatcgagcgagaaaagagtcacccgatgatctcgcatctcgctcgagcggcttttaccgacggggcttgatcttttctcaaatcctatcctctctttcttcgtttccttccttgattcccctatttcagttgtagagctatctgttcagttcatgtgatatcattcattccatcatagtttactgtaggtttacaaataaccccccatcaaccagcaaagaggatccagtacagtatctagacagatcactcgcaaagaacactgctgctccagcctatcaaatagatagataacattcaaagttgatgcaacgtcagagaaatgattattaaaagggcaaaaggagaagagcgctttggccgcttacaatgtcatcggctgttatcggaaccatcagagtttcaagatcagaaggaaagtatcgagatggggtttgaacgagtggtgtcaaagcgagtggtgtcaaagcgagtggtgtcaaagcgattggtgtcaaagcgagtggtgtcaaagcgagtggtgtcaaagcgagtggtgtcaaagcgagtggtgtcaaaaccaacgagtggtgtcaaacattaatcagtcgcggtccgccccaaccaatgtattgtcgacgcttttcccttccttcctacttcacttgcgactgatttgaaatagtcatggtggaagtcacttacgaacacctagtcgacctgcacatgtccgatcggccattgccttatactttatgggatcagccaggtcttccgtattgatggccgttgcaatcgtacctagatatccatcattcacgaaaaacgagagaaccgcaatttatcattcaagtctcttcaagcctgtggagaagagaggtcgctcaagtagataagacatcacgtcgagaaaacatacctgggagaattgagttgcatcgaatagagtgcggcccaagagctatagcacaactctccatcaaacctgtgcccaccaagtttgcatctcatatggttccattaccgaggcaactagatatcgagtatataagaaagagaaaaaagagaaaaagtgtgcgcactcttgatcccagccttggtcggcgtctaaattgcaaagcaaaggtaaggcatgtagaatataatgcccaagtgagcaatctcgtaataacagttcagtcagtcaaaaacaaactatccaaaatagaagacgaacgtagtgagtctgaatacctcctcccaccaaagcctacacatacgttcgaagcatagccggtaggccgattctatcaatactatcccttcaaacacaaaggcatagggttgtccctttcgaattcaagagaaaagtcttacgctgatagacgagatggcgacgatggatccacccggtggagattgagttgccatctggttggcaacagcctgggtcacataaaatgtgccgtctgttttcgcgcacaatcatatacagatccttgacggttcattttctaattgatcacgaatgagataaaataagaaaagaaaagagatgcgcataggac

SEQ ID NO: 2520 - DNA, 3725 bp, Xanthophyllomyces dendrorhous
taggacagcgctttggacaaacccatatttacaccctgtgtgaccttatatacttctattggccttaggattttgcgtattgacacccccaaagatcagaacatgtcagttgctccagttcgttcgtcgttcaagaagggatgctgacttgcgcagaggagggagacgcacatatcgagaaacgtatggaatggacagattccagcgttggagatcaagacgtctatccgggatgagatcgatagagcggcctcaacgatcgccttggccgtttcgggtagagcgatatcctgagaaggcatttcaccacatccggtgccgaacaatgtatttcagttcgtcagaattatcttttttagggacagctacgtaacaagtgttcttcaagcatggatcatcggagtgtgaatcaattgtagatgagacgaacgcctgaaactacagcacactttctgcccatcccttggatctctgttctcatttgttcaacttcctgagtcgaaagctcgtctcctctgtagtggagtgttacgtccgctccgtttgccgcacactgaagagcgcaagctcgaccaatacctctggaagaaccggtcacgatgacatgtttatttgacagaagggttgtcgtcggaagagtcggaatcgatgagggagtcatgttgttttctatgtcggcggcttctgatattgaagaggtagatgaagatgaacgaaaggaaaggatggactgaggaaaaaggagcggtcgtcgcgtgtttgctgatgtaaaggtgaacgaaacagaccggaggaacaaaggaccgaacgacgaagtttgacgcgggacatctcttccggtccacttttcttttacgtttttgatttatgttactttctagatttatccaggtgacatcaaccaagagatctcaaccatagccttgtgccaagttttaaaatgccaagaatattgagagaaccgttcaatgtttaagacggtattatttggcaacgggctcaattgtcacttgaaaaacggagaagagagagaaagaggagcactcgaaatcatccacatccaggacagacgtgaagaacttcatgaacactgagcgttaaacaaaatccacccagaagagagtttatgaagatcgatgcgaaaaggatcaaagaagtcgatcagaccgggtttaatagagaggaccgatagagagcaatgaagaaaagagtagatggacacatacaaagcgtcgcattctgcgcaaaactctccggagcacttttcacatttgtatctccctgtcggactcaaagcagcttcctccttcccacctacagcagttcgctttgcctctagattgacaggcgggaacggaagggagcacccagagcatgttggagcgagggataacaagtcttccgggatcagtctttatcgatttggttgatcagacagacgacaaaacattagtacagcctatccaaacttcagatgatggtggacaagtcctatttaacaaagaattgcttacaccggcttccaagcgctcacggggaagagatgatggtagcttctcgccagatgcgggctgctgactacaaggagaccgcatacctcacagtccgtcggaacttcacagagcttcgctccacacctcgggcagaggaagccctccggtttaaacacttgggcggacgaatgacaggcgcacaagcttgccgggcccgaatctggtagctttgtggggaaacccatcatcattagatcactacctcctcctccggaagtgccagctttgcccttggaatcagtagtagcagatgaagtgagagcgggtggtgggatctcctcccacatgaggtctttgagatgaccctcgttcaaggcgacaccgtacgagccacctgtctttgtggagagttctctggaaagctttgtctctgccgcgaggcaaacgaccgagactcgaatcttcgaagattggagcgaagttatcgtttgtgataccgagcctggatcgcatgatgtgagtgaagaaagaaggagaaggacttcacgcgatgagtgtgcaggaagatggctgaccgtcgccaatcaaggaggtttattggtcagaataagtttatcgatgtatcagaatatgaatgatgaccagacagagacatgaaggggaagatacgcacttcatactaccccgtgccatctccaagccattctgcaaagaaggctcgccagcgggttctaatttctttttgtcctgtagaattctcagtatctcttgagagttccctgattgcgatcaatcgttcgatagatgatagttcagattacccttgtaatataacaaatagagtgatgcaagggaaagaactcacctcccatctcggtgagcctctcggctataccagagcgaagggcaatgattcctatctagtgaccaacgagcgaggtagctgatccgtcagaatttatccaaaagtttgcagactcgagccgacgtgaaatcatacctgtcctagagggttttgatcgaaccattcgctcacgaattctttgacgtattccagcgtgaggtcgaacctgtatcaagacaaggtgaggatcagagggagggagagaacgcgcacagcagataaggtagaagtacccctaggtcaatctgctgatcctgatggacgccattgagcagagaaatggcctcacctcgacggccgaaggtccttttcagacattgtatctgagagatcgagaagaatgatcagatgtcgaatgatagttcgtcgaacaggccgactatcttgtaatctatgagtccacgaggtgttacagatggtcaaaccctatagattttcggtttttttgatccgtggttaacgagaaggattgctgaccttcttctgcgacctcgggccatgagagtctcgactgctccttcgagactaccagactcgtcctcctggacgacatcccacgacctctcgaacgaggcctcccacgagtatccgttctgcgcaaatgggaggtaagatagctgtcagtcaaaggggttctacggttggaacggattcctgatctagagagatggacggcaacgactcaagtcaggctcacatctttgccttttgatttatcttccttatcctttcctttgccttttgccttcgatgggccggtattgagctttgtatttgtagtcgtcatgtcaaggtccagcatatcctggtcatcttcatcaaaatctgtgtcttccgacgagaaatcgtccgagtcggagaactcttgtaatcgtttacgaggcggcatattggtcagggaccgtcggtccgataggtcttaagaataggatggattgcagagggaaggtttattgatcgtggtaatctctttctgtggtttgtggctgatgacatgtagggttacgcttgcgaggaatctgttgtcaggtgtcagggatgtgatctgcgtgttacaccgggtaaccttctcctatttctatcattccttctgctttgctatccctatgctctcccattacagcgcaggcatttctagcattttctatgacctgttctcttatgcataatcattggagtctgaggatgatatataatacgtggttcctttgccaccaatagtacaggttctcaagcctgaatcctctgtcctccttggtcccttgtattcttgtatcctgtgatatcaatcttgttcttccaaatctcttcgcctcgcccctccgtca

SEQ ID NO: 2521 - DNA, 4253 bp, Xanthophyllomyces dendrorhous
cgttaccctctgaacccggaacctgacatcagggatgtaacccgagtgtcacatgcctgttatctacaactggttggactgcttcgccttctcaactccttcttcatttgctcatgctcatgctcttccaaggcttttacctgcaagtatatagcgttccagcgcaggtgttttctagcacactctacgacctgtgattttttaaacgcattatcgttgaactctgaagatcatatataagacaggcttcctttgccacgcatggcatagtctctcaagcctgaaccttttaatattcgcttcctgttatccttgtccattgtgccatatcaatctcgttctccgtccgaagtggtcttccggatcgtctcctttgtttgaaaactattccggcaagagtttgaacctctccttctcgcccgactatatcccactcgcggttactctcgttgcaaccgtctcgttaccattcaggtttggattctcacatttatggcaagcaagtttcacgtgaaacgagaaggctgttgacaacagtaacagtttccagcattcggtaatcgcggcacgaggcaaccggcgacggctatgctggtaagaagaacccggaaaattccgattggcggccgtcgattgctgccggatcgaggggcaccagtggccgtggagcagtgagtgacatctatgcgtggagcacggaaggagttaaaagaaaagaaaacaaatagagcctcgagaagttggctttgaatgggaaagcgtgatgatgtgcagcatcgcggcagtcagtcgcggtggatcgcagttgcacgtggtggcggctgtagcctagtcttttagacgtggcctctgataaagtgcctcgcaattcagtgtgcctggaaggcacgagcgtatcatgtttttctttatcttccttttttggaataaataaaactgaatcttagtttggtcttagatcattgaaaccccatcgcacatccctccgttgttctcctctgtgcctaaggcctgtgtccgtcctgaaaggcaaaggaagcgctgacatttctcttctcttctcttccttttcttctgatcctcacccggaagagggattgaagaagagaaatagaaggaaacatagaaaatgcttactctctgttgttaaacaattagagatctcacaagagaatttctcgagacagaaaacaaaaaaccaaacttcccaaatccggacatctctcagaggtagttgaacagatctccgtctgcctgtttcctattcctgctccttccttctgtcccctcgccggtttagggttcatgtctgaacattcccttatccggtcaacacaccaggttacctttcttcttgactgacgtctaaacatcttctctaacaagaaggagtctagcaataaacttcattcagtttgacttttctttcttttctttctcttcgcattcttatcctccttccgtctgaagagccgatcgaccgctcgtttatcgacaccatcggctagttcttgagaaacacactcagatcatagagacagtcagagacaagaaagaaccgacaactctatctggaacacacattttcgtttcatctgtcgatctcgcactctcctccgtcccttccctcttcatcgagtctcctgaacatcctcacattcatccctcgatccttgtgtcgctttggttcccgactccgaccctgactttctttctcagacatccatccgtctcgctctctctgtcactcatccgacatcctcccgcgttcccttctttcattcctttgaaaccagtattgtctcaacgacttcaacctgcctctctaattcaaaccattatacctgtatcctgtccgggcttgacgtgtcgtcccttgataagtctggtgagtccgcacagcgtgtctcttcggtcgatgaggtttctttgcatgcaaaatcaaggtcggtcgaccattcaagaggactgtggtctggtcagacgtcttgatttcttaggacaacttccatcggtgctctctgaatgcaaactcgtcactctcgttctcactgttatccgctgttcctgaatcctcatctgtccatccatcaatcttaacgttcctctgcttggaacttcttgatatttcctcactaataatgtcggtcgctaaccttccgtgctctggtctgacttctttcgtcgtgtcagtcctatcatcgtccagatgtacccccatcatcacgctcattactttcctctgcctcctaatcaggccgaccagacggcatcttcttcgttgtcatccaaaatggaccagtcgtttacaagagatcccttccatgcctctactcggatgacatctcagtcactttacccaaccaatctcgctccggttcaacagtacccgtccgcgtcagctcaacaacactcttcagctccgactcaactagagccgtctcatatgttgtatcccaaaccggctgccccatccagacctactgcggctcaagcatatcagcaccactctcgctatttacgcgtgcacatgtacactccaaacttccttcccgccggcctcgtcggtagagatccggtcaacaatcgcccacaagagcttcacgtcgaatgcaccctctttccggcccctggccggggttttgtaccctccacttcgttcccttcttctcagccgacgagtccgatgagcgcgttcccagtgacaaccgtggcaacgatgatcaggttatgtttcgcaaacatgcctttggccacccaggttgttcggtccaccagaccttcgtcaatcgctagtgctgccggtccgtcccctccaggctctcaggaattaagactgtcatgtgccattcccaactggaacgatgtggttgagtcgagcccaaaattaaggctaggtggaatgcaaggtaaagtaagcctgtttgtggaagtcatgggtgatcaccaaggcgggcccggcccggaaagagttttggagagaatttggtttggcgaatttgaatacatgcatgatgagcagcaaccacacaacagaggcttctcgtggacaaacagtcagttcctcatcccgatcgttctcttgatgggaacaattaaagcccagtctagttcttaccatgtatgcatacacctcttcttctactctttattcttttaggctttgacgccccttcaaagggactcgaaccgtcccttgatgttcggttcgtcaaacggccgggatctccactctcttctccgcggcagcagcctccaggaacccagccctttccgtctacctcatcagttgatcctaatagtcttgaccggtgtccacctacgcagtatcaatccccttctggcactatcaaccctcacgctcaacgttccgcctacgctcctcacggcggatcatatcctcctccccaacaatttcccaatcagccggtcgcgtattcatcctctggaccgtatgcaacacagactcaatatcctcaccaaccttctcagtcgggtcacttaggttaccagccctcgccatcccaaggacagccagaaaggcatgtcgttcgggctcaggtgtctgatagcttcggctttgtagagagtggagatgaagggaagggtgagagagggctcaacgtagaactgggaatgtcgagcaggccttgtgcgtctcaagtgttctgttctctctctctcttctcctccctgagtatgctggacactgaatcatgtctcctcttgctactatttttggctccaaagactaccagccgaatcctcctccttctatgacatccacccaacacacttctcctgcggagcttggcataaactcacaggctcctattatttcttctcagacacatccatctccttatccttcagcagggcccggctctgcggggtctaatcaaagttctcacatccggcatcttagtgcttctaatcaatcggtatcctcacctggttctgccttcggttcgatgcagattggaggagacagaaacaatcctaacgctccacgggctcataccggtcgagccgattggggagctccatcctctgctcctggacaaagcactggatccaatccgtcacctcacgggatgactccagaccactatagtcaagcatatgcaccttcgcctgcatatgccagtcaaaacacgcctccatctctagtcaccccgtcgtccttgagatcgtcagctcaagacccaaaagcgatcgccccgataaaacctcctgtacagaagggggagaac

SEQ ID NO: 2522 - DNA, 2180 bp, Xanthophyllomyces dendrorhous
tacgctgacgccttcgaaaggggcgttcggaggcccgaaaggcatccagtcaaccatgaaggctacgttggaactacagagtgatcttggactgatggctatcggatggttcgtcccctcgggtctcttctttggccgtcatgctcgttctaaattgcaggtttttttatattttaaaatactacaggaatcatgcagagtggatcacccgtcggcgtctcgttcagttctggagaaggcaagaaagccgtgtcattcagtctaccttcagaccgatcagccaggcagactatgtcgacaattctatcgtgatcagttgcatttatagggatgataccaacgagtgctatgtgtgtcgagctttctttccgtctctgatcggagtatttatgcttgtcagagcgtctgactcttctttcatgtaaacaggtcacatcggtcgatacaatctatctgctcgaagccctcatcggtactcgattctcggttgaggagaagaaccggatcaggagaaacttggagggcctcaagccagagacaatctcgaagaacaagcctgcgactgaagagttcttcaaactcatcatgggacttccaaaaccaaaaccaagaaatattgagaaagacgtgcgtgcatccttctgaaatgttttgagaaggaaaggagagaagaaattatgatttatatccttatggaactcgttataacaatacaggtgaaagtcttcaaatggtcgcatatatccgatgcgttggttaagatcgttggaaaatacgtatgtgatctatttcgtatcgtcttccatggtcttttcgcccatcatgtgtcctgactgcttttcgatggcgtgccccttggtagtcggttgtctatgatatctcagctgtccagcaaactccggtaaatattgttcccggtccccttcgtcggcctccaatcgacggttcacagccaattttctctctctcttcagacaatgaagatctcaccgctatgccttccttcccatcaccaatgtctttctcaatgcagtcaacacctccgggttctcgctcagcagttcctccgcaatcggtccccagacgtccgtccgtgtttgcttcaacccttcaatctggaatacatcaattccatccacagggacaacctccgtcccaacaatcatcttcagccgcaccaatgatttcgaacgaatatgcgatgtctccttacactaactctccgttgactgatcctttcggtaccaccccatccttccaaccgggagctccttctccctctgtcgtgggttctactcggtcagaaggtcgatcgtcagacgcgacttcgctcggtttcgggttcgatgacttcttctcctcttcaggctctacagaggcttctatgccttcggggatgaccacaggtccaggcatgggaacgggcaccggcccgttctctagatcgttcggaagctctttttcaagtgaacggttcgtagtttcttccttctgtcgagggcgctgtttattctatcccctcggctctcctttcagccatcagtgatagcttactcgagatcgtttgattggctttatagacagatttgaagtatcttgaaatcccttttctgaaaagttcggcccggacaaatctaaggcgcaaaattttccgcttctggatctagataccttttcatattcgtttttttgcctgttcttttcaaaccatataatttattcgactgatcacctccaagccagaactttctcgcttatctgtacatcatcattggcttggggagatcaaagtcatacggactatcatccttcggatatttattttagacactggtactgggcccgccatgtaccatcttccggaaatgtaaacagatcatcaatgtatcttctagaccgacgaattgagaagaatagtcgtaatcgctcgctaaacaaaaacaaggttgaacaaggaaaaaaaaatctcaagagttgcctaatcaacaatccttatacccatgagccaatcgtcatcgtcaacatcagagaactcgtctccttgctcctctgaatgggtgtttgtttggatctttaaggctgacgaagggccagcagagtttggattcgaattcaacaggtcaaccggggtaagaagtgggtttggatgaggctctataaatatatattgaatgataata

SEQ ID NO: 2523 - DNA, 28554 bp, Xanthophyllomyces dendrorhous
atatttgatagaatcatattcaatcaaaatgaatggtagataaaacaacagaagaagacaaaacaaatcaatacagtaagtatagagtgaaacagatgacgcatatgctctcaagcagaggacataggcagtcgataagggacgaggttgaagataaagaaatactgactcgtactttgaatgtctttagaacgcgatggattgttcaagtcagagagggctcctgacagaaaggccgggtgataatctccaaacgcttcgtggtcatcatcctcgccgtcgtcaatatccaggggcatattgcttgtctctctctctgctgctctgtgatattgaaattggatgtctcttgaatcatggtcagctaaatccttggagatgtcatcactagagactagctcagaagatatagatgatcctggatgaaacaagggcttattagagagccgattcacagcagaagtacggggaagaacgacggtaggtttacggtgacggttggtcaggttgataatctcctctgaatcttcttcctcaaggaggatattggccgaggacggtaacgatgattcgaatgagggcttgtatgcgagccgagcgatcttattacgagctctagaagaaaaggaatcctctcgattaaaaactcctggattgtcggttcccgcttcttctggtttcgacgctgacatatcgataggtagatccagacttgcaatacaaggaatcatgatagcatagtcaacatgatttatctatatgtagcgcggtacgtatagtagaaaggacatacaacttcctcttgactggatgcgtgactgcaagtggcgcttgttgagagggagcgcgacccgattcatgggatagttctggtaggaatcgaccagccgcttcagtctctgagaatccgaatgcagaatctacattatcctaggagatgcacagatgttgaaggatattatcaggaattgtaaaagagggatttccaggactgatagttaacactaacaaccttatcccagacctcagttctgttgccagagtttattgcagttgacttaacgacataatcttgagatgtccttgattcagtcgaagtggatacttttggcccggaagcagaattgcatctactggaaagttttctgggcactttgccctcacgacagctttaggtagcagttgaaggcgctatcgttagcaagcgattgatgaattgataactagctatgccaatatcttgctcaccaaagatgagcacatatagttttgtctttacacggatgggaacagctgcaaatattttggtttgaaagctatgagttaatggatatattagaatcgtaataactggacttactcttctcgatcagtcggcagtgttatgttcataatgatttcacgattaaacttccctgcagatgaaagttcaaaaatgttgtatcaaccattacgccatatcgttgcttacggcagcgtgaacaggtttcgtaccagggtctacttcagtatcatcatcggtatgcaatgtcgtgatatcaatggattggtctatttcttgaacagatgactcctctcgaggtcgagtgtcaggaacgggatattcctccatacgaacatcggggttgtatgtggcaaatgcgccgacacccgctgatgaatgacagacattgtcggccaagattggaaatatacagcaataccaaagaactgaagacacttaccaatctcattgccttgcaaagaaaacagttggaaaagtaagaatcaatcggccagttccgaggaagacatgaaagagacatacaagtgacgctgatagacacagactcgctgggcttgctgagcttcattgtgacgacgtacgactgaggcttcttgactagagacatcacacagtcttaggttcatacaaatcagagtgtttgacaactcatatcagacatacagttctttatcgcgctctaaaacatatcaagatgatcgatcagcatgatgaagattgcagcgtcagtactaacaagcaggaatctgatcgcacaatgcacgcacttttctaaaatcgacaagtatcatttcgctagtcacaaccaaagctgagatgctcagatacggtagaaaccccttcttcttggcagctgcctgagatgtaacggctaccgtaatctctacacgatcatgtgttgtcaggagaagagaaccatgctctatgaatgatgatgaattttagagatattcctgcgactcacctaagcatacctgcacaggctgccttcctttgaaagtctcaacagatatctcccttgataataagatatgtattgagtgaacaggaatcaagcaatattgataaattatataagaacgtactctatttcaagcgaaaaggtcggcagggctctgatttgattgacgatctaatatgaggtgatggtctatcctatcagcgtataataggatactattcgattaaatagtacaaagaagatgcttgcaaaacgatacagacctgagtaccaaatggaggttttctgttcatcaaccgctcgatacgatttggatcagctgcaagttctttgaaacttgtgattctgaatgtatttaatagattaactttgagtttacaaatggccaatttgttgaaaacgaaaagaaagacaaacttgttttgttgcagtatttttaaagctttttcaccaagctttttatttgatagtacaagtagaataagcgatcacaggtcaagcggtgctgcacacaaacgacacgagacgatggctcactttatcgatctgtttgaaaatgacgctaccgaaattctcccatgccttggagttggcagcacgtaatagctctaagccaaacttgacaatagaaccggaatttctctcgactccaacctgaacaatggtttgggtaattcgagatgcgctccggctagagattaatgatagacgtcaaagaggttgtgttaagtctgatatgaatcacatcaaattcgaagaaaaggcttacaatacggaaagagactgcatcaagatcggcgcatcaatcttgacttctgtgagagatctacgatttcaaagaaaaaagagtttaatgtatgaattgatacagttggttgtatgcgagagccttagacagaacataccctccgccacagatagtctatggtgtgaatgattgcgaggtcataagcacgctccaaagagaggacggtacaattggtatctacggattcagttacatacctgaaatagcacgaagatcttgtcccttgggtaaataattgaagatatgatccatatcagcgttctttcaaagcgaacatcaagtacagagtccgattaacggatggcgaccattacataccttgtactcttcatctctttagttggaaatctcatatgctcgcccttagccagagcacgataggctgttttttcatcatttctgagttttagatcatcaaatctatggaaatttgtaacataactatcagtgaatatcaatcttgatcatacaagaaaattagacagccacatactcctgagcatcgcaaagacattcaagaaggtcacggagagttactttgtctggtagcgcaacaatctttttcatctagacaaatgaggggtttcttaacaatcatcagaaccacagtgtttcaccaaggtttttactgggtgcaaacttcatgacgtacagttccaaaagaaatgttatgtttcgacatgaggtttcctgtgggagtaattaatatcttcgagtctggattgccctcttcctcaaatgtaactaaaccagccttttcgagattgtcgatggcgctcttatttatgaagaagatagtataagtcttgatgcaggttgagatcacattggtagatcactcacaacacagaacttatccagagcctcggtggcacttgaagactgctcgatgatatctttacctaagtttctcagatagtggcttgggttctgaaggatacgaagatacaggaacgagctgtgacagacatgtatgtcaatatcgatcttgctatatcaaaagcgataaatgacgctatgagaattcaccccttgatccaagtttgtgcagtagctcgagaagtaatggtagataaagcaatctcgctattgatgtgttcggtcagatgctatataaaacagtatatatcagcaacaagcacagtatgatgcatcgaaacacgaaacaactatgttgctttacctcatgaaggcttgattctaggatggtctttccgctggaaagctgctcgaactgttgaaatagaagcttgagcccatacattcgtctagagaaagggtcaatcactaaactcgcctttagttgggatgatgtatctgtcatgattaacgccagtccactagtatcaaattgtggacggccggcacggccgatcactgtcgtttgattcagaaaaggatgagtaggtaaaaaatctgcacattgatgtgaagatatgcgaagcagacccactctgcagcatatctagatcgctgtagtcgaccatcccttccccggagaacatcttggttcctaaaactaccacagtatgtgcagctatcaatcgggcacgaacaaagaaaccatcacagaagggagaatgagaccaaatcatgatatgtttatttcattttgacaggaaaagagagaggagaaaaaaagagtaagacagtatcacgtacgaagattaatgccaacagcgagtgttgaggtgcacacaatgaccttgatagctccagatagatatgatgcttcgacaagccgtctgtcgtcaagcttgaagaatgccaaaacaaacagtcggtcatcacaagaacaaggtgtaattggttgtgcaatcttaccaataagccgccatggtgaaaacatattcctttcggagctatctctgatcgtccaaacagcgcagatgaatgtatcgcatgcgcgacgttaatagacatagtatatatgcagaggcgcagaagagacgtactttgtagtcttgcattctggaatactcccaaaggactttgcagcctgctccagggcagtttatttcctcggtctgcctcctctccatactgcttggcaagctgatcggcgcaagacattgtagaaacccgagtaggacagaaaactaggattggtttaccctcagcatgaatagtgagcagttcaaacactttagtttcgagaaacttcgacaaggagaatagtagtcaatacatatatacttgaggatgaacatgtgtgtaggaactgcttactttagcgaagatgaagtgattggttgtgtccttcttcggatatgcgatgatcactttctttaacgggcacggtcgatactcatcatcgaactgagaaagaaggtctgttatgaagctcccagatcgaattgaagatgcaataagaagagatttaccttaaaaaccttcgctgtctgcgactgaactccgctattgatatcagagatctcagttcctgccataggacgcagccatcttccaacatcctcgacattgggaacctgtacagaaaacggacactttagcgggtcgagacatgtgtatcaatataagatgcattttgaacaggtttactgaccgtagcactaagcgcgaccacccgaactgaattcagagctttcattcgggacacaaccacttctaagacagctccacgtttctccctgaggatatgaacttcgtcgattagaagcagagactaaaatcaatagaagaacattagctatgatcatatacaaggcatgtctcggtcgatgatactgacaatgtgattggcgatcatagattcccgagcggatgctgtatttttcctatcagatatacggagaaacaagctaatatcaacatgtcagaagaagaatttttaaactgagagacaagtttaccatctggtcactgagtcccatttctcgggctatggaaaaacaaaccttagtggtcttagtgatatgtgaagaggacataagatcagtatggcttacagtagtaactatcacacgagcgttctgtacgcctttgaaagcttgtccgctcatatcggtatccccggtcaactcaacgcctgagagcaacatatctgttaggcttcaagggtcttctcttgtggaattggttcggcgaatggaaaaaagtcacagaagaacttacactggacacctataccagcgaactttttgttccaatcattggccttctcggaacatagagctttagtaggggctagatataccgccttgccgcttcctgttgtctcaagcagtcgtattatggctaattcaaagattacagtctttccacttccggttggtgctgatgtgaccaggtcagttctcactgactaattcatttgaagcatccagttggtccgataaagatttgcagagctcaccacatataaccaggttctcatcactgtgtagagtcgcttgcaagcagcgactttgaactcgattaaaagctccaaagcggaaccatgatcggtagcggtcggcttgatacaagaagaaggaacgtcagcagtaaaaacgcaaataactgtttggcagctataagcatggacttacgcagtgagctaacacagaccaggccatctaatgattggtttgctgcagtctcgtaagaacgcgaagagactgcctgctgatagtgattttgtttaattaggggcgatctacgatctgttaacccgatgaacggggtgtcatgacggtgcatatagctcaatatcgtatattcgagtggttccatatgaagtgagagttcgcgtaccagtggggcattgtctttgttgagacagaactattcgcagaccacagattagagatacgagatcagatctgtcaatgagatctaaatagagcatcccatcaaagaggaaggcctcatacctttatcatcgatattccaaagctctggatcatctggaaattctccttcaaactcatcgatttcagcaggtcgcccgtatgttggatttcgctcggatcgtatagggacacggattgccgtgcttcttgcttgtgatggctgtggagaaagttgcataaggtgagagtgggtatatgcgctatgattatctgagacaagacgaagagagctgtgatttgtgctagcatggcgggcagagagcttgttatcatgtaaggattgatatgcatcttggtcaggagaagatggattataaatgattcctaaatataatatgacatagactgtcttgttagaaacaaatcgtagagaatacacttgaaagactgaaaaaggtagataccagtgctttgaccatgttcattatactcagcagggatgtattcgttatgctgacgttgagagtacttatgcgctgaaccaaaggcattttctgattctagaaacgctccggagtacctgtactcccctatatacccctccgcatgactatatgcgctagatgttgagtggaaaggccgagaatcttggtaagaggattgagatggggcctttgtatgttgctgaaagcttgaatgttgagcaacagagctagcacgttcttgagcaaaccgcaactgagagtaagatgtgatgaagcaaagtatcttgtcttcagcgatccttgcttgcagaaaacttaagagaaggtggcaagaaagacattaactgcaagacgagcagacctacctccagagcttcaaaagtgaagtcatcatcgctaaaagattgcattacacaaagattgtcaagcaagagaagttggacacaagatctcagttaatgggaagtgtgatcagtatggtatgggagtggtgagcttgatcaagcgaagtaagtgagaaggttagttgacaggaaacgcagcaatattgtgatcaagtgtcttattgatgttccaagcaatcagggctgttcaatgatcagtcttcctcttcttcctgtgtgacagcaaaagaaacaaaatgatatgcagaaagagcagttgataggagaaaaaaaatacaagtataaaaatgtgagcgaatgatctaaacagttacgattgtaaggaggatgggttggaatcaaaatttcaaaccggtacaaagcaggtgatgagatttcttcgaaacgaaagaaatcctgaatgtactttaattcccgatgtgtgttggcaggagcatccgtggtaaccatctaaatgtatcagttggtgatttgtatcactcaaaaaccaataggaactgctaaaaaccttctagtttccttccattcgagatttagtatcgtctctctcctcctcagtaattctatcgatccaggaatgaatagctttctcaagcatttgttcccagcccggggctcgttttgccaccatctggtgatcgaaaaagatcgattcaggagtaggattgacagcattcgattggattagaggaacaaggtagcgaagtttgatggctctgagctcaagaagagtgtgtatagatcacaaggagacaaaagtcagattgcggttgccgaaaaagatgccttaaggactgacgctgcaaagttccccatgttctgaaccctgcgaaagagatactccttcctgtgcttgaccaggccatcactttgtcgacggctaatcgtgcctccgcttctttcaatggctacagtatcgatcaagaaaggttccagttgattgcgctctcgctccccgataacgtcgtgaatctcgttgtcaggaataaatccccaaggtttccgagatcggcggacagcgaaattgtgggcatagcaaagaagctgcccatcggtgagatcgttcaggaagtcaggtagaggcgatgtcaaaggaggtatataagtggccagataggggggcaaatgatacgataacagcgagtgaagtcggactgtaaccaagagtgttgtaagccgataaacgtatttatgtcctatagtcgacgcttgactgtagactcaccgatgatatctttttcactgtttaaccactcttcatcggcttcgtctccttctgcgtgcgagaaatctcggatgctcgggtcagtctcaatgttttctttgtcttcctcatttattcttggtctgccaatttcagttgtggtccgtattctcggcgcgccgcccagtctccgtttccttctgcctttgtccaccatatcgctatcccatcctcggttatttacgcgccctccaccaaataacacgtcgtctactagtgacaggtagtcttctacggctttccgagcatcttgtagaggttgagaagatgccaaagtgacatctgactggtagagatgcccgagccggtcctcccaagacaacttttcggttgttttttctgaaatctccaaatcatctggatgaacgtctagatcttcagagaaagaacttctcaaacacgggagagaggtcgcggaagggatggtgagagatttggtcgtctccggtccgagagggtgaagtgtcagaactggctcggaattgtcttcatccactgcttcatctagaagtcgatacctctcctcgataagacgaagcgcaccaagaacgttgagggctgattttcttatacgactcacaggatcgactggagttgggtggagagatgaaggagccgaactaattcgtgtagacggtctagcatagttgattggcgcaggacgagatggagtagataagtagttggtttgcacagcgaaggaaggagaaaagacagctccagtatacgaagttgggatcgatagaggaacagatctagacgggaacgcttcctcgggtatcgttaccactgagatatgttttaagcaagagggcatgataaggcacgttgtatgagtttgcgggaaggtggaaaacatcgaaattgaaaacaaagaactcaccatagttgcgaacacttctgactgctgtgatagtcgttctcaacagcttcaatatatctatttgttgttcttctgcccgctctgctacactaaatactcgttctactagctttaagtccctcaccacctccggcctgagcgattcagggtcgacattgatgactggttgaggagggaatggcgcccgaactgttgagcttcgtactggagaaggaggtaaggtatcgagactgatctgtggcagtctacgagaaaatccattgagaaagccaggaccgctcttctctatgtccccatacttggcctttgtgccttcagcaatggttttatctgatgctaagctaactttcgtaaagtgatgctgtaaagactcaatggatcctagagcggtgactgaatcacgccttctggcggattggctgaacacctgtctacctttcttgccagcatcaatagagggatatatcttgagcggtcgaggaagccgatcaaggccgaaaggaggagtggatagtggagcctgaatgcttgtcgcaacacaagattcttctactgtggggcaggctggtagagcggaagagaccggtgatgagggtgagagtgaagagactgaactgctgttgaccggcgactcagactcttggtaggaaagcggaatactcatttgggatcggggttctagtctacaaagatgtacctttattcaggcgaaggcaaggacatacagaaaaacaaagaagaaagaccgtaaaccgtccgaagaaggacgcttgggcgctgtgacgaaacctagaaagagctacagtcaactactctgtaacatcatatccatcactcgagccaatacctctaatactccttcgataagcgacacacgttctctctctctgtttgccagaatatttcggctcgtttgcattcaacgcttctagcagatacacttccggacaggcagatacatattctgtaaatatgacgtccaaatacagtacatccaaccctttcgacgacgggttagtcttcgcactagtatcatcgtgtgctgattgccaagctgactaaatgacttgaatgtacctctcagagatgaagatgcaccttgggggctaccctctccaggagtcctccctcccggagatggggatttgatccaaaacgctttgaagaaggaaaaactcgtcaggcaagaattcatctctgttctatgttcttttacacatctcctactgacctcatatctttctaatgaaattatatagcgaggttgtcgctcagcaagaaggtcttagaggtgtgtcttgaactttaccttgtttcgtatgacgctgctccttgtgttatatggccctgtattctgatctgtgtctttcttctttatgcccttgatcagcccttgttgctaagatcaagaccgttcaggccgagacggacaagctggccaaggaaaacgccgttcttgaccagtatatcgctaatcttgccaaacgataggtatattgttcgatctgacagtatctcgagagatgtatggagtcttggcttgcgaagatgtgtaaaaaaaaaatacccttatataatgataccctacctactacagcattgttaatgatactcgtcaagtgtcatcaaggccaagagagataagattggtttgagggcgtatgttctgagcagagaactttgacttgttctctgtttacataaccaaattgttcaaaagacatagcagctttgtcagaaacgaatattggatcaacgatcatcaccatctgtgtgcccctctgtcttctttcctctctgtcctgctcctctccgttttttctaggcgtacactctgctatgaccgacatggcgtactttcatgaacaagtttataacgtaataacttttcttgaggacatctctctttgtgaaacatcagtatcacaatcttatctcatgttctctggctgcgagttgatcgatagattgttcgaatgatccctttcgcgaaggtgacctcttacaaacatgttgctaccttggcaggtcaccctcgtcactccagagcggtaggacaaggtttgtgcgactcgcttttcagtatgttggggaagagataacagtcttttaatcgagatcatgatattattcgttctagctctcaaattcgtgcaggatccatcgataccttggtaggttttgatcatcttcctgcattgttgattccgcccggcttgacttgtcttgtcttgttctcttgcctgcacggcaggcaaagagtgattgcctcgagcggtacgatttctttcagaggtgatgacggcgggggagccgtccggcagcgagaggccttggaatcagaaggagtcgtagtgacggccgtgccggcaaacgttgcacttggaggaggcaaggtttcgttcagcgagtttggctggttcccagagagtgtagatatacctgaatgagtcgtatggatgcttagcatctactgatataacaaaggcacagactagagcaacaacgacgacaggagggatgatgagcatctcttcgacattaaagggcgaaagttcaacatccatcgcaagtaagcattcctttgtcttgtgcgattctacatctgaattaaagctcatgctatcaagagaagaaacgagaggacaacggacacgatagaagaccaactgttcttttatcgcagggcctgaaagggaaagaaggttaagccgcgtcaggcgctggacctgaaaagaaaggggcggcgggtgatgacgcacacaatggatgaaactcgcgcggaacgtgcgtccatccgagcgagtttcatcctttgtttcgttcgcctttgtagtttctctgtgtttcttgtttatcctaattcgcttctctttgctttttgctctgcttttcgatctttctcttattggccttccgtcagggtttctctgtttggatcagacgctcacaccaacatcgtgtatacatattacacatactcttttgcgctcgttcatttgaagcatgctgctcactcgattcagacgtcacgtcctcgttctcatacctatagccatcattttgtgttagttcctctttcagatcgatcagtcgttacgtccatcagggtgaagcttcattgggatcttcttacttctgatttcccatgttttcatctttcccaacaggcttgaccttctttcttccgcctctacatctcgacctggtcttgccaagcttcatcggcataaatagccaccgtcccaaaatccccttaatctatcaggcactagtccaccagctagatgagtctcgtttggcggacaacctgattcttgagaagcctgcagtgagtttgagggcagacgggagggttgtcagcaaggattgcgaagcgcttgggtggcagtcgctcgaagctcatgatgtcggggaggtgtgggatgcattcgtatttgtgggtacattgcctgaaacatatatctgcctgtgacatgttcgtctgcaggtagctggccacttacacagtccggatgattggtatcgggatcatgtactgtacagacgggcaatatatacatgctcgaactcaggctagcagagatgtttgattcggtcaacatgttctttgtatgtttttctcgatcatctactcttcgagaacccttctgaatttgactcatcctgtcgcttgaaatcaacgcattcggtctcagatcgttgatatgtgagatctcacgagcattttgtgttgtcgtcatcttgtcagttctaatacttgctttgataccaccctgggttggccctgaatcgatcaatcctttcaggtccccacattcgatacttccctccagaccttccgtcatctctctccctccaggactgaacgaatatgctggaaagcttacgatctctcatctgccttcaaccgcatccttagaggaagcttgggatgagttgacgaatatgttggacggacatgccaaacttcgagaaggccagaggaaggaacttaagaaggggctggaaataggagagacagtaccagagggtaggccgaatgttctgatgggaggggctgatactatactcagatcacaggtcgcgcacatcgtgagacaatgtaaacctgaccaggatggaggttttagacttggggtcgggccttatgtgagtatgccctctctcgatctcagatctgccgcgtttcgagcgcgcataaagaaaggatatgagtggacaacaagtatagatttagctgacaggtatacttggacttgcttgttcggcgccctgaacatcatctgaatgaatagatttactcatttgaacaccctctggtaagtttgtctttgtgttcccttccacgctttccaatgaacatgtcttacagattagactgattccaactgaaaccatattccgttttttaaaacagcaaattgaatcacactacaactctctagcgatctcttgggagcgacacaagtcaaagtatggcttcggattcaactcgactagctcacagagaaacatggaacttctaaaagattcaggatgggaatgcgtcggatgctaccccaagattgagaactatgtagcccttctcgaacatggttcgcactctcttctcctataccgcctttatctgatatctattgatgtaagcaatgatatcaacgaacagaggtcgcggacaactcccatcagattcctgaagcgaggatgaaaaagagcaaggagcgcatacaacatgcgctttgcactggacaagatatcttcaagttccttccaggatctacatacgtcagttgcctatcttcctatcttattctcttcagatcaaatggttttgttgagctgattttatactgtcggtctatgtctcttttgcccttctgcagtggaactctgcactctcgttacttcccccaagctcattgcgctcgactttgaatcttccacaacaccttatgaaagaacggaaacgtctgtcatggcttctccccgaaggatgtgagcgggacctcggagttgttaatttataatcttggcatctgggtttcctgctccttctgtctgccctgctttgttcttatttgtttcagtctcatcatccatatagatatacattgtatcgctcgctaacaagttttcatctctttctgtgcaacctcgcatttgctctctcctgttccgtgcttctcttgctacgtgtcatattctcttcgcgctttcccgagtcccatcgatgtagcctgaataaggaagataaatgagtatatacccaagaaaaatgaacaaacccaggcatcaatcgttcatatctttattcaaacattttatcggatttttctttcctctttccaccgtcagccggacatttatcatatcctggctcagaaggacatcactatgagtagagatgttagaatatcctgagctttgtacgccgcccaagctcttgaactcaaatcaagcgaaaacagaggcttgtgctaaaactccaggaggtggacgggttcgcgcgcacgggcagggagagatatggatggaacgcaaaaaaaaggtatcggcaggatgatccaattaatggatagcgggttaggatagacgagaaggtgactgagtaaggtatgagtggaagatactgggtaaacagaatctatattgatcattccacaatggtcttcggatcgaaatggttcttttccagctatcagataattaagagaggtggatgttagcaccaagtcatgcattgatggaaacataagatgaggcgaaagcgtacctcgatatttaagccttcctctatactctcgatttctccagtcttgacgaccaaatgtgtagcatctaaatcagcgataataaattgatcttgggccggcaacttctcgttctggaagagcagaatctgcttgatcgcctcatcactgtcaatgattgggcaaaaaaaagagaacgaagagaggttgaatgagtgtagacataagagtatatgacgttcaagacggtatcgacaaaccatgtgatcaatgtggctatcgaatacaagagcgagattagcttcaacggtgtcggagtgtgggctgtatggtatctaaaaatgcatacctttggtcactatggccatgctggatggttcgttgcggatagagatacagatgggttcactttcgtcgtcatatgctccgatcacttctcacgtgtctcgtattgtattttgctagctgtgcaaccacaatctcagctgaatggccttgtctcgaatgaatgttggctgagaaacatacccagcgtgatctggtagatgatgctccagctgagataatacacttgtctaccatcaatctgatgaagatggtgatcactattcaatgatgtgcgggagatgggagtttagctatatcatgttttctttttctcctctgtcttctcttcttgcaaaatccctcttttgtgggttttgttgttctaattattgagatagaagacgtggaaggaaacctctaaggactgactgtccgaccgttcaccatgcttcgtgcaaacacaagcagcgccgaaacgaaaggaacaggactgtatgaacatgagtgcctgttctgatatgtcacgtgatttacctgccaaaatgcatagagctctgcgctgttgaattttttcaacacccgttgcctctccaaatgcatagcatcgtccccgccctgcccccgccgggtttcgatttttggccttgtccagagagtatcagaagaggtctccttctttgtcttttcatcgtgtaactccacaaaggtatgtctcctccatatgatcagtcctcattccgcatggatatcggacagcagcacaagcacggctgccatggaacacaatacatgaaattccagtagattggatgaatggacgaaagaaagctgacagaacatacggaaatatttgctgttcttttctcgctttctcttttttttctactctctttctttcctccacccctcacagatgcagatcttcgtcaagacccttacagggaagaccatcaccctcgaggtggagtcttcggacaccatcgacaacgtcaaggccaaggttcgtaaaccttcttcgtcttgagaacagagggagaaacgagccgagtttaggcagtgtggtttctgggaaggattggagaaatggtttaaaaaatactgaagaactcaagaccaaacagtcgagtagaacgtgaggcaggaatgaggggatggatctcatggatcaaccaacggtgaacagaatggttccagggtaccagatggctgacgatgtatctgactttcttttcccttcccttcctgattgctccatcccctcattcgatcgttttctgcggttatcccattctcgatcttcctatcattttcttgctcgactggtgttctcaatcccgacaaattcttacacgacccctgtgtattgccgtcaatattctcgaatcgacttatcttgctgtcgctccgacgtgcccacccatcgataaatccttgctacactccttaatactttattgcaatcttcgatatcccctcatcaaaacaccatggctctcattcccaaatacagattcaggacaaggagggaattccccctgatcagcagcgactcatcttcgccggaaagcagcttgaggacggacgaaccctttcggactacaacatccagaagggttagctgcttttcccttcgttattcagacttttgttctgccaaaaagtagattccgtactcattttttttacgtcgtggttcttcagagtccactcttcacttggttctccgactccgaggaggaatcattgagccttccttgaaggttcttgcttccaagaccaactgtgacaaggtttctactctccttgattccttcctgttcttgatcgttttctctttgttcttttgagtaacaatgtcttaacacttcgtgtcgtgcttttcgtgtttaacagcaaatctgccgaaagtgtgagtggatgcctttccaagttcacgttctgctgttcgaaactgacctagtctatttgatgtaatataggctacgctcgacttcccccccgagctaccaactgccgaaagcgatcctgcggacactcctcccagctccgacccaagaagaagctcaagtagtggttttcttgctattattgcatatggagatgtttcgttcaggtcaaatatccccaagataatgactttacttttttaaaggaagagcaaatgttttggaatgtgtttttgatttcttttttcattgacagtcatgttcagtatccgatcttgagttgatgatacacttagccacattgaagtaactaaactaggcttggtctggttcagaatgagctttgagtacctgtataggttgaactgaatgagtacctttagagtatgcaagtaatctttcattgattgttgaggtattcctcgtctgcctcacttgacacaagcacactctcatcgaccaatcgttcatcctcctcactcatccccatttcagcatcctctctagccgccgtttcctcagccgtctcatcatcgtccacgctgtcattatcatcaccgtcgacagtgatgtcaattccttcatctcctggaatgtccgtcccaccaggcagtttgttttccggtcgacctctcttctccttctttgcctttttatgtgattcgaccatctttcggataggcatgactttcgtgagagctttctcccagtctttgaactcgacccatgaggttaggatgtcaaacacctagacaagcagaaagaagaattaacagatcgtggtgacctcatctttagtcgatagacacaccattgacagaggcgaacaatgactgaaaagttgagaaaccgctctgacctgattaacggtgagaactttgcgcgtaggcatgctagctagataagtcccgatcggaagacgagctgttcgaatacccaatcgagtggctttatccaaacaaagattctaaatgaaggtaagaacgcagagagtgtcaggaaagcgagacggatcaactcaatagcagagagaagggcggtaagattcaaaagtcgacaaaccttgtatcggtttcgatcgacaatcccaccgatcacatacgttgtgccctcttcgagcgcatcaatctcgttctctgaatcagccgtcaggtaaacaacgtcttcttttctcgcgctcgatcgtccgaaggcaacatctcccaagggaacaaagtcctcggctttctcgtttggcggtagccatagtcgatcgagttcttgtccgtcccaccattcggtaccggaccatctgttcctagagttatcgaaatgagctttgtaaagtctctcggacagacgaccatcaagatgggtgaagagtagcgagttgaaaggcgtgtgagaaacggtatggatgttgtagaggtagctgatctgggtggacattgattttatctcctgaagagcatcaagtttgatatagtgagggatgatagtaccaagcgtgtacgaagcatagagaaacatagagttagtcgccgtgtttaaacccatattgcaaccgggaaagggcagctgtcagtagatttagggaacagattcagaaaggactaaccgtatcaatcataagctcgtcaaacccaagatcaaccacaacccgaccgttccaccaaccctccctctgatcctccggtaaggtcagtccttttctaaactttgctttcctactcttggtctccttctgccgggtaagctttctttgtaattcgagtgaggcttcctcggatccttgtccagactcttctttaagcctggtcatcctctccttcttcttgatcttttcacgggcgcgcagctccatctttttagcctggaaatttgcattcttggctgcacgcttgagggaccgtttggacggagctggtacatcagcctcggaggccaaagctgaggccgggtcagtgatcgcttgatcagagctctgagcgtcagcgttggtggctagctgtaaatttgtggtggcgtgattcactgttggatttaacagaggactactcataacgggagaggtaggagactgggttgaagccaaagacggagtagtagcggtggtggtcgtcgtcgtcgtcgtcttcttcggatttattgagtgaacgaagcgagtcaatgcaaaccgtctgcagtataagcgggctatgggacgactgtatgaattagaccgttaatcaggttaagaacgaacagactagaggccctatatccctactagctctctctgtttcctcgccaaacaaacagataacgctcacgatacgaaagagctagagagaatgatgttcatcgactcttagttgtttctcgattctgactctgaaatgttgagaaacttgatgtcgttagggttacgccaaagttacacgccagtttttctacgtcacctccttctcccaagctatcaccatctcttccaccaagcaccatctacatctgttgaccattactcatgccttccctattcactccccagacgtttggaactatccaccccctgtctcagactcagctccagatcaggttggatccttcgtctccacaggtctatcatccaggttctgtgctcaaaggacaggtcgctctcatcgcccccaataaagaaggcgtccgagatgtcaaacatcgtttccaagtcggccgactcactatcagatcattctgggaagccagaaaaactagtgaaaatgctccggtggaagagccttggcagagaggaggagagactcaagttagtctagtagatgaaccggaacaggctttgctcatgcctgggattggcaacgaactagaagtcacttgggatttcgaggtacgcctttcttcttcttcttccagtctccaatcgagataggctctgtctgtatatcagaaggaaaattaccctggatagactaacaagctgacttgtacgaacgatatttgaatcatacgtttggtgattttaacttcacctttcttgatatagttcactcttccggagaagtccagcccaactcactctcactttctccctgatgcgccttccggcaaaggaaaagctcctgtgacgactgctagctcaattgtctccccaccgtcgtttcattctacagagtatcaaataaaccatattctggaggcttaccttgccttcaacgaagttccgtctgctggacctctacttgatgagcgggcgttcaatgttgccggagagatggacttggtcgagcgaatcgtataccccttccagaacagcgacaacatagaagatggaagagtatgtgagtgtaatgagtctgttaaggactcggagggaaagccgttaggcgttctggctatcactgtgcgttgtgtctcctcgtccttcactctacccatggtttgacattacatgcatcccgccctgacgaccatactcttctcaacacattcgaaaataatatcagatccaacttccatcccagtccatctcgacgaccacttcgaccatctctctagagtcctcatttaagttttcagccgagaaagccaagctaaactcaacgccagaaaagcctaaagaaagtcacctgaaagggctgtttggacttggcaaaggtaaagacaagaagaaggaggaagaagccactatcgctgcctcagcacaacaagctcatccagcagagcaggctttcggaatcgatcagatcggaggagaactggtcgtcaagactactggagagcaggacgtgagctctcgggttttgccttttgtataaccaatgtgaaagaggctgtgctagagggtaagcaattgaccaaatgtttttttatttaattttttttaaatccctagcttcatgttccactatcaccctcaatcctcaacatctcgtctcaccatcctgtcctcgctcgaggtctctcttctactcttcacttcgatctggcctatcctctctcgactgccgatcaaggtccgctcgttggatcattccatactgacctggtctcccgctccgtgagtcggcttttctcttgagaatgtcgactgatgtgctcatcgtccgatcttctttatgaacgtttcttcctctttatgcaatccagttctctctaaacctgcaccttaagacaacctactctgccacccctcttccgtctatcctgatttctttcctggcccctttgacttcttctgtggcctcttactcggatattcctccaccctcaattgacggtcctccctaccagagcaatgcgctcccgcccggtttcgacgaggccatggccggtcatgctcagccagctagggcaaacattgagccacctagcttcggatatgccaccaatgagagtggaatgaacacaccgggcgcgggagatctgcctccaggctatgattaactggttgcgaagcttctgcgtcttgtgtacaagggaattaaaaaaagtctgatacagtgccattttgtagagtagatgaagatattataaataaaaggaagttgttcgcgtaagagtgagagagcaagttgacgggagaaagaggtgtttatatgcaagcctgaatgtgtgtgaggataggaaaaccagacccagacaaagaaagtcgtggtgaaagaaaatcaacaactggcgcgagacgcgcgacgcgtcctatcattaaaccaccaacgactttccgctttcttttccgtccgatccatccttatttcgtttcgtttatcggattcgctaccaaaatttcaggaaagcataatgtcatcaccggaagcagggccttctactcctcgtagaccgacaaatcctcctcgaagagccccaagaccggcggccgcggccgctcctaatcccgttggacgaccgcgaggaggaccaccgagaggtagaggtgagcgctactttagtctttctcctcttcatccattcatgtaatatgctgccatttttctatttgagtgagagtaaaatgggtggacgaacaccagacaagagagagagtggggtggaatgaggttatgggtcagatgatgaatggatggatagatgaaaccggatgggtaggaaggtagggaaagatgggtagatccatgagacaacattcagtcgttctgatggacagatcgcctggtgactcttaaatattctaccgattgaggagaatgagatgtcagattcgattagtagatgagaatggatcgcatggaatcagacgagcgattggggcaaaggagtgttcggatcagggactgatatctagaaaggatagggaaatcgaagggcgaggctccctccctccgaggatgagttgactctggacgactcggattatacgtgtatttttgtgatcaacaaactaaccactaccaatcatcgttcttctcttccgtgactatcgcatggaatctcacgttgacgtcgacagtaggagggacagccaaacctcatcggtatcgaccgggtacggtcgcattgcgcgagattcgaaagtatcaacggtcgacagaactccttatacagaaacttcccttctcacgtgtagttagtctccttctctctccttactatccgcttgtgcctttctttcagaagacagtcgctcctcacccatgaatgtcctcaggtcagatcaagtataatcctgatgtcactcttcttttttttctctcccctcttcaacaaaggtccgagaagttgctatggattactcgacaatagacgcagaagatggctcggtcgtgaccatgcgttggcaaacatccgctttacaggccttacaagaagcaacagaggcttacctcgttcatctgtttgaagacgcgtatgtgtctctcttgctttgttcctcttaatctcttcaatttctcgtatcctctactccttttacaagaataaaggagaaaaggatacagatcaaaagcgcctctctcactttctcccaccggaccaagcttcacgtcgctcacgtcactcattccgttccttctctttctcaaatgcatcttgattcttcttggatcgaccgacgacatataggaacttgtgcgcgattcatgctaaacgagtgacgctaatgcagaaagatatccaactggccaggcggattcggggaccttggggtggactcggttgatgttccttcccctcttctcctttttcttctttcctctttctcttctttcctgcgttcattatctcgtagtaattttctctagtgttctccttgggctgatttagaacctcacgttttctatcctgtttctttgtactcaatctaaatcatccttccttgtcttttgtcttttgtcttttatcttcttattcttctcttgatctctcattatttcccccgggtcggtcagacgaacctgaaaattccttactcttccttgtgtcaaatgccgttcgcaactttccaaaaggaagaaagaaacacatcaaagtgagtgcgagattagtggatagctggaagtctcgaaaagatcgaacagattgagtacgaagcgaaaggatgttacaaagtgttatagatagtggttaacgagtgaattgagcccgattagatatgagcgtaagaggtggatatcggaggagaatgagctcctccgatatatgatgtgcatgtggtcaccttcctctcgatcgaaaaaaaaagagaaagaagaagaaaaaatagctcctttgcatcctgtaggccaatccagtacaataggaaaagaaatggagaaaatcgaaccccgaaataaagatgtcggtgaaggttgcaataaaaagagacaggagcaaagtcctatgatcacgaaagaaggagagaagaagagcaaaggaaggtatatgtgtaggccgccgtggacctccacgcaagatttcaagaaagataaacaacaagaagtataaggtataacatacagaacacactcaagaaagataaatatgaacaaggtccatcaaagacaagagagagactgtcgatgagaaacaatgaaagaaagtgacatacacaaagacagaatcgagatagattatatatgattgggttaaatagaccgagaggaggtgtcttcaagagtccactgaagaggaggattgagcgtgggtccgtatcctcgacatcggcctactctcaggatctccgtgatctccaaccgatccaactgatccaaccgactttgccgtgttctttcgttttagatttggcctccctcctggccctacagacgccgacttgctcatctcattggatgggtccgatccgttgttagcgagccccggaggcatgtccagaaagttcggattcgtcggactccgaggcgttggtggtggaggcagaaaattctcatccatagaaacctggggtgtaacggaatgctgttggtgttgaccatggggatgaggatactgatggggatgctgactgtactgaggtggtggattgttgaaaggaagttttgagaaatgctgagaaggcgttctggataccagtcggccgggtgtcaagaccgacgagccggatggaacgtcactaccggttgctgagggaggtgatggggtaaaggatgaggattgaggtaacatatgagaggcccggattcgatcggccagctgtttgagcccatctgaagaacgtttccagatgatgggggtttgatatccacaaaacagagaagttagaacggtgatcgtttaggacattaaaacaagctcaatagaagggagggaagaaagtctacgaacccttcggtcccaggttttccgatttgcagaaagacatgagcgggcccatctgcacgacctgttccgaaatctaccgtttttcatgaccgatgcaacgtccagaccgttattcatgacaccgagagaagaaacaagagaagaaaagtgaatagaggaatgggacgaacctctaggcatctcatcatactcagtgaaattccaaactcgttcacgattggaccaggcatcgagtaactttcgccgacaaactccatctctggcgggcttaagtctgccgagtttaccttgggtgtggctgcctccaggccggattcattgaccttttctcctgttactttgctcggtccacctggcccagtgcctgagccgaatcccactgatttctggttctcccctgtcttggcactctcatcttccttcccttctaacgcttttgattcctttgacgtcgatgtcgtcgaagtggatcctgccgacgcggacgtcgcgtcttcctttgcgtcgattgtatcaaccgaccccgctcctgttcctccgtcttcgtcggtctctgtctttccggaatttggtcctgacgctaccggtgtaggagtttgacctggcgtgggcgcctgcgggttgaaccctgactgagttgaatcgtcattggatcctgcttcagaagctgccgctgccgctgccactgcagtcactgctgctgctgccgccgtcgacgtggtcgatgttgatgaagcgattgaatctggtccggacgcaagcttgttcgcgattccaccgttcggattggcccatgtatctatggataatcttggtcgatagatcgggaactttcgtatggacgatcgggcgatatactctgtaaagtcgagcgcgttgaaggatatcctgctcaataacaaagagccagagccaccgccgccgatgtttccttctgccgactcgccatggggcgtgtagatgaggacagctttgagtgagccggtggtgacgacttgggtgccatcataatacacatatgtgatagatgctcgggatacatcgacagtgatcgtccggaagccatgctgcgctgagaagactgtccgggactctcgagggttctcaagattaagagtgatagctcgacagctattttggtaagcgacgaggaagtaccgggggagcacagatgtcggaagatctatgaaacaaggggattgggggtcatcgtatcaagaacaaaagatatctagtatgcacgcagaggagtgatacatgcgacaaatcagacgaaccaaattctttaacttcaccggtgaacgtattgcgaaacgattgatgaacgatgccttcttcgatgaaatatgtatccacatggtccttccagtacgcgtactccctcctctagatccgtccatagacaaggtcaggtgatcatgatcagcaaagacgcgatttgggatgacagtcccctgtctatagggtcgttgatgatggaagattgtgagactcaccctttctccatctgcaaacccagaaaagtactggagtagccgcaagatggcagctccatgaggaggttccgtcctcgctctactccccataaacagataagatgaacggagccagtacgcctatgtcagcatcccagttttctcctctttctgtatggtcagatgatagaacaaggcgacagaaggaagaaacgaagaagagagacagaaagataacacaagacggatggatggacgcacaatattgaactgccggctcccttctgagacggatgtgacctgaccaacgttggtcctcccggaaccattacaggttggatcccctgaaccaatctttgttgctgctgctgctgttgatgaggacctctcaatacctggatgagtccgggctgatggattccaatggagggcgaggccgcgtgtggttgtgcctgctggcgggcaaagccaaccacgttcaagccgggagtcaccactgtcgacggtgtctgtacttccaagactccgatctctgaatgggatcctggccctccctggatggaaggcgagtaaatcgaactggttgagaggggtctatgggctgaaggtgacatgtgagcgttcgacatcggagacatgtgctgagacggcggttgcggttgcggcggctgacggtgagccgtttgtgggtggacaggatgagggcccattcctgggttatgaggagttccatgagggacaggccctagttgggcatgatgggtcggattcgaagatggaggtgggtatggagcttgtggatagggacctccattcgtgcccaatggatttcccaccacgatcatttggggccgaccggacggagcgtatgatccgggagatgtttggtgttggcttggattcccgtttgttcgagccatttgctgatcccgagcggcctgaaaagctgctgctgctgctgctgcttgttgttgttgttgttgttgttgttgttgttgctgttgctgttgctgttgctgttgctgttgtgagagagggtatggatgctgctgctgtggctgcccttgtggtcttgagatatttggattcgatagagataactgttgctgttctcccagggttcgaccaagatactgctgcccctttccgaccatcgggtttgacggcggttggtgctgatgctgaggagaatacggaatgttcccgttcgagtaaccatatgcttgttcctgcgagacttgtgatgcatgctgtggttgttgcggtggtggtgctggtgctggtagttgtccagtcgacatgaccctccggccattcggttgaggttgggcagactgttgttgagacggaggaagactactctgaggcccggatggtcgagaaggaccggatctcggaccaccactgccgccgccgccactactactgccacctgcactga

SEQ ID NO: 2524 - DNA, 8116 bp, Xanthophyllomyces dendrorhous
actactgccacctgcactgacgctcgacacgaggggaccggtttgagagcctgaaggatatggtgaaaaaggcgagtgttgttgttgttgttgctgctgctgctgataagtagaaagtcctggttgcatgtagcttggaggtgatgtctgaattgtcagagacatgcaactttattctcctacttcttcttcttcttcttcttcttttttcttctctctctcttctttctatcagtttctccagaccaagacggatgcagtggatgacagaatgaatgtgcagacagagagcgaaagagaaagaatagggttggatggagatgaaccttggtgtctctttgacggactatgggacacttggagagagggaaaaaagaaaaaagataatgctcgcttccttttttccaatgtcgatctctcgtttcccgcccgtcggctcaatgtccgttttcgttcgaatatcgtcaccggactctcttcattcgttttcctcctctccttccgttttttttctccgtggaaggatccatattcagaggaaaatatcaaaaagtacaggatgataattaggacgctcacaaacatatagctatagcaatcgggaaggatcaagaggaagggaaaagaggaggaaacgaaaagaagaaaagaagagaagattactaagcaatatcattcgtggcggcaaatggaccggaccgcacaagggatgacaacaggattcgaggcggagagaagaaccccgaagataagaattatacagtgaagggggagaaatagagaatataaagaacgtatgtctattcaacagaaccgaatcccaaattgaagaaaaaggaaaagaaaggaacatgaggagactccatcttctagtctgaatagaaacacagatcaaactgtgtttgtacatgtgtgtatatatagatgagtgtgtgtgtatgtagtgatgtcaaagacaagaagaattgtgcgtcagaattctgtagtttttctgtcctcgtggaagactcgatcaagaagagaacctcgactgacaatcatcgcttgactccgaggaatcgcagaaggcccgtccctcatggcaacttgtaatagtttgttcaaattatgcgcgaccagataacactcggacaagcgtgcaaatgtatccctgaattgtggttgtattgtttgtttgtttgtattcattttcaataagaaagatacgcaagtccacaagttcatgtaccgttgtcagaccagaaacacccgacagtgagaaaagagagaagaaaaaggaaaaagagaaacatacgagatgtcttggatctgccggtgtagctgggctgcaagctcaacatcggtcatatccattacggctgcgaaccgaagaagcacctgagcggccagaaagtaggagtctgtcaaagggagagtgagagtgagagagaagaagagcaagtcgggtcaggcttctcccgtcaaggatgaaccacaagaagggaagccccgagggagaacgaacggagacagtacgaaggcatgatagtcgggcgcaagacagcagccgataaacaactctgagagatcgactgagcggcagccagacaagcctttcgctgggcgttcgatgatccttggtcgagatgaacgtagtagagaagtagtcgggcactacatacgagaaagaagaagaaaagggcattcactcaatattctccctctgtttcgctagctattgacgccaacaatgaggaagaaatgagagaaaggaggaagagaagaaaacgcactgttcggctagaatcttcccaccaagtaattcgcccatcccccgattgtcactccactgatgttcggggtcagtagaatctaattcgcccaacgccttgacccacgcgtccacatctagctccaaccgacggaacacatccagctgagccggctcggtcaacagagtcccattcggcgaagcaggcgggatcggtggccaaagtgtccggttgaacgagtcgacctttgcaacgaggagggacgaatatacacttatctgaagcaccgtccgggtcatctgacgcgaccacgcaagtcaagaaggagggcgcatgatgagaaggcgggagaacaagggagaatgaagaatccatagcaacacaattgtgaacgatcaaaactaacctctttcagattctgaccgcatgtaaagttgaggtaaacgctcgaacctcgagcggtagaatacgaatgaacgaagagagcgaatcgagcgagctcggctgttcggatccgttcttcccgaatttcttcattctccggcggaggcaagacgtcgacggtgtattctggaagactatagtgcgagcgagggacctacatgggaacaaagtacaggaaacaaacgcagtcaatcggtcagaaactacaggagcctcgaaggcagaccggaaggagaaacacctcgagccgagagggctatagacagaagggaactgactagaccgaagagatcagcccaatgggtggcaagcggagcaaacatatgaaactattggcaagtgagaaagagaaatcgtttggttacaactgttctttcgtttccagaaagcttcacagtgagattcgtctatacctgcgcccagcatccattctgatggtagtacgctgcaagcatgatcgcagctaagatgacaaagcagaaaatatccagcgtatctttgtcagctactcagacgcatatcgactgcactatggacgagtttatccttttctttttttccttttttctttcttcctccaaaggacataccttgggtacaatccaaagcgtaacgttctctttttcttgcgtccgtgtccttgttgggtgtatctgacgtatggaacctacaatacgtcaacgccctcccggccgctgtaatccagccttcggcctctttgtacttggatttgctagtcctgtgggcgaatccacagactgcaagcaccaagcttgggtgcatcgacagaggatcccagggcggaagacgagctcgatgaagaagggagagtccaacttctgattccagggtcgtccgtgagcgaaacggagggtaaagatcagccatcaacgcagtactcgacatgaccagtcggacactgcggatgtgccaaggtaacagagagcaaggaaaggaggctatggtgagacaggttcatgatgttgagaacggacggcaggcgatggctgatacttacgaatgctcgatcacctcaactccgccaactctgtgaatagcctcctcgagagtgaactttggtgacatgccatcgagcagcatgaactcaaaaaggtcgctcggatgctcgtgtttgaacagaccttcttgatgaagactaatgaacggataatgaaggtgctggttcgggacagagcgtggtaacgattggagcgcaggcaataatggtggaaggattgtctttggggatttaagggcatatggccggcgttgagagctcccggccgaagatggatatggttcaaaccaagaaggatgatgagtcgagtatggttgatgagtaaacgaagggagggaagaatgtgggtaacctgtcggaggcggcggtgggtggtggtcgtgttcagaacgggaggcattgcccgacatgatcgacaagctcggtaggtgcatcacttttgattgggatgtttgattcggattcaatcgtgccaagctttgttcgagaagcgaaagcttccgtctgagctccactggaatgtgaaggaggttttatatttaatcatcatcatcgacgacagaacaagaaaatgagtgaaaaggttctcgggcgcagcgatgccggcgaagaacggatgaacgaatgaaacaaacaagataaagaaatatatattcttacgattttcctgttcgagctgtctgtgctccctagtctcgttcggttcgtctttcgatgtgtggttggctggaccgagagaggaagaggaggtagaagatacctcggtagctttcgactttgaattgctcatgtctttcgattcctttttccgagacgtcgcagtcggcggtgtgatcgctcgcttgaatggtccttccagatggtcatacgtgcacagctggtggatttcgtttggatctggcacaggcacaccctctggcaagtttgccagataggatgcttgtactttttcgcatggagaacagatcggtcgtttgctatcacacttgagttttcgcctgagctcgggattaggtcaaacccagagatagggagcatgagcggatgagacggatggcatgaatgatcgtttgcataaatagcacgtacctccgacatcgctgttttccaagtcaatgtgtggttcaggccatagtgaaggtgtatgaaataaagaggcgatcagctgagccggagttcagggcgacacgacaaccagacagagaggaaggatctcatgaaatgacagacgtccagatacaattacagataacggaaacacacgatgcgagaacgcggagaagtaacagaacatgaactcacatgacaggcaaagtttcttctcaacgctattctttctccttttggcttctcaaccaaagaaagatctttgtcagaaccgatgtcgtcgatgctcgtacgggcgctacttaacaactggctggccgcggaagaaagggacgtttgatcggccgatccaaagtgctctgcgaatgacggataagaataagatgatgaggacgacgatgacgaacgaggactcattgcgagtatgtatatatatgtgtgtatgtgtgcgtgtgtgtgtgtatctgtctgtgtaagagagaaggagagaattgccaggagtagaagagagtagcgagaggcgagagagatgggaggaaggcggtttgggccgacaaagacacaaaggctggcaggcagacaactgaagcttgctagctatcgacagactctattctgagatacaccgcacgcagaatagatggggaacgagaggttgacctccaagcgaagaaaagaaagccgtcaaaccgaggaaagtcgaagcgataagactgaagacaagccggaagaacgagaaggaagggaagagaagaacagaaagtgaaagagaaaaaaaacgaagagaggacgtcgagagacttggccgaaaggaatccggatggccggctgatgaaagcaagaaagaatagaaatgagaaaaagaataatgacgagatcatacaaagtaaaagggaagaaaacgaaatcaaaaaagagcgagaagacacggagaaacgagcgaacgagtggacgaacgggtggagagtggaagccgtttgataccggcgatctcgccgagcgccaaaagtatgccaggcagcgagatgttattgaccgacctccgttatccggtccggttgaacgaggaacgaaactttgtttgagggtatcagactgcggtcaggccattcgggatttatgttggtcgttttaaaatttgtagccgttctggtttttctcctctcgtgctctcggcacggatatttggcggattctgtcaggggcggaagctgggccggtcatgggaaggttacatgtcgtgtaaccacacaagggctcttaggtatcaggaagagaagttcaagctctcgaggctgggtaataggatttatagagccaataggattaagtactgaagatgaagcataggggaacatatgcagaggaacaagggaacagaaccaaggatacggaaacatggaagggtagaaatagaagtaacgaagaactcaagatcagaattcccatctagaggggatggagaatgcccgtcttatatatgggtcttggacactatgaacatgatgttatagagcgctgaaagtacagcgtgttgagaccacagtgcactggaagtatagtgcgccatgaataggatgcgctgaaaacaggatgcgctgaaagtatgggaggcaggagtagtagaaatcagaggtctataggtctccgcttgcgagcgaagtgtaactcgggttacatccctaacagatctcgccggataatatccgaagaaaaagaccgtggccgcgcccaaacatataaggtttttcattttttttttgatccgaggacgcagttttctttctatatgacgattctcttcaattttataccttttaaccctaacttatcgcgcttagctatccgattagcggcgaatttccctctgtccaacagacggagagagacaagctcaaaccttaaactccaccaagccatactcacacatacatacaaacaaataaacaaacaaaatatacatgctgaggcttgggctaacgaaaaaactccataagattggttgtttcatctgaattattatcacgtagagtccaaatgaattgagtcttttagaaacatcatccaacaccaacaggccatcgagacatatatctacacaagataaatactatttatacacacgcactcacacgcacccactcactcagaatattaaaaccacgcgacacacgcgcatatagcttgtacaacggatgtaatgacagatgaacaagagggatcccatgtgtaggcatccacacggtgctatctccctctactgatttcatttttcctttctcttggcaaacagaggcagaagtagaaatgaaagaacaaggggcgtagaagaaaaaagaggagaagagaaagaaaaagagcttaataaatcaatcaatcttgggaaaaaaactcgtaatcttttcgggcttcacggccaggttatcctgaatgacagcgttgcctcttgttatcgtagtatccgccgcctttgccgatttcttttttcctttcgatccttttgatgaattcggctacgtccgaacataaaacaaatcccgtccggattaaccgtcgattatctttatgatgatggaaagaagacgaagaaagaacagaacgaatatataggatctcaccttaatgacaacatcctgtatatctccgtcgcctttctcctgctcctgctcctcatcatcatccaagacgatcacctcatcatcctctttcttcaggacaacagtctttgaatctctctcatccagaagatcttctcccgcctttcgtttctcagagcgaatggcatctgtaggttccttctttatcctttcaagaggcgatacccgatcgacccggtccgtttcttgctttcgaaagaaagactcgatcccatcttttcgttcggacaccggacggatgaacgaaggatcttggtttcccactttgcctacttcaacagggaccggatagctaaatgcgaatccgaaaagagtaaaagaaatcccctcaacggaaaaccccgcgcgaagtgaaccaaactgtaaacatagagcaaaaagaaagaagcaagagcgaaggcaaagacagaacagaggcaaggaaacctaccaggctagatcgctttcgttccttccaaatggtttgagcaacacgcccaacgaaccatcccacttgctctgcccaatgtttgatccgggctcacaagccaaccagctgtttatctcttcatctgtccgaagaagacatggcattcttgtatgaagaaatgccaatcggggagacgaccgggttgtaagaatggtgaatgtttgaaagggagtgtccgaaccggtgaatatgcattcgtcccatagaccagcaagcatcaacattgggggctcttcatctgcgccggagccgtggtctgtcttaatgtctgccttggaatcagttggttgtcttccttctttaggagacggtgatggatttcgggtgtagtacggcgctttcgagcctgtgcctctgcctcctttgttgagccattcgtaaaaactatcaaatgatcacctgctcattggtcagtcggttatctgcagaagaaggaaaacgaagatagaggaggcctgaaagaggctacaaaagcgaggagagagcgcaaagaaacaaaggacgaaagcagaaacaagaacaggacagaacgatgaagatcacaataacatcacgtacccttggacaggaataacacatcgtttcgaaggagcgagcgacatccagagggccgaacgttcgctggagtcactattgttgatccattcgttcgcacacacacacacacaca

SEQ ID NO: 2525 - DNA, 8209 bp, Xanthophyllomyces dendrorhous
cgcacacacacacacacacacatatatgttattttatgaatttatgcacaaacaataactcagccaacatcagcaactgattgaacccggtatcaagaacaagctctggggaaagtagcgtgagagaaagagaaggaccgacatgagggtctcacttctggcgttgatggtcttcagaccgtcggcataactaggttgttgtttcgtccagtgaggtactatgccccagttctagttaagcagtatagatcgttcatccagttcggcccaaattgtcgagtagaaacaataaatggatgataaccggaggaagaaaaaaacgtggtccgaggaagtcagagaagagataccgttcaggcgtttaggcgttgggtgttcaaatagaaataataacgtaaagttagttcgggcgagaaaagaaacaataacaaacacaaaaataaacaaaatagaatgagagagagttaaatataattagtcgaccggacaaaccatgactttgagcacgtttgaaccggactctctacggattacagtggcatctgaccgaggcggcacgttgtatctttgtatcatgtataaacgtagatctcacttgtcaaacctctccggactatgaacatttgtctgagagactgaggtgatggcgacaagatctcactcaccttggttggacgcggtcttgttcagtttctgttccccatcgattctgcatgaaacagtcaacaagttgcgattaacaaagatatacaatgtattcaaacagaaccaaagcaaaaccaaagtaaaacaagaacaaagtgagaagaactcagtaaaaggagaagaaagaacagatgatcccaacgagtgatcatcaaggatgttcgagccgagtagggatcgatagagttgataattatatagttagtaagattttagtttccagtttttctcttagttgcttcttcatatactctgctctatctttttctccttgtttccatttttcttctcgcactttatgttttgatacaaacgacgccaagatagaaaagcacctgtctgggaacaaacgtacgatgtctagagaaggatagtgtctttggaaatgagggatatactctgatggctatttagcatatagattatttgttatcaattacgtcgataccatttcatgatcgacaacggagaagacgcgtcgtcattgtcagtctctatagaattgaattcttcttagataatgaaagcaagacaaaaagtaagaagaacttgcagctagtgcctgagcgaatcggccacacatcaggagaaccgaaacggaggatggtgggggctctttgtcaatcggaggaaaaagccagagaaaggacagagaatgggtagatgaggagaaaagagagtcgagaacattcgggacgtcccgaagtcttatgtgaagacgatctttaacatggcgggtaaactaggatatataagggggtgacgaaatggcttgatcggccgctgcgcttcgtttcacgagacattccttcctctttcccttagggacgggccaggcttccctcttgccgattcacacgccgggtcaccttcagggcggcactcagacatcatcgcgcggaaagggctttgggagggacaggagcagggcaccgagcggatcatcaaattcagcgatcgatcactctatgatttcaaacactgttccctttccttcacatatactgcagagttctctcctctcgttccgcccatggcctccagccgcacgagcgatttccgctcggacccagtttgcgtgttcccgatgatgcggcttctttcttcgtagctcttcggtctttaaaacgaatatagcattcattttttaatcccttctgtttcacttggcctcctttccttcttcccatcctcatatcttgaacttgccttcagcactgtgatctagctctttatttccttcaacacttcccgttcggtcgactcgttctttacccactatacttctctcggctcattcattctggcgtttgcgatttcattcgtctcgctcggtctctcttgaaatcgtttttagggatactcttaaagaaatcagaagaaaggatattttcatttgaacttgtgttctttgccttcttctcttcatccaccaccacctcattcttatctctgttgtgttcccatgtcgaaggattcctcccacgctctcttgtcgcctccaatgactcctccagccatccccaatcagaaccaacctccgttgaccgtcgatactgtcgttgggcctcatgatcagcccggcggtgggcatcctcttacccgtcacacccacaaagctcccaacacaccggatgtctctcatctcgattttacagattcgttcttttccggtaatcccagagcctttcctcagtctccccagcgaacgaaccgacagtcggacgatgaaggttcggacgatgcgctcgttttgatgccctcaaggaaacactcgttcaaggcgacttcgcccgcgggacaaaccaagtcccaggcgacgtacttcaccccggccagtcctaacaaggactttgggccgttcagtttcgcggaaaaaaagcgtaccgagagacttggttctgaactggttagtttttcattcttcgagtgcttttttaaaataaaataaaaacttatttttttttgctatcatgactattgttgatcatcggttatgtatcccaacctcatagccgctatcgatggcaggtcatttcagtcgaaaccaccgaacgccgttttcaacattcatctctagaaaatacaggaggatccttctcgttgccgccgtcatctttgcgtttatgtacgtatcatatttccttccttggcaaaacattggcgatggcgcctttgatgtatctattcacgcctgacactcttcttccctacagctttgtcttccgagctcatcaggcgtctaactcgtctcgaacgatcttacctctccgaattccgttctccgagaggaccaggctagctccgatatcggccgcagcgttacggaagagaccaggatcggaggcaaatagatccaagcagtcgcagcagcagtcaaccaacgagaagtacatctggaagaagaatgaagagctcgccggtctcatcgaggtgtgtatcttatagggttctccctttctgtgtgtcgtatctctagcatcgactgatagagatcatcctcgcatgtttcatagtaccttgcctcagcaccgacggagcatgccttgcccccaagtgttgataggacggtcgatgccgagttggttcttgattttgaccccctcctaacggctgatccggaccgagcgatgagagagatggtggagaccgtatggcgggaacgagtagtagtgttgctcggtaaaggctacggaaaccctcgaacgaaggctatccaggcgacactccaagacatgaacgtcatccctgctcctgtcgtcatcgaggtcgaccgacgaggtgtgtcttgctttcatataactagcccaaccaacatcgcctgaccccgttttgtgcacccttttctccttctcctttttacagccgactctgaccagttagtcccggtgttgtcccggttggtagacacctctatcgacgagttcccagtcctcctcgttggtggcaagatgatgcacagagccgattttgaagagagtcgacttcgaacgttgatctccaacgccggtggttctttccgagccgtcaagaagaagaagggcaagaagtaatggtcttcattccctttgcctttttctttgcccttctgttttcttccttcttgctctctcttcattcttctagtggtgcttgccgtatctctccttcttatttcggatttcttttcaatctaaacaattccattcaatcattcccgtcttgctttcaccttctctatcttcctgttctggatctatttgtttgcttttcttttcgacgttatctgctctatagatgttgactttgctcgaagtcgttctccttctcatctcgcgtttgttgtcttcctgttccttcatctctctccctttcgaccccatcttttttccatatctatctttggaatcaattcattccatgttgttccatcttgatattcagtatatctctttattctgttctgttctgttcttgattcgtccttttgttcttcaaggttcaacgtgaaggacatcaatatagaatcgcaaatgcaaacaacgacaaacaaaaagacgtggacaaaagaaagagaaaagagagaacaaagatgagggtgacgagagcgagaaggagaggctgaaagggaggggacgaagacgtgactaagcagggatgatgctgatgatgaaagagaggtaaacaaaaggaaggaagcgagaagagttgaggaggcgacgcaactctttaactaattggaggagggaaggaaatggaagcaaaggaaagaagagaaggaaaggacagaaagtaagaggatgaatcgattggtgaaccgttcaagcaaggatatacaatgtaccactgatcaacagagaaatcactattaaaatcaaatagaaggaaatttggggatcaagggattttttccgagaatattcgtctttttttttcgtcacccttgtgttccttacttctcttactcttgctgtttttccttcaaatcgtatcagacgagtcctctgctcaaaactcgaaaagaagcgaaggaacaaagaactggaccaggaaaaaaagacccagaatagcaatattttaggaaacacacgcccaagctcatagtgtcagaactgagcgaacccgactcaacttcaggagaagtctcgacgtcaacgacaatcaacccgttcggcctgcctcttcttactcgaccacctcctctgtatcgcggggtgttcactcatcctacccagacgatcccggccggtcagacgatcgaggtgtcaccggtgctcgtgcttgaacctgatgaatgggagaaccatggaagaaagacagtgctagatcattacgcgtttgtttggggtaggacaggcaggatggctgtcgcgcttggcctgggtgagtctctgacaactttttctttctacataaggatccgaacggagagagccaaacggacttgaaccacggagaaagtgtaagaaaaacaaaaacggataaacgccgctgagaacctcaccatgacgtttatctccttcatttttgtcttctctctaggctcgctgtttaaccactcccctacgccgaacgtgtccttcattcgttcgatggaatcgtccaccattcgatacatcacctgtgtaagtctattctctcattccctcacatttgttttgcacgtgaaggaaccaagttgctgacaagacctgtggagaccttgctttggtttgaaaatatacttccgtgtctttattcatgtaagaaaacgatcccaccatcgaccgagctgactataaactatggcccagaagatgcgctctggtttgagccagtgtattcgtctgaatcatcaccaccgtcttcttccgattgtacaaattctatagagcgcaaagagggcgggggaagagtacggggtcgagtgtaggttcgccaaaagacgaattcctcgcgttcctatccataggagaggagcaggaggaggagcgtcggcagcagcagggtggacaacagaagtgcgctagatgatgcagtcaacgagtcaacgagtcaacgagtcaacgacaaaaaagcttaatcatcctatacccttcatcttatacgcacgtacgtacatacatagacacacatgtacgcacaccttatacattgttaagcataaaacacggatcatctccgatcggaagtatccgaccagctcggcatgtttgtctgcagatcgagagcggtccggtttcgagcgaacacagtgtctccattggggatgagctctcttcactctctgctacttcagactttgctggggagagcagagggaaagggacaaggcacagaacggacatggggcggacgagcggttaaaccgtaaccaagaatgcaagacgctggttacataggcacataaggtatgcatacattatcagctgaccggtaggactcctcgactgtacgcttagagaagaggatagttgaaaaaacgatatttaaataatcttttgggcatgacacattcaggtccgtttttgccggccctaacgcacccaaccgggcccggaccgattctctcacttgaagaggtcatccgggcagacgacaatgcgcagatcgtgtgggccacactctccacagggcctggaacgttggctatggttacgacccaagcaaccagagacctatgcgtatcattcgggttgacgccatctctatgtgtgtctccgagcttgtcccttctcgctttctcttgctcacaccgctttctgccttactcctctcactcccttgtttccatcttgtgttcctttgtagccttcttgtctttctttaccccttcggccttttctctgctctcctgccttccatcatctcgaaagtccttcgtttacaacgctcgcatattacatatcaacaaacgctctgttcattagtcggtcatataatcctattcttaaaaagtaaggataagagaaggaacagaaagagaaaggagagcaggaacactcaagagaacatacgaggttacatactcatattcgtcgatcgtcgatctattcatcgcttgaagcatggtgagtgtctgtgtcgacctctaaccctttttccagttccacccacctgactttgctcgcccatacccagacctcgacctcgacctcaattcttgcccagctgctgttcaagcacaagcaaaagacatcgaaatctctggacctgtcgtccacaccgacggtcatattgtcacccaccgctgcctcgacatcatcttctctctcctcggtcactactagtcctccttcgacctggaggaggcctggtcggatggactaccgtagggaatctgaagacgaaaaccgaagagggcggtcaggtgaagttaaacttctccgattcgcttttgtaagttctcagaacagtctttacttcactttttctccttgtctgtggttatatgcgccgtgaagtttctccgagttacccatcttatcatagattgaacaatttcctcctttttcgtttcctctttctttccttgtattcctccctgtaccccctcccacttgtctacgctcgttcgtgctcgctcacgattgctgcttgctcagccgacagcagaacaaccaacgaggcttcgatcatcatccctcgttcactacgatcaaccaattgttcctcagtcaacacccgcttcctcccggacctctcaggaacaattccgaatagagatcgtccccgtatcgggctcgccttcacccgcgcctacacccgtgtgcgcttcacctctctacccaatatctccccttctaccggagagtttgccagaaatcgatgatcaccatcatcaaccggccacacactcttacaggtactcgtcgacatcgtccagagattcctgcacctcagcatcgtctactagtcttctcgaacgagacgacctgtttgattctggggacgatcagatggattatctcatggaggtagacgaagactctcggatggacattgaggaatccaacttgagtgtgtctcctactctttgtcatctcaacctgccctcgtactcatttgctaatcctacccgtccacctatcaaacagactttgacccttctactgcatataccaaaaagagcgctctgcccgagctcaaagatacacacgccggattgctaagatctcctcagagtagaccgaccgaaaagaatcagctcaggcgagtctcatggtggacccattcgtagtcttttccttctctgtcttgtgtgacttatgcattcctctctacaagttccttcctttcttcgctccttgttccatattgccgtctgtacaacatttcctttctcttgcatccgtctcgacaacccccatttgctgtctcgtcgtgttctgaacattctttacctttcttttattgtcatctgtcacccccttcatccatcacccgaggctcacttgtgttgtaatcgtaacacaaatccatctctgctcatgttttgtatttacttccccaccgctctgttgctcaaccaccttttgtacagagt

SEQ ID NO: 2526 - DNA, 74334 bp, Xanthophyllomyces dendrorhous
  misc_feature (45810)..(45819): n is a, c, g, or t
cattggtagatgaacatgatgcatttggatctgctgatctggggggtgggaagaatgccggtatataattcacacgcaagatttcactgattttcagcggtgcttgttgaatttcaggaaaccgtcctcttgctgttaattcgtctgtccctgcctatcagttgtttctctcactttcttaatccttcatcctttacacatccttagacagacggaccgtgaagccaagaagttcagaagggaagacaaaccggacaagaatccgcagagaagagatcaagaacatcaattgcaatagggacaacaggaattttaaccaaaaacaatgtcgttcttttcgcctgttagatcggtctcgagaagggtctttgggaatcgtacgtacactatcttcatcatgactgctctgtttctcttcttctattctctctgttctctttccgttcagtacggcttgggaagagaaagagcttcagcatttctggttgaatggaatctagaactttgggtgcgattgtacagacgctaacttttcatccttctcctttttcttttttctattctttttctttcctctcggaacgacaaaaaacctctttcaaaccccaaaaacactcgaacgcgattcaaacgaatacggttataacgaaacagagattcagctagccagacaggttcatgcatccgcatctatctccgcccaatcgacgaacccttccttacctgtagactcaaacaacacccgaccttccaacaccaatgccagtgtcggttctccttcaggggtgaacgctgagccggtagtaggaaatgagacggatacgatcatatcggatagtctggatggggcggtctctggggacagaccggctggttctcaacaacaggggcagagacagaaggaggaggatctgccagaatggcaagtcaagagagcaggacagtatgaggatcgagagatctgtgagattcctttctttctttcttctttcctttgtttgcatttcatcttgttcctatagctgattctctattcctccctctctttggcaaaataaaaataaaaacaaaaaacaaataagataaaacaatgagatcgtttggttctttccagacggattcgacctggcacccgacccattcactttccaaaccgatcaccgcgtatcaagctacggtttcccaccttgtcgccgccgggactcatatgggacactcacctcatctaaccagaccgtcctaccaatcctatctcgccggcagacgatctgggatagatatcattaatctcgagcacacattgccttcgctgagaaaagcttgtggtgtagtaagagatatcgctagggatgacggagtgatcgtctttgtaggcaagaaaaagattacgaaaggggcggtcataaaggcggtagagaggatgccgggggttgctcacgcggtcaccgaacgttggagacctggaacattgacaaacgctcattctatgtaagtttcgccgcctttgtttctgcttttgcgtctggtgataaagacttattgggtttcttcctatattttctttcccttctgcctaaagcttcggagcggaatcagttatctctggagcatacctaccagatctgatcgtcgtgctcgatccgagaaacatggttcatatcattaatgaagccaacaacaagaacatccctaccttgggtgagtttgggattagctaaggaagttgaacgcgaagaaagacaaaatgaactaactcgggccaactgacaaattccgggactcgccgaactattcttttgaatccacttaggtctggtcgattcggatgtggaccctcgattggtgacaattccgatatacacaaacattgacgttcgtatcttttcaccctttatttttttcctctttcttttcatttctcacttgtatacaggcatatctaaaaacacccatgttataacttgttttgtttgggtttagtcggcccgatcgatagaactcatcttgggcgctcttggccgagcaggtcaagatggtatcaaagaacgtaacggagagaagccaggatcaaggttcttgttgccccatcatcgattccaggccaagatcgataggaagcgagaattcgataatgtggagcagccaatcgattgggatcaataaactcctcaagtgtcggtcttctccttcgcgagtgggcaagttgactggttctaagaatgtgagattgtgggaagtagaaaaggaaacagaggtggattataatgcattggtttccatcctttttttccaaaaaatctggatctttgtcctgtctcctttggtgtttggtcgagggactcttctcttaagcgtcgagaaggggaacagagaggatagttgctgttgatacacccattatacatacattttgtgtgagaaaaaagaaaaggggaagggatgtgggaaaaagtataagggaggaaagggagacctctgaaggattgcaacctttcgaggacatctaaaagtccatgtctcccatgtagcccacttcctgtacgcccgacggcccgtttccccagccgcccacatcgtacgctccagcttgaccaaccagacttgctgagctaacaccaccaccactaccgacacccatactaccacctgcgccgatagttccaccagttctaacctccaagtccaccctggccttctcggccttcagctgttccttcaccttcgtcacggtagcgagaagggaggtgcacgcctgacgaagggcgacgacaggcgtagaccgagctgtcgtttgaatcttgagcagaaagtaaggctcgagtggatggggaactttgtaacctgcaaacagcacttccgagtttgccagcagttgtcttttttttttttcggtttgaacgcatttttgagtggccgtatccggttgtgagtgtgattcagagggaaagacaaagaagaaaaaaagaaggattggtgaggtctagaatcggacgcgaaaaagaagaacgacgcaccctcgaatcatattagccagagtgtggtcctgcttagtgatcctcaccgtcgctgcattcgggatctttgtgtcttccgtcacgtccagactgattcagagcaagcgagagaaagatgacgacaaggagagcaaagaaagaagagcgagacagaggatcagtatcaggtctggaagaaaggattggaaacaattagaaacaaccagcgtaagaatgatacatacagacgttcaccatcttctgtactcaaccaccagtgctccgtcctgttcggtgtgtttgtttcgttggctgaaacggcaggcatggctggtctatgagagatctcgttggtgcgtgttggaagatggatggacggagagggaaccaaaggtagaagagttgagcacgaggtttggccttaatcaatacttaatcaaatcaaataaattcaagtatccatcttgttgcctcgaccaatctcgtttggtttaaacgtctaaccttctcctacaaacattcttgaaccttacactttgtctcttcctcatcattcagcatggctcaccttcgatcctgtaagttctgggtattagatgaggtactgtgtggatgtatgagtgtttatgttcttgttttcgttcttgtgtggatactaccggggtaattatctggcccattccatctctcgcttctagtagccgctgctcctctaggccgttcagccatccctttcaaaccaatcagcctatcccaagtgagtctctctgattttactactacatagatgtccgataacagtttgggagagagaacaaacgctgatgctctcgttcacatcattttgcatcgatcgcgttgtctccggggccccctcctttattgctcatcgcttctcacctctgccctcctgccaaaatatagagaggtatcttcgatgtgatcgttaagaaaaattctggaaaggtttgttgattctagttcgattgtcctacttgccaaatttcgccttgggtcttccagaagcgacccacatgtttccttcttttatctattcatcgggagatggccgatccgacaaggtccgtaggaaaccgatgttctgacgtctctttttacccatctttcgtcctcagcccatcatccgatatggaaccggaggtcgctcgtcagtatctggccatacggctacagtattcggagcttctggatttttgggacgatacgttgtctccaagctgggtatgccatttcctacctcgcccgaagggaactacagctcatcacgacaatcatctcttccttttgcatcctcttctttggtccgtttcactttatagcgaaggctggtactcaggtcatcgttccttatcgtgatgctgatgaagtacgctttctccgagttactggcgatctcggtcagatcgtcccgatggtacaactttccgtcctgtctcttgcgtttgcgtcaatgtactaaaagtatacgtttctaaccggatatcactacacctatgcggttttgtgcaaacaggagtgggatattcgaaagcctcaccaaattgaagaatgtctcagacattctgacgtggtgtacaacttggtcggcagagactgggagaccaggtttgttcgggtcatccgtagttttatgctggattgaacttgagagccggatgttggggctcattcgtttttcgcattgttttcgagcaggaacaataaatttgacgatatctttgccactgggccaggagagatcgctcgaattgctaaagagaacaacgtcgatcgattcattcatgtctcgcatctgaacgctgatcttaattctccttccagcttttatcgggtgcgtgttttcaagtaacctccaggagtacaacttgatctcttatctctgttaagtgtgcccttgaatcatcttctaggctaaagccaaaggagaactcttagtcagagaggctttcccggatgcgactatcgtccgaccgtctggcgttttcgggttcgaggatcgtctactcaaccaggctgcacgtgagtgttcggtcatataacatccacatgcggcttggaagaaccactggtttatatttgtcaactctttctttttctctcaggatggcctttcctttggtgccaaaatggtggaaagactcagattcggccggtccatgtatgtgattcttctcttgtctgtttggattaccgaagatggttggtgtagctgatcctttttcatacctcagttcaccaacctgtctcatgcactagtgaacctgatggatgccgaccactcgtcccctggtttgacactcagtctgcctgggcccaagacgtacactaatggccaactacttgaaaccattcgaacgttcaccctcaagaacccatcgctccttgaggtctcccttcccaaggctccgcttcagtttgtggccggaatcacgaacagggtactatggtggccgttcatggacagagataagatcgagcgagcgtacatcaacgacttgacggatgctgatatccgaatagccaagcagggtttgagcgcggccgacagttggagggtttgcgggttcgagcttgatcagctagatacaattgaggagcatgcaattaagtatctgaggatataccgaccctagtaagtcttcacttctgtatcatcactcaataaggttgctcctccttttattgacgcggtttgatggggtcacccgtttcctcttcgctcctacagtgacagggttgttgaaccttcgaccgttggatccgtctacaagaaccaaaagaacaaggcctacaaagtcatcgagtaaaagaagctttgatcttgcatcgtctacttttttctttccccctcgtgtgccactatattttctgccttgttgttttttcttttcttttcttttctttccaattcttcccaaccatcttgttgttcttcttttcaccgttgtcatcttctactgttccttgttgtcttttttccccttctgttcagacaatccttctttctcttcccttgtgttggttgtaaaagttgttgagatgcgatgtttcccttgtatgctccggtgactaaccaccgacgttctacatgaagcttctcgaaagaaaaagagggatcttgattttgatcaatctttggaaagatctaccatctactctccaaagaatctgcatcgcccaacgaataggaatgtccggccgatacgttgatctcccccgacatgactttttccaatcagacgaaacgttctcgctctcgatctacgtgaagaacttgaagccggaggatgtgtctgttgcgttcagagagcgatccgttcgtttttgagcttcctcttccccttgacgcgtcatgcttgttcgacaaagaaggaaaagactgatatctcaaacgtctctttttttcttttgaatggatatgttgggggcgaaaggactgatttagatcaagttgattcttggaaaggacacgtacgatttaaacccgctctcacatgggatcgaccctgaacggtcgagcttcagagttgtgtccgtcaaggtcgaattgacgttggcaaagctcgataagggagtcagatggttggatttagtaggtgacgaagctgtcactcgtacgtccatcttccttttgttgggaccctgctcgtcggtgcttgaagtgaggaaacaattgtctgtatagctgactggttacttgatttgggatcctgggaatataccaaaacgggacatgaatagacatgtcggcaagtaaaccgaacgagcgatcgtcgagtgtcaaccctgcaaacaagccgaagaaggattggtcaagagtcgtcgacgaagagatggagagtttgaagaaagcagacggcgccactgttcgtgctttctcttcttctttgattggatctactttctggaggtctccccaatttgactgatacaaaatctgacctggcacacatttactgaaaacaggaagagtcagacgtgaacgaactctttaggagcatatatgctaatgcggatgaagattcaagaaaggcaatgatcaaatccatgcaggagagtgggggtacggtgtttcctttttcccttttcctctctttcttgtgttccaaagctgagcgcgcgattgtgtttcaaatccttacaataaccgacccgcatacgtatacgcacacaggaacaacgctctcgacaaactggaaagatataggatcaaagaagaccatggtcacgcctccagaagggatgatcgctaaaaagtgggagcagtaaatggggtgatcccagagcctgagctgtggattgtgaggatatgtatgagatttcattggtatcgttcgtgcgctccttctcaagttgagattaaagttcagagtgaaaggagaggtaggaaagctagatagcagggcacaaggggcagaaagaaagatatgaagtacatgcgatgatacagttgatgtacaatgaagcaacccaactcgacccgacctgagctgacctaacccctgggttgacattactaagggtgttctcattccgactcttcatcttcttcatcctcaccttcgccttcttcactagaggccatcgctcgagcggcctctgtctgcttcttggactttttcccaccccggcctgtcttctggtctggcccgccgctgctttctactgggtccggcacggtctgattcaagaatcgtattcgacgcaagggtatgtcagaaccaggaagtgaatgaagaaagtaacgaccgggaaggagagagatgtgttgagaaggagatgcagagacgaacggaagcagtatcgaccaggaaatcaaacatgggcgagttcatgattgtccgttttctagcaggcccaaacccccaggatcgatgaaaacagaaggagaatgaggacccaagtgtaaggaaaaggaaaaggtgttcagtcagagaagaatgccgacaaaacaggaaagatgaaagaagagcaaggagaggaggttgaaaaggacagacagatggtagggcatgagtttctttcctttcgtcttggaagcttcttccgacgcggcagagacaagggaagccatgaaaagttcgagcgcctttgctgttgttcgaaaggagagagcccgggcattaaaaaaataagtaagaacgatagacatacgtgcatacgacgagagcatagaaggccttacacactagaacaggcgtggccatagcaaccttgccgacgtcctcatctgtctgcatgatcttttttatcctggcctgaaggagaaagagacgagccgaggtcagcaagacaagctcgaggcgtaggtgagtacaaaggagaagaggagagaaccaaccaccggaaactagaggaaagaagagaaagaaagataaagaagaacgacgcgtcagcaaggaatgatccgaaggaaggaacatgcactggtcaagaacgggccagacctttgtctgctttgttttcttcatgagttgaatggtcggaatcgtgccgggcagactcaaaggagagtctctttgtgtgttgtttgaagagaagagctcggagagaaggagggacgacggaaacacacgcagaggcttgatgggtgggtgttggatgtgagcggaggaaagacggctcaaaagaaaaaaactacaaaattcgccaaagttttctagtattttctctatatttcctacctgccttggttcatctctttgttctgttcttctctgcctacgagttctctctttgctcttgcatgtcttgcactcatttctgtctgtctcactgctggtgtgtgctgaaggtttcgtgtgatatcaagagatccagcagttggttgaattgagctatgtctactcatacatcaatggtagtctggtcgggcgcgatctcaattttaccaaaatatcctgcaaggccgttgtcggtttgttctcgggtatcgacagagacgtgcacatactcacaaaacgttctttgctcgtcattcttatccttgtactccaagaaatgaggagaggaaaggaagaaaaagagcgagcagaagccatgtggacgcgtcgagaaaatcaaaaagaagccgacgcgtttccgttgggagccaaaaagttcattcccacacatacaccctgcacctcgtccatccatcctcgaacgatcacacccaccttcccatacactcacgtttgcaatgggccgatcagcaaagcttatgaagaggccgtgagtctattgacttttgttcttgtttttttttgtacatccactctgttctaccttactcttccactgaacgaatcttccttggttcggctgtgttcggctcgatttgatttggctcggctgataggacgaagaaagagaaggatgtgaagaagacggtgtcgagtgcaagcaaggcgattgctgctcctccagtcccgatctcaagagctcctcctcagcaggctcaggcggctaaccccgctgcgaagcgaaggaagacattgagggcgaaagccgagaaggtgggtttatctcagtttctttttttcttttctcttctttacagtcatgctctctttcaacttttgcccgtgtctgccgtccagtgactaaaaaccaggcaatacagaaaacttgaattgaataaatagcaagaaaaaaacatgtagaaataaagaagaggagcgaaagacgagaagcgagattgaatgagatatgacgagatatgatgagaagaagattgattgatggattagaataagctttcatttcaagacgaagacatctcgactcgtcctctcaaaagagtgagaagaagaaaaagaaaaagaaaaagaaaaagaaaaagaaaaagaaagagaaaattaagaaagccagatcgagaacttgaacatgaactcttggcaacctgatgtgctggcccggccgaaccaaagatccgagatcgcaaaggttacaacagcatcgctcatgcgcacaccacaacaagagccgatggatacaccaacggcaagcgaacggaagcaacgggtagaaagaaaaaggaggagaacggaatccttacagcgcttttttttagacggagaattttcataattattttcttattttcttattttcttattttcttttcttttcttttccgaaatagaaggaaaaaaaaaacccatggatttttccctggaacttcatcacctcttctccgtccatccctcacttccgcctgtctcttgaccttgggtcgatgtgaagaatatgaaccggtcaaagtcgtccgcacagatggacagcccatcgggatcactctttccgccgttgtcggctagtgtagagaaaggttcgtctattgttttggctccggccgggtgaccggagccggttatccagaccgaccgacttcaagattcggtggatcatcctctccgtttcttatcctctgccgatatgttagattcatcttcgaccacatcgactggcagtgccaccaccggtgctgcctccactgtgggttcgatgaaacagatgtcgattaaacaaaagccaggctcgaacgcaaacgcgagtggaaacggtagcggcaatggaacgtcgactaccggaaagtctggaccgttaacgattaggaagcagaacgtggtatgttctggccatctcactttacatatcctctctatcttcttctttcctcttcttggatggttttcttcaattgtctgaatcattcctcgtcctcttccctgtctggtccatgtggtctttccgcttggctcggtttcggtctggatcttcgggctcatccgttggatacatgggttactaggcgtgtgatgcgtgcagacgctcaaaggtttggcctgatttcatctcacttttttttcctctccttttgttgctcaactccttcgcttcccggatcaagtgatcgagccggccagaacggaggatcatcgagagcgattcgaaaaaaaagaagaatgtttggttgacgtgttcccttgttctctgttgcccttcatggactttgcatctttatttcaatttcattttcaccacaacccctcaaaacttgaaagatccgttgtgtccggaccgcgggagtcgacaaagtgagtgatcatctgaaatgtttcaatcgagaaatgttggctcatcaacatgcttcttatctcttttcttctttactcctactactttgaattcgtatggtcgtgtgggtatgtgcctgtggatggggtctcgcacgggtatagtgtgacatgtgtatgtcaaagaatgtggtgtgcacgtaagttctacatatccttggcccgtctttctactctgatccaacaattttatcttgccgcgcgcttatttcctccttcttcttcctcttcttcctcttcttcctcttcttgatcctcctccagagctcactatgtcacatcattggcggcgaaggaacggaaaaagtcaagcgggcaatcagcaccaaaacaaagagcgtccacagaaaatcttggacaggatctttcagtacatcagaaacaaaagaaacgaaaagcaaccgaggccgtccacagcgaaggcgaggacaatgaagaggacgatgggttcgtcctttgcctatctattcatggacgcgagccttcttcgcagagcccatagctcatgtcacatatccctttcttatcctttctcgctcacagatcctcagattcacaaacagagcatgcgttcaaaaaccagtctgtcttgcattctaaatcagttcctccgcagaacccgtttccatcggaatcatacgcctcttcctccggtgttgtccatcctccctccgtcttgtacccttccaatcgatatccacagccacgccctcagccacactctcaaccagttttccaaccaacagctttcacctcgtcttcatcatcttctttgcctccaactacagcaacattggaggcatcaaatataccaagtctctctgcaaactttgattcctctcgtcacctctctgataaccttcaattcatcccaaccaccaccacctcctccttttcctcttccaaaagaactcactctatgcatccgcctgcatctggttcaagtcagctctcccatccgaattgcgcaatctctgttcctccctcaccgctgtcaatatcgacagctgccaccgtgtcccctattactactatgccagcatcagtccgattaccacaatcgatggtcaacttgttgctttacatgttctcacccacccaggttaccgattcggaacttgactactcggatagcatggcggccagtctgtcgacaaagacggcacagctcctcaaagataagccgacgaaagctcatctttccctgaacgatccggcgctaagaatagagtgagtgcctttgctctctttgaccactctttctgtcttgcatctttccttcgttgttggatttgacatgcttcctttcgtcgttctgcttcccttctacccgaaacttcctccttgaactacccagactggcaaaagatctggtggagtcttacatcatgatagtccaaatcagggtaccactcatcgaccccgagttcatccggtctcagctcgatccggacgagtcaaacaaacattcatcaaacgtgttgatggctgtcgtcttggcttatggagcaaagttttccgaacatcagatcattatcgatggcaagttattactttttttaaaaaataaatcttcatggacgtgatttatggactggatcacggacataggtttgaatatgagataggaaaatcgatcatagtgttgacttcgcttgatgggtgtcaaccgggtttataaagatcgagaagagacgacgttgatgaatgcccagagagatgggagagagaccggtcggatgaaaagtcgactcgtcagtctactcacagccagagcacaggaagtcttggaaacccatcggatttacagggtcgcttcgttggagaacgttcaggcggcgctgttgatggaaggtttagtaaacagtgagcccttttctctccacatagccctcatcatccgttcatccgtccttgttatgtttctgatcgggtctcgatcgaatccatcattgctcatctgacgacgtttttgtctatcttatttggcactaaagtaaaaccggtggcattaaacaaggagaacaaagcacagacgagactgttttggacgtcggttgccgtccaacatttgaccaaacttcgatgcaatcataaaaagacagtcgttgcccttcaaagcgaattcatgcgaggaggttagtttccagttttctcttgcgtttcattctcgttctgcttcattgaccgatcctttttgttcctggccttgttctttttctctcttggtcagccgtcacgattgcttggtggtcagtttgttttggtgatgcttggcatgcaacctattggcgaaccaagccatatctgtatgtttcttctttcttttttcttttgaatttgatctggaatatcatcgtttccatcattctaaatacaacccgtttgtttggttgtttcggtgatgtccatacatttgtgatcttgggtgcgtgggagagtagacaggacctggattacaataatcatccggtgtcgctctcagataccgaaccggcatcgacgcatccgatagaaccacatgtaggttttcttcttcttttgaatacccatcctcggtccgtactctccgtcgttgtactcaactaactcaatgtcaatctcaatatgtgttctcgaatgcaaaagcaccatgttttatatcacgctacacatgctctctcacagatctgtcgtcagatgtatcttgacctgtttacacccgacaaagaacaaaagggaatcccattagatgctattcaaaaactaatcagttctcttcaaaactggaggtcaagcttcctgagtaaagtaggcgttccgggcggttggccggacagttgggattttgtagccgccgtcttggcttgtaagttccaatcatgccctttcggtatccttccttgaacgacaagacttttagggaagtcaagtctgaagcggcgtctttttcttccttctttcttatgataggctttctcgattccagctatcatgtgtatgtgttgtttctgataaggtcgtgatgagaaaaactccacgcagtgcttacacttgccggcaattattcccttgcacacatttgtagtctttggatccgtctgtatgttgccacctgttcgctctcttcattcgtatacaaagcacgcactcatacatcgacgatcctctctcttcccaacatttttcttcagtatccgagcggtcgaagatttcggaatcagagaggaacttcacgccaagcagatcggggtcctatcagacccaaccattcaggtcattcgggcaatgctttcgtcagagactatgcatgctgctaatcgaatctctgctttggtgagtatattctgcgtgtttgtactaccgttacttacttgcttatcgcctttcatttgaactctttcttttcttttcaagtcggccgttttatctcaaaacggatacctccgtctggacccaaatgtgctccatcatccgatcgtcgaagcaggtatctatctagcgcaacacggttatccttcttttcaatcttgcgtgactggactaagacagtacggaatgtcctacgatgagtgctacgacgaggcggacatgatcgtaggaatgtacgagcgcgcaattagacaaaagccaataacagatgatgacaacagcaggaaggagcgggcgccggaggatctagagttattgacagatcatgtatcaagcttggtacgcctatgtctccttcacttctctatgctttgtctatcatccattatctcccatgcatctgttctcggctgatcctctcattcggggccttgctggaagtagaagcctagacaggatgttgtggtcgacgacagcatgctctccgaccggactatccagtactttactggccattcaagtttggttcgatctgacaagttcatcgaaaccccggacgggtcgattgaacccgaggctagacaaaccagagtctatttaaacacagatccgaagctgtatgcccaatcttatacccaatcccagtcccagttccaatcaagtcccatccaagaactgtacaatccggtttctcagactcgggctcagatccaacctcgagctttgtctccctctcggtcgcaaacccagactcattctcaacccgtaagccagcaggccccatcactctcatctcgctcgttccagagctcgtatccccgtccaccatcatcgttgaacgggctctattagagaacggcgtgttcgtgtatacatcttaaaaaaaagaccaatatctttgctttctcttgtcctttcctttctacgatatctttatgtttatatagtctatgctttttaaggccttttcttcgtccttctaatgatccttcttcgatactcgtatccgtacacgcacgattgtatgttcccttctctccagttgctttcgtaccctgtgctgaacgagatgccggtcagcatggcgcagtcggtttcttggcagagctcggcccggtgacgttaactggccatcaactccatcatctctttctttaatcgtcacatacagccatcgccaccgactctcaacaacgaccatgctaaagaaactcatccggaaggcctcgttgtcttcaagctcatccgatcaagccgataatcatcgtcgacgatcccaatcgtcggtcatcagctcgggtggcatcccagaatcaaccactcagcgatacgctcctcccactggtcttcctcccccttcgtataacaactcggtagatgtatcatctggatcgtcaaggtccgttcagaacccgttcgaatcagacattactaagccagtcgagcagagacccattgcgcttgccgaaggagaggaagatccgttcgatgtaggttgtcgagcgtctacctatatatatatttcatatggcggctatgaacctttggtttttttttaactgatttctctgcactctggcttggatataattcacagtttttgaaaaggtttgataccgtctttttgatcgatgactcaggatccatggctggaggagtgagctttctattttcgtccagtaattcacgttcatctgtctgtccgtctgaccatatcatctctgtttgtgttctcttcaatgttctcaacaaaaagagatggagagaatgtagagatgctctggcaagcgtggtctcgttagtcatccattggtctctcttcttatgtttcgcgctctctgacatcaacttttatttctcatatccactctctccttctcccactatacagcactgccgctagatacgatgacgacgggttggacgttcactttctcaactcggctcggatcggtcacaatctaaagagcccagcccaagtgctcgccttgtttgaaagcgtcagccctagaggaggaactcctacggggacccggttagagaagctgctgaacgatcacatcagtctgttggaacgttcggctagggatggaaagtcggaggaaatcaaacctctgaacctggtcgtcttaacggatggggagccgactgatgatccaaggagcgtcatcatcgctgccgccaaggttggtctcttgttcgaactctactttctttccctgtgtcgcctataccaaacctcgctgtcgaacatagctgatgcctcatcgtcggacgtgatctacggcaccggaccatgtgtcctttggcagaggttagatagggggaactttccattagctgctcttggcatctttttccttcagatcggtaacgatgccaaagctaccgaagcattaaacgaactagatgatgatctaggatccgatatcagagacatcgtcgacacctgcccttacaaagcagggcagagactcgaccagggttacatcgagaaggtcttgatgggtggggtgaatcgtcggttggataggaagaaagtctgaagaatttcattcccctctccttcttctccctctctcttgtttttcgatttctcttcgctctcttggtatttcctttgtttcccttccatgctcttctgcctctattcataatgttagtgcggtttctacgccttcctatactcttctaatcaagccattacaagctaattctggttgctattctcttgaattgatatatcgatcgacagaacgtaggattctattcttcagactttgaattcatttttctccacaacatgactacatgaataatctgacatcgcttctgtaaaagcgaagaggaatgcgacagccgatagaatacacgccgaatgagcaaatgttagagcaagcatctactagttacctattttgaagtatgaatttgaagtatatggggattgatttttgtatatatatatatatggaaataagacatctatggatgagtgaatatgaaacacgatgagtatgagaagcatgaacgtgagatggtagcgatcgcgttggggagagagtaagaaggccaaattacgcatcgcccgctacggtttgtagcgtctttgctatccttgattgtgctcgaatctagagagaaaacgagatcgaacagttgagttcaacttcgtggcgctatgatccagagaacgagaatgaaagaaagaggacagactctaggaccgtagtggaacagcacaaaaggaatgatacccatcaaggcggctagacatccaaatatcgtagctgaccatcgaggattcaagtttcgatacatctttgaaaggaaaggcgtcaattagtccaaggagcgtgaaaaagagataaacaagaagtggcggcttacaggcgtgatgaatagaggaaaggcgccttcagacaacaagagacagaacccaagtaagacgggtcaataaatacgaaactgattcgatattcgcatccccaaagaggatggaatacttacctccgaaaatgtttctggagagactttgtgctgcaagcgcggatgaagcgtactggtttcccaaacaggccaagaaatgtaatcgtgagtgattgaatcagagacaggatacagattcgtagaagaaaatctcgatcacgtacgatcaggtaggcgtctgctaggtagctatttgaggtcaagagttattggggtcaggagaagttaacaaaagtgaatacgttcaggttcagaagaaaagacgaaggttcagaacaggagatcctcacttgaatacagagagactggtgagaacagcatacgaatgaaagacatcaatttcgtgcacaccttctttacagcggagaaaacagaacgcactagatcacgaaaaggcccaagatagcgaccgtaagtccaacgatctaaatggaaaataaggaaggaagcgtgagattgaatgagtatgaatcttttatcaaacaaacaaccgaacaaaaagaacggacaggtccaatccagtggacatcgggatacgaagtctatgtgaacacaccgaagacacaacaaagtaccatcagtcggtctaatctgcatttgaagggagaaaagataagagaaatcaaagcagacacgagaagagacgtacccatccaaagatgaagcaaccgatagcaaacaccatgccggacagacatgcaccgtaaagtcttgcctccggtcctctcgcggcaaagtttttcctataaggacgacatgttggactttccataagtgaacacgatcaagataagcgaaaagaaaggggatgaagacaaacttgtagagatgatcttgataaaagttgagaccgaatcccaagaaggaagccacactgaattccgaatcaaatctgagtcagtccccgtgtttccaattaatctatcaagagatgtacataattctggaagaagaagggaacttacaccaaactcagatagaccaagcccatctgaatggtaccaaacccataaagctgctcgaacacatatggaatagcctccactattccatatagaataccccaaacaaagctgatccagagggaaaaagtgaacacaacgggttccgtgaagagaaagacaaggggcctcttgagggataacttgatgagctcgatgagggggggtcgagtaagctcagaaggagaccgatagattgggttgttggtctccttacgtttcttccgagctaatcgggtcagcaagacagtggctattgattcatatattcgatgaagtattttggccatcagttttcgagacggatgagaaacagcgaagggagggagtctcacaccgggtttctttcatacagatgagcatggccgggatcaaacctcctcctattaatctaccattgaggattatcatacgattcagcgttttaaattctggtgctttatatcaacatagaaagcgaagagagttccttacatcaaagtgatccattgaatccacctccatccgagtttatcatccgctgccacgaaggacatggcgaacgcgcccagtcctgttccgccgatggcaaataaggaaaagatgctcataggaagacctcgcctttcggaaggagagaacagagatcgtgatgtcagaatacaagagaagaagctgtacaaggggccgtaatgatgattgatggtaaacatactctttggttttccagatatcggtctgaggattatgtagtgaacagatcggaatcaaaccattaatccctggtgtagtcaaatcaaatgtgctcagaagagtagaatagacgcactagtgatccgccgaccatggtactgcctgtacttgcagcgcatcttttgcaacgtgtgtgtcaacatgctgcagacgacgatggcgaaaagaacgaaaaaaacggtagaagagagacaccaacccttgaatgaatcgtgcaaccagaactgtggccagactgtttttgattcctcaaaagatgtcaatatcgactagaaagcaaagatggttgaaagaaggaaaaaggggaaggtaaggctgactaacttttgagcgagggcgacagggatagcgaacactttggcgacgccgcggccaagacggaagagacgagccaagccacacaagagacaaatcaaggggagacgagtgttagattgaaggaaccatgtcggtgaggacagaggtatacacttacgaacaaagaggatggctgagccgatgtagagagggtttcttccccattcctctgagaatggagccaatatcaaaggggcgaatgcgaaaccccaagcatagctgttcaagcatagtcccaactacagtcagctgtcaaaggactgggctcaaacagtcagtgagtaaactcacagagcaataccgaatgcggcttgcaatgtggataatcctagttcggctttcattccggtgattccaatagcaaaagaggacaagttccacgacgccatcatggtgtacgtcactgcagtcatagtgattgcccattttctatttgatccgtttcaacataacgatccggcagattggatttcataacagagaccaggccggtccaaacgatcggatgtcaacacgatgtgcattgatagaccagagatggagattatgagcagaccttccaggcgaaaagttgaagggatccctaggatcgtcgacttcaaactcaacctgtttatccggcgtccaccgacgaaaacaactgagtgagtatacggtcatacctgctatctgctccgatcatctcggcatgctgttaagttcctcctccctacactcaccaagatgtaatcttctttctcgttcacatctccttgtcctgttctcgtgtgttgtccgctcactcgagtgggacttgaactgttggactctaaatcggaatggactaattgctcttgtaagttcggcagtagttgactcatctcgacgattgctgaaaacgctcgtccttcttttctttggcttgtttctttaaatcgtctacgtctcctgttgaaaacgaaagaagaacaaagatacaagaggaaaggaatgaatgttggatagatgactcggcaaaccgaattctcttaatctttctggcctccgagtaggtaaagaaaatcaagtagataaatatatgactaacgtctcactccccagagtagccaggcttggacgcgtccggattcaatcggccgagcgatcgacggtgccgagaatgccgagctcggtgctgctatcaccgatgttagccgcgggcgatcgacgcacgtgtcgtcacgtgatctagcgatcatcactgacgcgcgacgcgtcttcttcattgacgcgtctggaattgtttcagtctgatctttcttcttgtcttctcagttcgatcaaattcacatctggctcaacagattccatccaccaacttgctcaatctagtcaaacatgcctgccaacttgtctgggatctcccgaacgtcgcctttgcaagtcctttttgaatgtatcgatatggctcaagaagtagaatcatctagttcgctgacaagctcctttcattcgaatcactcggtctttacagaccacctctctactgttcgtctcttgcctctttctcaattttgcttcatcttgttgtcttcacaggctgactgacggtctctctctctggatgacatataaatagactacttcttctccaaagtcgaaccgacattgtccttgcttggcgcagcgtacgctctcttcttcccaggagcgtaccatgataatttggtccattatcgagatcatatccttttaggtgacaaaggaggtggcctccgagcgaccatcgtcactagaagtctgggaaattgtttgtccaaactgcttgttcttgtactttggtctctatcgcagataaccatagctctcatctgatcgaccttgcctcttcctcttctccctctgactgacgtccttcctaggttatctcttattggcgatgatctcgttcttccttattccgaccctcacagaaaacttggctccatacccagtcattcacgaaaacatcctggtcaccttcctcctctgccttgcagcatgtgatgtcggtctcgctatcctttctcttcctcatatcgtcctagacttatgacctactaaccgatcaacctcttccctcgcgcgcgcacacacacacacacacactacgtggctctctcagttgacccacatctatgtagtagcttcgcaccttcctgagacagtctacgcttacccatttaccaaatggtcgttcttggtctggggaaatatcgggatcacggctattctctttcttgttcggttcgttcatctctctctactcggttctccttctttctgaactgatctcgggttctaacccttgtttcgctcacaacgatgacaatctacatgatcatcgccaaccaatagatgtctctggtttttaggctacggacgaccttactacgggttgggtgattccgaacgaaaacgaatgaaggataaatcagaacaacctcgattcggaggatctcttcgaccaaaagatcgagctgaatacgagagactcaaggttggaaatcactctagtggcagttggagtaggcaggattgatctagtctcttaaagatgaaatccggtcacacttcgcttgtgttaatgctctcctacatacaaaatagccgacaaacgaaggaaagaaggcttgatgtggaaaggaaacaacacataaggatagacatgtatatcgaacagatttcgaagaatatattgctcgacctcaaccatcgtccactctttcctctctctttgcatctgtgcccacttaataatatccagcgagttgatagagaactgccaaaaacaccaagaagagcacagcaaaaagtatggcgaccggggtaccgtaggctgcgatgatacacgagacccccccccacaaaaagtgaaaacacaaaaagccaaatgataagaaacgcaagtcgagggaagagaagacaaaatacggcgccatctcaagatttgcgctggagaatatgaagaaagcacgagataaaggaagggacgaactggcatcgaaagtctctggaacggtgatcacccgaacggtgttatccgcgcttcctgaacaaatcagatttccagaaggattgaagcgtaaaaccgtcgggggcagagcatgggctcgaaggattcgaagaagaggctggtcatcatcccaaacttctatgtcagtagagactcaagaagaaaagtgtcgcgagaaatgacagaagtccactcacagcagaattagaagtatcgacgattcctacgctcaagtccgaacatccgtacgccaacattgtccctgatgtgctgttttgcccaaatccacataggatcaagctaagtcagtgcgcacgtcctaaagatgaacgaacagacagagacagacaaacctgacgtcacagacagtgataggttttccagccaacactctcgccttcccgactttccaagtttcttttgaatcttcctctactggcaccttctcttccttcttctctccctcggccgtcctagaagtggcttcagtggaagcatcgaaggtacagatgaaagctcgacggggatcgcctttcttcttctggatgggtgcgttgagaagggcaaagaactttgaggaggttgggcctcgaccaaacctgaactcgagtaaaaggtttcaaatgagagagtggtcagacaaaaaaagtcaagctggcccagaaagtaaaccttaagcggagggacacactttccacctcgaaacgtggacttggcttcaatcttgatggcatcccggctgatcgcttctatctctttcggtttggatatcgatccactaggctgtccttgccctgtcgacaaagaatacacatgaactgtagtcgatgttgtaaccgcgagcttaagaaaacaaaagatccacagttgcccaatgatgttcaattttaaatataccgattcgatatatatatataaacactacgttacggtcgaaaaggaaagatgtgaatagaagacacgtacccgggaaccatcatcactaaagtccaagtcataaacgtctccaaagccgactctgtcgaacgataggcgttcataagcaggttcaagagatggaaacgagagaatcgaaacctgcattggagaaaacattcacgccgtatgtttagctacatacctctgttaaaataaatccaaaacagaaggaatagaacttaagtacagacttggttgtgtgatgttccaacagccaacaaagacccattgcgcgagaaagcagtcagtttctacaccaagaaaaggttcaacaggagtaaaatctctagtcaggcttcgagacaaaatactggtatacgaggacttgaaacaacgaaacatttccgctcacctggtaagggtaatcttctctctccgaatagtcggccgagaatgttcgggtcgagctcttcagctgaatcctaatcacaagaggaaacatctttcgcatcagtctatcattgaatgttcaagctgatggactgagcaaaaatgtctgtacttttcatcattcaggtcaaaaaccctgcaatggttgttcattccatttcggagttgagcgggtgcagagttgattcccgccgccaactctttagtctactcatccgacgagaagatttaaacagtcaattcctgagctctaattacaggctatcgggtctgaacatcgaaaatcgatagacgacaaggaaatcagaagagcgaagcgaacctttgggttgagagctaacgtcataggagcgtcttcctcagcttgtaattcgtattcgtccagaacatctagcttttttgcctttacatcaacatggcatagtttctgttactcgtgtttttttttaggaaggcaagatggttcccccaatttatggaatcatcagctcgaaggtaacagaacaggcgccatcaatacaatctttatctaaacaccatactgaccagtttgtttttaacaccggatcgagttgctccaccgcccccacctaggactacctgggagtcggattggaaggcgatagagtacacagggaagctgggagtctcttgagagaaatgctctgttcgagtcatcgtttgtaaagaaagagaacgaaggacgagtgatgagatgatggttgttgctattgaagatgatgacgagaatctcgcgacaagtttatcgtcaataataatgaaatacattctctagtaaaccaaaatcaagaacaagtaccgcctttgatcccacgtatcatctaccatccatcatccacaaaggaagtaaaagatatctgtttcgattgatatgcctcgacctcgatcccgctctcgctcccctcctagatctcggcataacagtaatggtgatacgggctatcgacgaccttcgcctccttcttcccggtcaggatactcctcccgacctcgcgactctggatctgatagagatcgaccggttggtcgatcaaacagatatacgagcgaagacagagagaaagaaagagcgaatgacaggagacggtatgatgagaaacgagataggagcaggagtccctcgaggacgggaagtggacccgtaagtggatttcccatttgatgcacaggacacgagattagaagcctgtcgaaagccgactgatagatctggtatatgatcggttcaaatcgattccctccttgtgataaacatccaaatcatatcatgaatattgggtgttgaaccacatacagggtggtccagtgatggctcctccttcgcccaaacgcgaagccccaaagcccaattttgaaaactcggggtaaggtcgtttcctattttgtccattgacctattcccagaccatgttgacacgatggttctacgatatcttctgattgttctggtcgatggtcatcctcgttgacatgtttcgcactactagcttgttggcggcagagacaaacacgacggcaacaggtgcgatgctgaaatacaacgagccgccggaagctcggaaacctacattgaactggagactatacgtgttcaaggggaaggagcaagttggtcagtgtcttcctcgttaccttatctttgttcttttttgtgggtgatgaagggaatttaagtaaagttgttgtttgcatcgtctcgctccggatccagatatcttccatatccacagacaatctgcatacttagttggaagggatagcgctgtgggtgtttatcctgttgtgtcgtctagatttgacagctcctcactctcaggttgttttgacttgtaccgttctttgcaggtcgtggacattccttcggcccacccgtcttgctcgaaacaacatgccgtgattcagttccgattgatcagaacgagaaatgaatttggagacgaatcctctagcgtcaagtaggtgtcacctggagtttgttatcctttgtagttttcttctccagtgttcagacctaactaacaaggttgtcttgattggggtcctctatccttcttcactaggccttttgtgattgatctggactctacaaacgcgacatttgtcaacgaccaagagattcctccttcgaggtactacgagcttaaggcttcagacggttagtctatattgcactatctcgcctctctggtttggagataacgagagattcgtgctgatcgcttggatgtcgatccttgcttatccactacccataatccatgcgtccatagttctcaagtttggccagtcgacaagagagtttgtgcttcttcacgaggaagctgcttgagcgtggggtgactgaaaaatcgattctaatgatctgtgtatgattgaatgatgtgagaattctttgcgatatatacatgtgtgtatgcgcatacatggatctaaggatgagcaaaagaggacagagacaattctctatttcacccctttcctctctttctccaacattgtcactgctcccgatcctccttctttcacacttctttactctcaacatgatgactctgtcaaaggtgatggatgacagagacaccccaaaggtagcgtagaagaaggctgtatgcggacattccaagatacttgattatctaagtgactcttgcccccttagacaacacttgtgtaagtcctcctcctcctccctcttctttttttctcttctctcctcacagaagaatcatcatcatccaagagttgaatgctcctcaggacagttcgatctctttctcttccatatacgttctcttacagacagtctgccgctcttcgatccaaccggttattctcaatcacactttcaagcaagatgtctggcgatttgattgcaaagttgaccgccctcgagatcactcccaaggtcatcaagcacgagccggtcgtaggagctaaagcctggaaggctgctttggagggaaaggacggagttcctgctgcctgtcagtttttcttagttctcttgtttctgtccatcgtgagaaatagaggacacctcgatatcgaagattgctccgtggctggggttgaggatgcggcatggtggtgatttggagggaaccgtcagtttggtccgagttggcgtgtacgatctaggaatgatattgactcgactctctcctctctctcccgtctttggatacacacagtcgagtgcaccaagactttggtcttcaagcccaaggtttgctctttcaaaacacgctcaacagctcccatcattctatctatcacctgagtgtctcaattagattgccttgaaggctgactcttcatgttcttgatcattctcaaagactgccaagaccgctactcccgttcctgttgtcattatcgcttctgatactaccgaaactcctaccgggcccttgggtaagaagctcaatgtcaaggagatgaggctcgctaacgaggatctcatcaaagagttctttgccgtcggtaaagatgatggtgagtgccccgcattcggctctagttcacctacttgacttctcctcgagttgtttaatgtactaacgagtcattttccttcgttgcattcgactttctatcagtctctcctctccacctcacttcagctatccttcctaaggtccaaactatcctttctgcttccctcgcctcgtcctccgacctctttgctgtccatgcctctacttctgccgagactatcttcctctccggagtcgagctcgccaaattccttcgatctgtcggtaaggaaatccaggaggtcgatttcgagagcatgaaggttgacgccccagccgcgctcgtttcgtcggctcctaggcctgagtaagcttcctttcctatactatcagccaaaccgcgccaaatcaggagaactcaccgcctctgggcttcggggtgtttcagaaacagcacgaacaggacggctgctcttgacaagaagagaagggatgatgccaagattgagggcgccgacgagatgtccattggaattgataaggaccttgatttccccgagtggtacaaacgggtaagtacctctttcttgatctatctgatccgtatgcttgggtttatgcttatcagacgcgctatttgtcatcatcttatgcttgcccttcgtggaatcaattcaaatatctctaggttttggtcaagggagagatgatcgagtgggtatacagattttccgctgttgaatgactcaagatactaacgcgcctgcgcgctcgcaatcttctctatttgcttagttattatgatatctctggatgctacatcctccgaccccagtcgtactccatttgggagtctattcaggagttcttcaacaaggagatcaagaagcttggagtgcagaactcgtacttccccatgttcgtgtccaactcccgattggagaaggagaaggaccacatcgagggtttcgcccccgaggtcgcttgggttaccaaggcgtaagcttcacactcttttctctctcccttttctaaaagactgctctagttcgttagtttcacgctgatctggattttccgttggaatctaatagcggtcagtctgatttggaggagcctatcgctattcgacctacgtctgagacggtcatgtacccttgtacgcttgcactttctctcctttgacttttgttgagacactcatatgaataaattctcttttctgcgatggttgatagactacgccaagtggatccagagtcaccgagatcttcctcttcgactgaaccagtggaactctgtcgtccgatgggagttcaagaatccccgtccgtgctcttattcgtacctattcaagttgccatgctgccattttgtcatgttatactaaatctgtgcatcttctttcttgttatgcgtcttgctctgtcttttcctctagagcctttccttcgaactcgagagttcctctggcaggagggtcacaccgccttcctccgacgagaagaagctgagaaggaggttcaccagatcctcgatctctaccgacgagtgtatgaggagctcctcgccgtccctatggttaagggtgttaaatccgagaacgagaagtttgccggtggtctgttcaccactaccatcgaaggtttcattcctaccaccggtcgaggaatccaggccgccacttcccactgtctcggtcaaaacttctccaagatgttcgacatcactgttgaggatcctgagaacgagcgagagaagattcacgtgtggcagaactcttggggtttgagtacccgatcgatcggagtgatggtgatgactcacggagataaccagggaatgattacccctcccagggttgcgcccatccaggtggtagtcatccctgtcggtttgaccaccaagacgtcggatgagatgaggaagaaggtgtttgatactgttgagaacctcgttactgatctccaggcgaaggatgtcaggatcaggtcggatgtcagggagggttacacccctggcttcaagtgggctcactgggagatgatggttcgttttcgttcgttgcttaaaatcaaggaagcggacggtctgacccattgttttttttttcttggtctgcttgttgattgtcaaacttgatttgtagggagttcctcttcgactcgaggtcggacccaaggatgttgagaacggaaagacgttgactgtccgacgagacactaaagttaaggctcctatcgatctcgctgatatcaccaccaccattcccgctctccttgagcagattcaggccgatatgtttgccagagcccaggcagagtttgccaagcgacgagttgtcgttgaggagtgggataagcttgtcccgacgttggacgccaagtgtgtggctgtgttgccttggtgtgaggagcctgcttgtgaggatgagatcaaggacaggagtgcagccatgttcgtaaactttcgctgcttttcctttctcttgcgcgcgcgtgtcacaatcgttgactatcgatttcaaaacgccttttcattacagtgcccaggctgcttccaaggaggctgtcgatgatagagttccttcttctggagctaagactttggctattccgttcgaccagtctgtctacccatcgatcgagggaaagacgtgccccggttgtggaaaggcttccaagaggtggaccatgttcggacgaagtcagtcttctttacactctctcgatcggcgagttacaaaaaacaagacaactgatcgctgcgttcgccacacatttatttatccacctaggttactaatcgtctcgggtgttactatagacaaaaaagaagaatggattgggacggtggttttagagggacgaagggaggcgacaagagtaacctcttcctcgagccggttgaggttttatttcctatattttctttctttgtttccacttttgctattcgatgtacttcccctgcgctccttgtgtcctctgtctctgtctcttttctctgcgctctcttatgaatgtactgtcgatcgatggaagacaatcaaacggatgagtcgtcttacctaaccccagctcgccttcaatgccttgtccgcagtcagacgacgttcactagatcacacgctatttctctcttttgcttcgaacgtccatcccatccaacagttcaaacccaaagatcatgctcgagtatgtccttcttgactcactcttgatgcctcatcaagtgctgtctatcagaacagcgcgagtgtacaagcaggtcgcttaccatttaaatatcacattttggcttaaatctttggtgacgaccctctggtcgttggatctttctgtgttgcacagccaagactttatatgttgttgcatcccactcattaattctgggatttactttatcctactcgagaacatcgtcagtcttcttttggtgttctcatgtctcttgatttctctatttaaagaaactcatgatgtgtctgtgatgttgggctttggggtctcggcaggtagtaggcattgttgcgggggtgttgacattggtaccttcagcagtagtaagcagtgctgtgccttcatttacagggtggatctttgcaatcctctgttttgcggtcgctgcggtccaggtgttaggacttttgggtgtcgtcaaggtatgtttctctgggggaattctttatttgcttgtgttatattctgttcgagtcgagactagctctggctgtctagcggtcagagctaaggttgactgcatagtgatattcatcgattgatcttttctcttgctcttgtgtctcgttcttcttgcgttcggatatctttctattccacaggagaaaaaaggaatcttcagagtttatacgatcaccaacattgtcgtccagctcctcgcgttcactgtggcgggtgttctgatcctcgtctctgggcttcgacataaaacggctgtcgctaactgccaatcagttagtccatccaaatctttcctattttatgttatgtagatcggctttgcaaaggtgagctgattccttgtatggcctctcagacatattatactacggattccgcaaattcgacaacgtcgttggcttctcaaagccagaagatctgcgagatttttatgattgtcgacaacagtttgatggcgtttgtctcactttcgttctgtttcgctctagttcaaaaattcgataagagagtagtcctcgttaaccgtcattcttctgcgatcgaaatagaggtctttggcttctgatgtttatcgtgcaaagctacttgatggccgttactaggctttacaggcgcgaggttcgggcccttcttcggctctttcgctcaaatagattggataggactctaaccgctttgcatcccctgtctcttcctttctgtcaaacgtagcaaaaagaggatcacagtcgatatttctcgtacgtctctatcggtttgacacttctctgcgctgaatattcatcccaaaatgagtataccttctgatcctcctctcgcgatcataatgcacggacaaaacacgaaatagaatgtactctactaaaggtggatttcccgaagaaccagagaatattcctctatctttccacaacactgatcctttaggggacgcatggaacacccgacagtcaaccgatactattcgacagtacgatgctggaccacctgggatgcgcaacagtggtatcagtgttgttgacggagagggatatagacgaccgttgtcggaggccaggtcgcatgaacaaggggtgtatgggaatcatgaggtgtatgatgcttatcctgtcgaacggggacacgaacaggaatacctggatgatggacggagggacacagctttcgtaccaccggtgggtggacacgacggatacggaacagaggaggcgatccatagagatcaacttcggcagcaacgagattagcaggctcatggactcactttcctcttcttctttttctctttcttttcatctatcggacttctttgattctcgttctttgcgcgatatttccaagttgcttgcatttgctttctattcctctccttctcttgattctttcttgtttcgccctccttttacctcatctactgttctatctattaccttcctcgggtttgctcgccttatttcgttcttgtctatccgccatatgtatccatcatgattattgccgttccatcaagcaaagagagggaagtagatcgatcacgttgcacagctttcagtcgtagaatcgcacaaccgtcatcaccaccatccttccttcttttgatggccgatgatcatcatcgtcgacatcatctctttcaccttctgtctgtgctctcccacatattttgctcaacatggacatggatatgcaggatgcgttcacccagcaacaacagatctgggctcaacaagatcaagcggcaaatagtcgaatgttgtgcgtttctttcctccagtccttctctctctctcaatacacacacatttgtttcgtgatttcctggtgttgactcggaactggtctatgattctggggtgatatccatggcttcaaacgaatcagagatctggtgtgtatcatggatgccactggatcaatgggtgtatgtgttcttcagcccatatatatatctactataagaatgtaaaggaagctgatagaaatcaggccttggacttcatctttgctttgggtgatctgactgctgtagtcttatatcgcttctggcaagttgatccttccttgctcttgtcttcctcttcgtctaccctgaccctgaaaaggagggttttatgttggtggagaagatatcccaaagtgatcgctgacggacggatgatctattgattaaaacatttacgatctttagccacgaagaatattgaggaggtaactgtgtttcttctgaaccatttgtctcctttcctctttgaccagattggtgcttactgatcaaatgggtttatactgctggcaaatgatatgatagatctgtacttcgatcgtgaactcagagaaactgtccaggccggatgacctgagagtgtccgtacgtatatcaatcatatcgttctggcactatgattgtacggccgagggcatgcgtacttacaccaaaagcatctttcttcatccaattctttttgtttctagattatctcttatagggatcacccgcctcaagatcatagtgttagttcttctttacatcagtccttccaaattgtgaccaacaatttgacgtctttaatttcttttcatgacccggtacagtacatcgtccggtatgttctcacctctccatatcagctttgtatcctccatgcaccttgatctttacgtaaacttcgaacccatcctcggtctttgtcaatccggtcggtacatacagaaccaacgcgttcacgtcttcaatcccgcttgtcaaagagcaactctcagctctctacgcttcgggaggaggggatggacccgaagccgttacggccgcaatggcggctgctcttgatgatgtagagtggcgggaagacgcggcaaagatggttcgtcagaagatttctgctttcagtttagagtgatttaacatgagctcactttactattggatgttcaggttgttctagtggctgatgcgccacctcagtaggtcgaatcaaatgctcaggaccgtgcttatgaacactaactaactctattcttcacagtggaatcggagagtacggggacgggtttccaaatggttcacctgacggtaagttaccttgtgtcgtaccatttctagatcagatcagtaattcacctcttgcactttttctattcttccttctccctttgtctctaggcaaagaccccctggttcttgctcgagagatggccagtcgaggaattactatgtttattgtcgcgtgcgagcctgcgctgtctggatacacatacggaaacgatctattcaaagcgctctgtcagattacagcgggcatgatgctcccactgacgacggcctcactcttgtcccatgcgattgtacgtttcgttgtcttttctcgtttcgctttcatccttcctctctgaaactggtatacgatggattctccaactctgatactctggtgtcttgtttctctcattggtttgctctttctgtgaacttgctatttacaggttggatcggcgctagaacacttggatatggaccgactcatccgagaagttggacaggctgttggagaccgactaaaaggtggagtcgagacagtagatgatatagctagagaattacatgagaaggtatatttctctcgtaatccttctttcctctagctgagctgctcgttgatcaccattctgccccatctcgacacaaccttttttcttctttctttcttatcactcttcagttgatgctccgaaatgaaacgaccaaatcgttgacggtagaaaatatttatcgggattcggaagaagcgacgaataacgtccaggtgttctcctcggctccagacttggcttcagcccggccgcatctgcaaaaagtaagctcgttctatatttagacgcttggtctgtttgtcggttcgatactgatctggctcttgaaatactgtctggttacgaatgacgttgacaatgaacaaaaggtgaaaggatctaggtaggacgtctatctcggaatcgtttaaggatggccaaacgaaagggtgcatgtgctaacctctacgatctaccgatcgatctcttccttgtcgttcttcttatacagatttacagatgcttatcttatctcgagatactcctcttcatcctccacttctggataccgtccccccatccctcctcgtcctagctcatctgtactctcatcaggaggtatcgtgccagctaccacacctaccgctttcaacccattcacctcttcctcttcctcttccgccagcaccagtaccagcatcccttcctcttcgtccttttccgcatcatcctcagcagcagcttctacgtcacctccatctagaagagtcctttctgacttcaaagccttcggtgctcaaccaaccacaagcgtcttcggcgcccctttctccagtccacaatcaggattttcacctaggtcagctgcatctgcatcgactccgagagggatgagaggaggcgacagcgatgatgatgatgacgataatgagatggagcaagatagggatgaggaggaaatcgaagaggtcggtgggggaatgttcgtaagtgagggcgggcagggattgaggttcggaagaggagcaattagctttgaacaggttcgtatgctgttccttctttcctggttttcttctctttctttcttagttcgcttcgtgcgttttacttgaacattaaactcaacggtattctgtctctgtctctctggtggcggctactgtcggggatgaatgggaacaggcaagacgaatcgccgttggagcagcttggaggtctagaggttaaaagggaaaagaaacacttcaagcaacttctttgtttgtcttagggagttttttcgtattggatccttctttacgcagataaaatcatttttcttgattcgtttctttggctttgatgcatgaatcatacggttgctccgaaggatcgccagtttctccttttatgtcacttctccaacgatgttcctcacttggttttcctttctcctttatatttaatgatcaccaaggcatataacgcattctaatccctattctctctcgtcgttctcctttgccttctgcttatttatcaatgcatgtttcaacctttccatttctctcttcctgtctctatgtctctttgtatcgagtgtggtgtaaacgaccttgaatcaactacgcataaatgagagtacgaatacccacacaggcaggaattattcggcacgatcattcgttgatctagtggattttctaagagcaggtgtgaatatttctgatgaatcttctactcgtctccgtttacccttgccttttccttttgctgtcaaactcggagctgagtcagaagtttcgcctgtcctctgttgaagaactagaggcgacgaatttgaatgagtagtgttgggtgaaatagagacgtgtaccgcttctgccgtcgtgagtggtagcgcagacgcaagagatagaggagaatttgggatgaacctctctgtgagatgaccatcctctcgtcttgactcatttgattcatcttctggtttgcccagaaggaaccttggtcgatcatcaacggatgatgggattacttcggacgagagaggtttgatcgacctaggcgatagagcctcgtgtttagccgtcgacggcagtgttctcgggggcggagaaggcgtgggtgaaagatgagaaggaagcgtcgaaatgaggtcacttgtcgtttctccaagtgacactctaagccccgaacgaggattttcaaccgagtcaactgggagtctctcttctggcgagatagaaggtggagatgaaggtctagtgattgagaatgataacagatcatctgttccgctttgacctgggcgtgagcggcaatctggagaaggtgttggagagatgtgtgaccgtaaagttgagaacacgatctcgccctctcgtggcagttctttatctagtcgagtctctgatgctgagagattctctccaacagcctcaacatttaaagaggggtatttgagtagatcagagttatcagaccgagactccgaaagcgggtcgatagtgattgatgaggaaaccgaatcatccattcctccaggatgcgcggaagtagctgcagaagaaggaaaggctaacctcatccgttcgtagatggtttggctttcttgctctgactctaaagagaggatataatccataggaatcgagtcaggtacgacttcggatgatgatctagaatggggggagttgtgttcttcgatgtcgatatcttcctcttcgatcgtctcctctttcgctcgttcttctatatcagttgctcgggaagctttccactcggcttcgatacgcaagattctattgctgatatcttctcgtttgtcgcccaattcggtacttctccagaatacatctcgggcagaatcgattcttgccctaattttagctgtcttcttcataggttgagccttcatttgggttgtaaaccagttccggggtgatacacgtcagtcgtcatcactccgagagatgaaggttaggaaggataactagggcatcttacaagaatttgctggacagccaagtctggatcagagaagaacacgtcggcgtaatgaagcaagtagactccacaactggaaaagtcatgttgagtagggaccttacctccatgaacgggcgattttctgattagtcctcgatagaagaaggaagcaagagaagagatatgaatccgactcacatccgcttttcgatgaactaatggctgaacatctgctccttcttctaaccggctagaagcgattgcttctgaacaaagatatcgggtcaagacatggcctggttgaggtctcgatgtaccaaatgagtcaaacagaaatatatacggcctgttgggaaccgccgtcatcattcatcaatgcacaggtgacatttttgaaaagttgtcttcagttgaaatgctggctaagatgagaagaagagggagagaaaaagtctgacgtgattcgttcctgtgctgcctccatttctctatcatcacctcttcctacctccgcatcggtcccttcggcaacctctctgatattcgaatcatttcttcctcttgttgatcttctcggagcgtatgtagaaacttttttctgcgctggagatgatttcttcgcttccttgaccgtttgatcagctagagatttggacaacggtggtgatggtattatggctcgaggattaacgatgatagccatgtaccaatgatagctagttgttttgggaagccgtaagtatagatcagcatgagagcaataaaataaacaatagaactctaaggtagagaaatctgagacgatcgggtatgaagccagagaaaaactaacttttcgttgatgggcacgaccagatattttttctcaaatagatcgaccttccccattgtccatctcttgacggtctcccatgggtctaatcctttccgagtcacgctgtttcatcgaatgacaggtggttcaatcagtacatacgtgagagtcaagatgcttcaatacagtgtgtgaaaagggaaagaaggagaagggcctacgccggatcagtcagcttcatgtacagaaacgagttgaagatatgcactttatctgcaagttctggattcctgatagtagcccggtgaaaacattctcttcattgggtttaaacacaatgacatgagttataggacagagaggcagaaagaagggatcactttgagctgaactgttcgtgtttagacatagaaggaggaagtttaggactatgtgcgcatcgacttacttcaggccaaactcgatcagcgtatcgttaaggtacccttcgtctacagtcgttctgtagaagtcagcacgggtgatccgaatttcacctcttccttgagatttccatacgcacatgctgtaaaccgtgttcaatctcttgttaaatattacgtgacaatcttaaacaaggcagacggaaggcaaatacaaaagtatacaaacgtgttttgcccatccgtgagcgatagagctgcactctgtttatgtctatatttcctctgctttctagtgtctggattgatacggtctgttatgatcaatccgcttctcaacgccctggaagcctgtctgatgggcctcgatgtgacatttacttcaggactcgagcgcgctgattgagcaagatttgacgaggacgaagatgagctgaattccgtctgatattcatataagcgtaatcgcctgtctgatcagccctggattgaaagaccatatctattggttgcggtttcacataccatgcgacctgagtcagctgacccttcctcgcggaggatccctgctctaacgcgttctctatcttctttggtggtgaacgtgaacggactggtgaatacatgctggtctgatataaaagagcgcgtttcacctattggttcggcgcgcactcttggaggggtagatatcagaacgggtgatggtgaccttgtgggcaagatgttggggtttggtggtggaggcgaaggggacgacgtaggtggatgttgcgttaagcgcagacgcttcgatgaaggagtcgacgagagatgtaacttgtttagggaagatgtatcgatacagaacgacgacagtatgcttatcagccgtgtcatcggcggacctatctggagagaggagagatagaaagtcaatgaaaccaaccgatcgagcttggtttattacacgctctgagggaaaggatccagccgcgtctttgtcgttctggctttgctctcttgacgggttctcgttatctaccgctctggtctttcccttatcttgggacaaggatgatagagcagaagatctcgaactcgactttgtccgtagcaaagcaccctttgtacaggaaatggcaaaggatttgggtatgagcataggagctacaaggaacgagacggataggtttgtgggagctaactgatttgctctttatcctagagagtgttttgtttgggaccggaaacttctccatcgtctcgtgtttctcgtacggtgttggatctgtccgtgctggctatcaagagggtaacagcagggaagcctggacgacgacgatgatgatgatgatgatgatgatgatgatgatgaagaagaagcatgacaaccgatctaatcgcgcacgtgattagatagcaaagcccgattacataagcagctactgcgatcgacttagtgtcgtcacctctttccttgagtgtttccgatccgatcgagcagagtcgattccatatcggatggtcttttattttctgatctcgctcttgttcgtccaaccatcatcattgtctgtagagtagaagcacagaagataagcacgtcagaacaggccgtatcccatagaaagaacaattttgccttctttaccttcttacccgtcaactcagctctattcagcccgactttactctgttctactcagccaatctaacagacatgccttccaatgttacctgggcaaagatccttcaagagtcgatcgataagtatcctaaagagaaaagtgagcaatcctttgtcccttcatcgtttattttgtgtatcgcgctctccttgcttactcagaccctggttttagccgcttcgattgcttctgtcgcatcgctcaacccactcaaacttaacaaccgatgcgttattcctcgaaagatctactatcccaagacgtcctctcagcccgtgttgatctcaactaccgacgcccgagcgtctaagacttcccactttttgaatgtctcgcccgctacctcgcttgtttggtggttccccacgcctaacactcagttcaggctcaacggtacttgcaggattgttcaggccggagagaaggactccgagtgggaggacgtcagggtcggactctggaaagagatgagcccgttcatgcgtgggacatttggtagaaaacccgaaggagggccaggtagtcatatggatagctatgagcagggcaaggattggccaactaagcttggagcggagcctgaggtaagcatcttccctttcaatcattctggctggacaagtgaacgatagttaacctcgatcatgggttggttaactttgataggaggaggataattccaaggagcgagatctcatcgcttatgcccgagacaactttgctcttctcgtcatcgagccaactctggttgactttgcggagctcggagtgattccaaaccagaggactgtctacacgctcaacgaaaagtcggatgagtgggattccgaaatccagtgcccctagatagaagattgctccatcttctcggacacgaaatgcaatatatgtatcacgtattttgatgtatgcgctgtattcctatgttatatctgtcttatcttatggctagagaggattgcattggctgttcgatgttcctgatctcacaaaaagtactctacgtagcgctcatacgtttgtccgtccacctgatggccatcaaaccctgtgcctcccacgcttgactctttcttgcgcgctggctcccttctgtatattcacgaactttcttcttttctataaatggcaccacgcgcctataagaagaagaaaaaggaagagaagagagagagacctcgagtgatgcaaaccctctctttcttttaccgtctctgatgagctataccttgtgctcctagaaagatatagtcataacagtggatacttcatgactatacatcatgttgagaagtatcatagggatagatcaccgtctggtcaaagtagaatacgcgaatgcacaatggtctgttagggttggtaacgtgataatcaatgttgatcgatctgaccgatggatacttcatcggaaacctcatcgactctactcccatcaccaaagaaaaaagactggaaggagaaaccacatgtccatacgaacatctgttctgcctaaattattccgaaagatcatcatgcctgccaaacgaacactctcctcgacttccaatgctgcttcacaacagccgccagcgaagaaactccatcaggcgaccctctctttcggtacaaagcccgctgcttcagcatcttctgatggtaccaagactacagcaaaggaaccgacattgactttatctaccgctggacctgcgtcttcatctcctacaaagccacacgctccgtctgtgtttacgaaatctaaagtatcaccttccttgccctacgagggtgacgtgaatgagaacatcgagaagctgtttcccaagttgaaagaagatcagagggctctggtgaagcttgaggtagagagtatgggaagggaatggctagatgcattgaagactgttgtcggaggacaggagtttttgaaagtgagtgggcgctcgagatcgatcgatcgatcatgaagaaaggctcatgacagtgagcacgctcgccttttgtttcaatctttgttgcttggggaaatcagttgaaggagttcgtgttgaaagagattcagacccaaacggtctacccgcctggtaagcttctcttcccttgtcatcatattatatcaatgagtctatctgtaactcacgtctttgttgtctgtagcccaggatatctactctttcacccgattttcaaagctgaatgatgtcaagctggtcgtcatcggtcaagagtaggctctcccctgatcattctacaagcagtctgcaagagcagttttattcagttgatattggtgttctggtcctttgggtttggctgtagcccatatcatcaacgtgagctaccttttatttccttctatctacacacacgtccgcatcttcctctataacacgtcctctgatcagtgaactcttcgaatgtctgttcttgggaaacctagcgagacaagcccatggtctatctttctccgtccgaaaggggatccaagttccgcctagtttacgaaacatctataaagagattaaggacgaatatccaaactttgtcgttccttctcacgggtaagttcctgtttcgacctctttcagcatgagaagggaagacaaaggagggatggacgactcagcagctgaagtgcctattctgtttctttaaacgatcgtagagatctgtcttcttgggctgctcagggtgtgctgttgcttaacacttcactgaccgtccgagcgaataccgttcgttcttttgaatttctggttgctcatccttggctagctgattgacatctcttgaggtttctaggcgggaagtcacgccaaggcgggctgggaaccatttacgaaggcgattatcaaagaactcgcgaagagagatcctggcaaggtgttcatctgttggggtaaacacgcagagaagatggtggatgcttctggagttgatcaggtttgccgtccttctctagatttattttcgttctctcgtcatccagattggtgttgatctttatcctcgtgggattaaattatacgtttgcgccgaatgatttgggggagggtacaaagaaaaaacatctgatccttcggtccgcacatccgagtccgttgagcgcgtcgagagggttctttggaactggccatttcaaactaggtctgtttatctctatgtctggttcgaggatagatggatggacggagaggcatcaaggagaacagagttttgagtttgagtttgacgacgacgacgacgacgacgttggtggtaataacaacgctgcgacgatcagaaggatctgttggaagataacttgaaagggcagttttgcgagaagaataggcgggaatgggtgatctgttgacctctctccctttcaagtttcgagaggaaaccctccgttcgtttacactgactccttatcttgtcttgtcttcttcttcttgatagccgatgaatggttacaagaacggtggggagaaggaggtgggatagattggacatcagtttctcagacaaacccagtacctccaatggtttcagagaagagtgaaccgcctccattcagacttccagagaaggatttgtcacccaaggaataagaaacagattgttcttctgttgttgttattgttgttgttttcctttcttcctttacatgtgtcgctttagtcatacatttctgattttgtgtcgtcattcgacggtcatagcaagcgagtatgtatcaaggagaaggaaaggctgtatacgatgaagcactgatgacgaaagaaagtgagacttctcgaataagggctctcctgatattccggtaggtttagaaatctcaatacgccgcaaggatacaaggagaaagagaacgtcttgggcgtcgtggaaattcagctccgttaaaaggggaaacgaaagaaataatcgctcactgtggacgactaatgacgtatgaagaacgagcgagactcgtttgtttccgactggtcttacctttcttccagtttgccagatggttacacttggctcacgtgagtggctgagacctccgaacggagagatgtgaagaagcgaaggcacgtggggatgtgcctgtccgagacccgacgcagtcggcttcgggatgcaggccgctcaagatcggcataggtcggcaagctcaatgatcttctgaaacgccagggatcccggtaaataaaaaagggctagagctctccggatgggtacagagtccactgggccagacatccttggacctattatcttacatcattttatgcaggacggaccttcccgcaaccttccatccgtcggactttttaaaaacgtcgatcgagaatttataacattttctgatcatttatttacagtataattctcgcctcctctgctacttggcgaacagcatatcaaagggggagaaagcagccagccattcttctgcccagagacgagagaaaaatattgcatccattcgcccatacaacccatccttcgagtggggccagggatagaactggctgaggtgatccgatatctgatgattttttcttatataaatgcaacatctccattccgtcctctcgtccctttttttctacttctttccagtagcaactcttgcctcgcttctgcttttcttgtcctttcgtcttggtcaaccttgcttttgttcctctgctccttgctttaccacctcttcacacacacacacacacacacacacacacacacacacacacacacannnnnnnnnncagacggttactagcgtagacacatagaccccgactctatagatccctttactcagcgcgctcttaaaatcatcaccgtcacaccctcaactttacaaaaatggcatacccttcaatgcttcctcagttcaccaactctccccccgtctcacctcagcttccggcttctcctcggttccattctcctaagggcaactactttggatcctttggaatcccaagtactcccgctctgtcggatggctacgagtcgtcagattctgaatcttccggcccggaaactccccgtcttggacctaaggcttggtcgaccgcttttggagccaaccagacttcttccaggaaatcttttcctcttgcagccaacccagtcgatttcatccacaacattgatgacgaacaggatgacagagagcgacgacgacgaagacgaggactagcccacggatctgtatgtatcttcattccgtctctttctcgcttgtctcgcatactgatcgctcatcctgattggttcttcagaatcgaaccctcaaaacaatggccttcggaccttcattttccaaggcaaagcgatcccagttctcccgatatgccttttatgcccttactgccttcctggtcatctttaccttcaaccgagtcttccgaccaaattcgcccaccgatgtatccctcgagtcgaacccttcagagagagtatccgtccacagccgagcataccagaactcgtactttaacacaaagcgagtcgctcccaaccccgagaccgtccgagcgatcgccaagactcgacaggccatttccaagcgatccctcttcaagtgggccgatgaaaggtctgaactctccagcgtcctcaactttatcatcactgaggagatgaacgctctcccggccaacatggaccctacctcgcctgtcgacccagaagtcgttctcgacttcgatccctacacctccaccgctgagggacaattgatcgatatggaggtgtccttctgggagaccttccccatcgtactcgtctatcgatacgccgatgcctctgccaagaagatccagtcccaactagatcagctgcacattcacccggctcctgtcaccgtcgaccttgaagctcgatcggacgctgcggtcatcactcccctggttcaacgactggttgactatcctatcgaccagcccatgctctttatcggcggtgagctcatcggtggtttgaccgagatccaggatttgaaggagagcaagctcaagtcgctcatcagggcatccggagcaaaaatcatggttcccaagcgaaggagggccgatgatgattccgacgtcgaacctgtcaagaccgaggcggaactcgagatcgaggcagaaaggcagctcaggtctcaatacgaggaggagaggaagatggccgaggctgtcaatactgaatccatctagagatccttttcctttcttctttctttcttctgctttcttcttcctcttgctactttcgctatctcgtttgttcatctgcttcgctcaacctcactcgcttgcttactcgttctttctcgcatatcgtctttctatctgcttcaacacattgtttccctagttgcttttcacattgctttccatcttgttgtactcaatcattcgcatataccttcgcactgcatctgttttgctatcgctcgttcatacccgttccgttcccttgcactctagttcctttgtttcttgcttctgcttttgctttcgctttccttgcttttttgctctcgcttcttcatcagatttcttcatcccccctccccttgtcctctcatatatgcacatagttctaactatctgaatgacctggtctgatctgccacgttgtgaatacttggaacgcacacacacacaaaggacgaaaagaaaaagaaaaaaacagcagacaaagggatacatgggatatgagtgtgcaaacgaacgcgtgacgaatgcccaagggccaaagacgcaggagaacagagaaggacgcgcgtggccatctcaactgccctgacagaatgtatctcctagtgaatcaactgacctctttttctctctcttcctcttgtcctctcgttcttttactccctcctccaaatggacaagaaagtattaaaactaccactcaataagaaggaactaaaaggtatcgactcttcgagaagtcctatgggcacgacagacgttcataaagagaccatcattgcggatcccaatctggctcaagccggtacgacacccattactgtcgctcccactattacaactactacatcgaatcattcgggttgtttatcggatgatgacgattctcatgcatccacctcgtcctccacctcaaatgttgtgaccgagatggcatctgtttcatctccgctttcacaacggcagccagcccttctaccacttcagatgatatccacagctctatccatcggaccaacactcctacctccaaggctatcaaatctgatcaccgctctgtccctcgcgacaaaggtgtccctccgggcaaccgcgttctttatcgaagccattctcgaatcagctaggtattctaccagtctagggttcggtctgactagaagagcgttgatcagtgctatcagtagcgcgagaacgttctatgtcgtcaaagaaggtctcgattgggcaggcgagaaggttgccggcaaggtcgttcctgggctgaagggaagagatgacgcttttctgaacgtgttggaccggtacacaaacctagggatctacttgatcacacatactcttacattggcagagttgtttgcagtaagctctctcttctgttcgctcggcacatacatcgatctgaattcctagatcaaagagggagagtgatcgtccttagagctcatctgtcatcattcttctttctttgtttggggcccctttctctccgaccttctctctgctcaacttcctccttgaaatcccagatgtcgggcttctacctgacgttctctacgttgcacaccggtatcgccgccgcccaagaatccgtctcgttgtttgacgggatttttgggtccaacgagacatctcgagcattaggtacgttccttcttttaccacaaagtttttttttcctttcccctatcccgtttcgctaatcgagtgtgatattctcattggttatcgatgtcgcgcgcgggatgatggatttcttcctgtagcgagtatcgtcaccttggtcagaagagaattcggaaaggacgaacgatccaaaaagggaacaatctctgggttgacagcgttgacgaaagcgttgacggcgttcgcctgtcttcagaatgccacctggagaagaacggccggtagcatcaaacaaagagtgttcgtgtttctgttcctacctctctactcctttccatcttgatcttcactctgaacgttcagcttggaaagaagaaactgagatggatatcgttgtcttgttcattagattggttgattgtgtggtcgtaggagaactaaaacaaaaccttgaagacccagcttccaacacacaacaccatcgtgccaactctggatctattcaagcatccaaaggtccatcggaaccggtaaatccagtttcatcgccggtacattcatcccatcaacgacgtccatcaaggtacagcatcgatgaggaaccatcgtacttgttgacggatgttcggtccgtccttgcagatcaagaatctactactccgacgagatcggatcaacatcccgatagacctccgccagagacaaatccgtatgttgtcgagaatgaagatgacgaggatatcagcggtgagaacggaagagggaacagagaacaagacgatgaggacgagatggtccggaagctcagtatcttggtaggcgatgacccggatgatgttgtcgatacattccggccaagagatacagaacgcagacagccctggatcgagagaagggcgccaaagcggacgaggagcgacctgagtagagattcccatgaaggattcaagcgggatcgtttatcttctggagaagagtgggacgacacagaagatgtcgaagaaggagactccctatatgagatcaccgagcaaatcacagaacacatcaccgaaaccagaacggttgaacattataatccagagacctaccaggggtttttcggtctaggaaaagacaatgccagactcggttcatctccttcctcaaatcaaaggtcgatcggttcaaacatatttgagactccttcttctacggaagaagaacaagattgggtcgaggttgaagctacgttggggatcgcccctgcccagcctgatggccccaggaactcttactctcgtattagatctcgaattccaatatcatccgaaccatcttctacttcttcttcctctcccatctcatccacggcctcttcaccgtctacctcgtcatcttctagcacatctaccatcaagctttcatccgttccaattagtcaacctacaaacagacggtctatcgcctcgcaggcctacaatgacgcgttccagcacccccacaaaaactcggcaagagttcaggtgattctcaagactatcactcgaaagctattggagaagaaacggacagttcgtagactgccaactgaagagacgaacagaggagagtacatgctcgagactgaactatcggtcgaagggaaagatggtcgagcgatcaagaaagaacacgacgaaacgtctgatgagttggtgggtgagttgaagataaagaataggttggatccgatgactcctccgcctagtccagaggtctatcgggccccaagctctttcgataggcgggacagtagcaaaggcaacggcggcgatggttctcgttgggcagttgattgggagaacagatttaaccgagcgactgaaatggatagagaggaggaagaagaggtcagacaactgaccgcattcccgttagaccctagagcgcagatggaacaacattatccgtcgccttccacatcgacagattcgggcgaatccgattcatcgatgttgacgtcaacatccatctcgacgttatggccctcgaagtcccctcgctcctttgttgagtcacaatccgaagaaagggtgtccctcacgccgtcaaagaaggtcaagaggtgcccaaaaagcgcttgcgctgaccccatgagtgatggcagtctggaatcacctgcgactgtgtcaactcgttccgctttcgtcgacttggatgcggagctgcctagtataaataaactgagagttcaagacgatcgttctcagtcttcctccaacgcagaaacaccggatggtgggcgcaatggatacgtctctgatagttcgagcccaaggatcaactctcgcgcccatgttcgacatggcaccactgagcaaggtcataccaagacaaaaccgagagtccatctaccaccgcctttatcaccaagttccaattgtaaaacccgatcggttttaacccaagaatcccactattcctcgacaacccaggcaaatcctgatccagaagcatatcctgctggactgtttccgtacgatcatctcgtcagaaacattcacaagttttgtaggtattcgagcgcagcgtacggccaaaatttcttgaggatcttgggaatgggccagacggattttatgtttccgagtaccggaagataccatgccaactcctggggtacgtttcctttcaacgcgtagttctctttctgtgaggcagaaccatgggcttatcttttcttaaactctgtagcttttgcccagcacacaaatataccaatcgatgcgctcctactgtcctcatatgctgatccgaccccttctgcggcggacgagaaactctcgccgctcgttcattacattgctgttgaccatgatgctaaagctattgtcctgtacgtccctatttattcctcgctacttcctgtgtactttgaactgtgagcgcgaatgttcaagagctctttttgatgtaccttgtgggtttctgttcaatagaacctgtcgtggtaccctgtaggtccttggatttcctcctgttgtgaatcatccctactgtagagctcatcctattttcttatgtacagtggtctttcggatgttttagtggatttgacatgcgagtacaagccaatccctgtcgaaggcggtgagcccgatgggatctatatggcgcatagtgggatgctctacgtaagagatatctcttttcttcttgttatctaacgcaacattttcgacgaagcttatgtatcgcttatgtttcttcggatagtctgcgtcaagacttatgaacagcagtagcaccgttcatgaaacgttcgtgtcttcatcatcttttcccctgtgactttacttcgtgtctcctatcttgatctttgaaagatgaagcagcatggactaacagtattggcttcgaaatgagatttaggatcaagcaggctttaatcgactatcctgcttatggtcttgtgttgaccggccattctcttggtggtggggtagccgcgtatgtgtctctgttctttgctctttacatctgatagttgaaggcaactttctcacacatcttctcgacgcataattacacgtcgtatattccttttcagactactctccattctgtggtcctgtccttccgagtacttttcgaacaaccttgcttcgcacgaatccgtgggcccgtatccgccgatcggtactaaattcgtgaccaacatatcttccggtcttcctgctggacgacctattcatgcctatgtctatggacctccttgtgttgcttcgtccgatctggccaaacatacaagagatctgatcacctgcgtcgtccgtgagttttgtcaccttgatcgaattacagagcacaatatctatccaaacaacgcatttctagactaatgagcatatttgacctcgtctgctatggactctctcttttgtgtttctacagagggaaatgatattgtcccttcgttgagtctcggcacacttcgagattttcggaacgttgctttgacattgagcgacgaaggcaacattgctgaagagatcgtcggtcgggtcgtaggtatttaccaacgtcgacttcgcgaaaagtatggtccggttctcctcaaaggatctactcaacaggacaagccagtgcctacattgaaagccctacaagctgctgaacaagccgagagaccggaagttgtcatcacccgagaggaactagcgaagggccgaacaagaaactatgcaaaagacacaacgtaccaggactcgacgttaaggcctgaatatcccggtcctggcgaagccagagatgatagaatggaggcagaggatgaagatgaagacgataaaaagatgctggacgattggttcttttcgctaatcaagagtaagcatctcgttttgaccatgagcagatctgttggggcttcaaggacttgacacttatcgttggctgatcgtttcgtccggtatagctatgcgagccgatatggacaatgacaagctctaccctcccggtcgggtttatcagatggtatgtctattgaccatgttctgaatgtcttgcttctgatcatacactcacccgtctgtttttgttggaacgtgtataggaacattggacggtatttgtgactgataaacatattccaggatctcggcactctgtctcgccagacaagaagacgtccaaacataactcatctcataaggaagcccaccggattgttctcaaagcagtagaggatgtagagaagatgttcggagaatgtatgttcccttctcattattcatttctcttattgagaaagatctagctgaacatcttctttcttccttctgttcttcttcagtgacattctcacgatcgatgcttcaagatcatgtcccctccagatacgaacaaggaactcagctcctctatgacgtgagtcattcttcattatcacaacaaagtcgaattacatagtttgacaaacgatcaaccgtctggcgggaacctttgtcttgcgatgtatagggtctatttggaatgtggtagtcaaacctttctagttgccatcttctatcgtagtctatcttagtctatcgcctctttctagctctacttactcatgttacgctctctccgtcgcaatccaactagccttgttcatatatctattccagtatcctttccttcctgtctcccttcctctttcccttcctctttcccttcctctttcccttcctctttgaaccagaacatgtagtcaccgctgtatcttattctttcattttgttaaactacttgcacctaacactgtatccatccaattctccttgctgtattctctccatttacgttttgtttttaacgaattcacgacaaacccatggtaatgactttgttatctatttaagttctcgttcaaagtatagttctattgcttttactaagtcggctttgttcttgcttgggcatctagacgtcaaagaaatcaaagagcagatagattaatatatgttctgatcagatcggctcccgattgaaaggggagccgacggagaggaacaaaggggaagatacttacgagacagaaattgatttcaaaaatgataccaaatctataactcgatactgaaaacgtggttatttttccccgtttgtttattttcataaaaactttcagagtcaaggaagccctttgatgaaagaaaagaaagaaaacagacggaacacaaagaacggattgtggttctcactgttgatgaaagtcttcccgctcggtattcttcacgaaccgaagctatgtccatctcccgagcaagctaccgggaaaaggataaatgaatcaacggcacggatcaaaccagccgatttatcggatcccatcaaagacccgaacatgggatcgagaagaaaattgactaacactcttggttttcttagctgaaacgagggcgtcgtcactgtcatcctcgattccaactttcctttttctaggcttttcaaccgtctcaagtattcgttcgtcttcgaatagcccttccttgaattgtttcatgagtttcccagcccgctagtgaatatcgatacagaacgaatgcggtacatcagatccgagacgtcgtgaagagggagagtttcacttcctttgatcgctttcgcttttgatgttgatcactggggtacgaaacaagaaatagacgacgaaccttaatcatgtctttcgctaaaggttctgtcttatcctgaatccgctcagcctcttcttcgccgaatggctcatcgaatgcgattgcttgaagatgtgcattatacctggatagagctaggaatatatgatatatataggttgaaaatcaggtgatcagaacaaggatgagttgacagaccggagcttggacaccttactagggtttgggaactgttcgggtagatatcgatcatccttctggagtttcctgatgatgtttcgcatagtttcaacgtgcatctcatccgctgaacaaatccaacaacaacacacttgagcctattccaagaacattgaagaaagtagtatgagacctgcgagggaacagaaagatctgcgcgcaccatcatacgaagcgttttcctgagcctcctcaatctttcttggtggtcctctaatatcgtccttgaacggcagagggactagatggaacccaggtgctttgtcctgtctttcgtcttcgtcaaatgtttcctcctatgctcgcgaaagatgtgaagagagaggtagaagataaataggacgtgtaagcctcgatcgtaatcgagtcgaattgaacaaggttatacctggggaattagagcgcaaaagatgggcattgagccctttcggaagagacaaagccccagaccaatcttatccttctctaataatgtcttgttaagcgaggcaaatgttcttcgggagccagtataggtctgaagatagaattaacatagcagtaacgataatgataaggaacaggataagtggatatcacatgcgcgtttacataagaggtggtgatcacgtacatgctcgttcgggaaaatgaagtagctgtttttgatgttcatctcaaatgtcaagaatgatcggctcacaaaccctaggatacttatccctggtcatgtgtatcattcgccgggacagatccaatgaactattgaggcacgtacgttcacttgaaaaagtatttagatatgcaacttaccgggtgatatacctaaagacttgagttggcttatttcttccaatgaatacgttatttgctagaaggtagcaagaccgtgatgaagacgataattagttactctctagccaggaccaatgcgtagaacagaatgagaatagagaagggcacaaatagaagaacaaacctccggacgatcagactctgactgttttcctttccctctatcgacgatatctgactttttttccttttcggactcttcgatgagctcctttgtaccgaagcctttgtgctcaaggtagtcttcctgggctgctgactgggctgcataatctcgttgaagtggaggggctgggtcgcccagtttattatgtctaaacgtctgccgaaggttctccggatcaaatgcattctttacctatccgagataagaaggaggaggtttgttgacaacggacaagaaacttggagtggaggcgcagatgactgagtgaggaaaacctgagcactaacctctgtatctagcgagtcgtaatattcaatttgaggaattgcttccaagcagacttcgcctgacgcgtccgtcatctttgtagctgatttcttagcctggacgatatgcgcataccttattttcataccaagcaagaaagccctctctgatgagcatattctcggctgtagtattaccttctttctctaggaaaaagggggactatacccttggataccgataacgagttgtcttctgacctccctgggtgagcttgaatctccagaatctttcttgcctgaaccaatgatcattgggagagaaaatattgctcgtttgctagtctgacgaattgtcatctgtgccaagagctctctgaagtcgactaggccttcagaggccgagatgaattcggtttcgatcagacctgttgaccctatactcagattgggttctatccccggtggtgataatacgctctgagatggagaagacagaagaaaaggtggcgaacattaatgtcaaacattctagaaaacagggaaaagacaagaaagaagaaagatatcaaatgtacctgccagaataaatccacatcgaacaacttttcttcgctcccaagcaaaaacggcacaacgctagctcctatcgtctgaagatcaagcagatgcgtcttggcggccattacagcttgacgagcctgattcggatcgtctagatgcttcatcgggttgtcatcgtccgtgactaagaacactcttctagatcctgtgcggatgttcctgtgttcatcggtaaggatatgaaagtcagcagagagagaaagatgcgcgctaaaaaaacagaagggagttagagaaagatgttggtgctcacgctgatcggaacgctccgttacaatgactaaagagttgtcctggagaaactgatggttgatctgaagaaagaggagggaacgtctcctggaagaagtccgggttactttcttgatctgatgccatgcgagttaagttttccgggacatcagtacatcgatctcgtcatttcaagactagtttaaagatttacgatctgataaatcgatcaggtatttgataggctctaggtcgagcgaacctattgggatgagcgtatagatccctttggggtcggtcatgtgttgttctgtatcatccagatcctcgcgaggttctttcctctttgtttgaacagagccaaatgttccgaggcaggagataatcgtcagacccggcattcgtttgctacagattagatcaaagctagacagttaacaaaccgtgttgaaaatcacgaccccaactagatccgatggtgaggttaaggcttttcctttcattaactctatagcacacctcaacgagccttcgaagaacgaggcttctggccgatattgttctgctttggtctcttgatcttggtccgattgaggttcatgcattgtggacgaagcatctatacagatcagcacagcatctcttgaagaggccctgtactgtcttgcggttcgtgggttgttgttgtttttttttagggaaggttttgtttagtgagacctgactggcaagacaggaggggaatgagaggaagggagtggagaaaggggaacgggaaacatacgtcctcttccatgagttctatatcatcaggttcaccttcatctatccagacgtccgatcgtaaggccatctgtctctcttccttctttaccagtacagcactggccagtgatgatggtgatcaagttttccggaggtgtatagatgatggccaggccaatatacgaaagatgataagcgagatgagaacggagatacgcctcgacgcgttttaaagacgcgtcgagatctaaaatcgaacgggctctcatagcaagtgtgtccatagggtctctgtacccacatgatgagttttctcttgtgattacaacatacgtatacatatatatgatctagatcatcctaatgattccttttcttcccatcttcgttttcagtctttcggtcgactttacctaagggtccgaaagccaacctaccataacccttaacgagtccggcagcgcctcctccgagcatcactccgaaagctgcacaacctcctatgagtgcgattagaggtgaaagcacttctattatcgagtatgatatgcggtaaggaagtacgatggataggtgaaagaggtagccaattgggagggtgattgggaggagaatatatgtcaatatgatatagagcagtctcaacagggagagaaaaaagctgccgagaccaagaagggcagcaagtagtatctctagggaaggttaaaagagacgtcggtttgagtgatatgtgtcaagagagacgaaaaagctagacacttacgtttcgaggcggtcttggctgtatcttccgctgaaccctctgtcagagcagcttctataggttcgactttcttctgctccgtgttaaagtgttgacgactggttaaaaggcgcttctcatgggctatgaattctaccagatcatcccatttgtctttggcgggttcgaccgacagcgtcaccggtgggttcgattgatgggtgaccggagatggcgcaatgggcggcatggtcggatgtccggcggaggagacagacgaaccagacgtcacggcagccactccgttcttgatagctcccgtagctgtcgaggaagagaatgtccagacgactgaacacggtaggcagaaggtgtgagaggttgtgttgtgttgtgatagaagacaggcaaacgtcaaaagtcttccgattgtctatcactcactcagaggtacacaaaccgaccaggctatcaacgatttgaacctggacagcgatggagggtttgctcgtgccaacttgtgagccctacgacgtgttgcttttgctatcggcggtgtcgaggacatgatatgtttgctctagagattggaaagctacaaagatggaggagattatctcaactgactatctggctatgagaaagatgctggcaggaatgacgtttgatgtaaccaagcacagcatctgttcgcttcgcgcgatgtacaagaagctgtgcaaatagctgtgtacggcaacgtatctttcgatgattttatttagatccgagctatcgaagttttcgatcagatgccggcgatattcccggctgatagatctgagaccttccgggtgcactccggaccccgggacatcggagatggttactgattgtgtaatcaccctctaattcctgtgcgtctctccggtaagtcgttcgggatcggataaccgaaacagaaaatcagccgccgtaccccagattgaaattgctcgtgaacaggacggccatgaaaagcagaaaaaagaaataaataaataatatggacttgattgaaaatgtaatgagaataatatagtgaaaaaccttggccgactgcgtggactgagcgtcttttttacacagtcacttgccaccttttttctttctctcgctcgtcctttcgcctagaatatccccgcaggtgtttctcgttctctcgttaaagtgccttctttctttttctcggttcctttatttcagcgctcccctttctagttggtccatgttgaaatgtccggagggcagttttcgatttctcattcccgccggcggcccgaattcagaacgccagcccgggcatagggagattttgatcacgggcagttgactgtcacgggaccatacgtacacacttttcatgcccatgctgcaataatcattaacataccgcgcacagattggcacacggatcctacccgctcgttcaaagccgtggcctccctttcttctcggcatccttttcgtttgagtatcccatctttgcccgaaatcatcccgaaacatgtgcatctattttttcctttcatctatatcgccaggcattgatagaataaaagagtgagagaagatgtatattgtgtccgagctttatcttttgtctatataagctggcttgaccttcctggtctgccaaagaagcccctctcttctctaccaactcatgttgacatcttctgtcggacccaacttcccatacagggaagacggggagggagtctcaacgtctctctcctatcaacccaaatcatttaccctttgtggccaatcaaatcactgcttttgctttgcttccaatcagcgattctgccttttttaactctgcttcgcactcgcactcgcactcgctttctgttccgcatcgctcgttcttcgcacttgtgagtgtactcgcttgtcgtctttgcattccaaaaaaaaattactgaaacttcatcaaatttctcaatctgataggcttcaaccttgctttcattgtcatgtgtttcaatctgctttcccaaatctgcttggcttagcctacgaattatcttaaaaggtacggcgcctttctctatccttccctctcacattcgtctttactaacatgtacttgtcgttctatcaattcagcgctttattctctgcgctaggaaatttgaggcgctatctctttcgcttttgctttcgattttgctttgttctctttgttgcttcttgccctcgaaccctgcttggctcatttatgcttgcttttttcgctctgctttacttgcttgtgatattcgttttgcttccaccatcttcctttagcctaatttgattttttgcttttccgtctgcctgctttcattgtgcttatctacttctcgtctgtatcttggttctctttgctcgctttttgctcacatggcgctaccatcgtttcgcttccttcgcatttgttttctgcttttgttaccagtattatttttcgtaatcgaatttgtttctgttttagcttcgcaccctcgcattcgttcatctgctccttttgcttataccttacaacttgcttttccaaccttgctctatctgctttcctaatatgctttacctgctttatttgcttcctatctttacctaaaagttcctttgtccaacagacattatatgtacctccccctttttacttcttcacacttcactgtacatatttctcgaccttcgtcaatagccttatatggaccgaatatatgtatctccgtttaaaccaatacaaaagaagtgacacaaagaatttgaatgaggggaaaaaagaatacaagatacaaaacaaaacagaagagaactagatggttagagaagaaaaggtgaagaacggaaggggtaggtaggtgttccagcgcaataataaagacgatcattggataaggaactcaatgtgtagattttgccgcatcttattgtctaaaagaggaaagaataaagaaaataaagaatgagatgaatgatcggagagtgatccgatagagtgatcgaggaaacaaagatgcataaatacatatatgatacaacgggcaggaagggaacaaaaagaaaagaaaagaaaagagtgaatggaaattccatgagacgcttaaatcctgaaaagtgaagaaatcggggagaagagaaacatatcttctccatgtattcattcaactagccatggatacatatgtgtacgtattatctctgagaattgtatatattccggcttgatgagcgtcacaagttgacctttaaggttgatccttcagccggtctactcgcctgcctaccgaattgcacttgactagcactatccatcccccgaggacttgagatctcttggaaactagatggcagaccttattgaaatatatttagaatatatttagaatatatatttagaatagttgacttcagttacgtaagccaatgatcagtcaaaataaccctaaccttctcaaacatcaacacggtcccagccgacaaagcaatacgacatctcatctttcctgcctcccgcctgttctatcaagaacccttgtctctcttttcttgagcgacacatacggaagaagaatgagactaacacacacaagcgcattatgcgttactttttgcattactggtgtgatagattcgtttgacgaaggagacgaacgctgtactcttcataacatcagaatcattctcgccgacctgttggggctcgaccgaggcgtgttcacagcgaagccttggagaaagttcatcaaggtatatgatctggatgctctcactttctctctccatcccatcctcttggaaggatgtattcagtttctttagggctaggaaagggctgatcattactttcttattatcccttcgctgtagcgacgcgtgcttatacatatgaaggtgagtcccctttcacgaatcagtccttaaaagacaaaaggaatccaatccaactattatctcttattcatattccgaacaacttcaaggctcgttttgggctatgttcaccacttcaaacatcgttctcccatccctatgtgccgacagagacctcactgtgcaccctgaatccatcggttggtttcccgtccttcccgtcgtctctcgtctttactcttcaatctaacaaagtttcgacttatgctgactatatctatctcgttttttcgctcctattccgggagataaataggaacctggatctccagtctccagaccatcgaccgacagtccttctatcgggtcagaaccaactcccgacccatcagatcgttccttccttctcgccacgccctgtcgcgcccgatcctcttcactgacggtacagaccaccatcccctcgtgttcacgcatcgtcaaaaccgaaccaatccaaacggactctgttaacccatcagatcccacgtctagctgtctctcacattccgatatccagcaagccattcaaagggccagacgttcagaaccacgcgaccacgacctagacgcgtcagttcctataaagagaacagaagctcgggtacagaacatcatcctagatgtttgcaggaggatggggcagatatacccagagttgacaataaataataccgaagaggattatgaaggagacgtgaaggtgaaaatatcagagatcaaacgagggctggaggggtccaatgaagtctctggaagtgatcacgactatgatagcgatgacggcgatgacagcgaggatgaaggatacaaaggagatcacggccaaaaccgaactttcagtcccagaaaaacgcgttcagacaagaggaaactacaggacatgtcggtctcggaagaacaagaccgaagaagatttatcaagacacaatggacattggaaactgtacgcgttgccctatcattcctttctaccttctacttgttccattttgacccattagccctatggtgtgctgactttccttgtgaaggagagttcgatcgtctggctgactgaaaatcgttctacttttgttttccgtcgagtagcgtccaaagactcggacatgtacgacccaagaagagattagacaactcaaacggctcatacgtgaagtaggtgtccgtaagaactggggaagagagtttagaggaagagaacttgatgtatgtctgaaagaaaacatttctcttctaccaccgcttcatttcttacatttatttctttgtctgtctgatcggttgtgtccgaccgacgcgtcaacgggtttctcactctgttctcgatggcttttccccattttacaataacctctagttcaaatggcaactcggttatcttcagactattatacatggtgtcaagactcagcaaccaccgtacaccgtccagatgtatcaaaagctcagatcttctgaacttttagctcggaaagctgaacatgtagatacgccgacagaacttgaaggtagtattttgaacagatcggctagtgagttgtctctgtctttaagagcgggccatgctggaccagaaaaagcgatgaacgtaaagagttggagagggtggagatatatcatggtgtatgtttcttgcttctttctctttttcccgtgcaagatgagctctgatcgtactaaccatttcgaattctttgatcataagagacgagtacgttcagatcactcgaggtcttctctcttccaaccaggatccgacctcacctcctgttcaactgttctctatctctctttcctctgtgtgcattttagtgaggggaacgaactccctgatgctatctgggaagcacctgtccgtccctttctttgataacatgtgatccttcccaaccatttatcgcttgccgcttactgatcatcatcggtttgcattggtttttaccgccgacctttgcctttgaaaatgaacttacagacaaaacagatgaaggtgaattttcccttactttctcttgttatatacatgacaagattttgaggatgtactcacctcgtttgttctcacttttctgatatataggagtaggagacgtagattgtaaaaaagagaggaggaggttgctcaagtttccttctgaatttctcagtgttggatttcatgattttgaagtgttaaagaagagtggattgtgaattttagacaaaaaaaaactacatagatctcttcaaagctacaccaagtcttgacctcgcctgatgtcaatcaacgtgtccgagtgcacgcttccacatagcctatcctctctatttactttttcgaccttttcttgacaacctggtaacccttcttctttggttgcttctctggctgatagaatgggaacctgaaaccactgagcaacatcctagctctgttttgagcgcccaaccccctttggttggttataaagctgatgtgcatgcctgtcaacctaggatacacatccagacaagcttcaatctgtgggaagagagcgagtgctgcccgatcgagtccgaatgtgacgacaccggaggtggaagatacggattcaggctcttcctttgtctttagtggaagcatcttcacccctggccattctctaatccgaggtaggacaaactcggtgagactctctacaaatcggtacatgtcgtctcctttgagagtgatctttgcgccgacaggcatccccgctcggagggaccatgcggccgctccttttttacctcgaatgatttcaactccctgagtgtcaacatcgttccctgcgttcttgacctggccggtgatcgtcctgagagagtgaagcggtccaagcaaggaagccttcttgccgatagattctctgacaaacatgttgatcgaaattctttccagtcgtggtatcgtgtattcatccactccgtgtctcgttgggagcagactcgatcgagctccacccggttgagggtgatgcctatttgccgcaaacgggttagtcggatctttttcgacccacgacagattcggtcgaggcagatccggattgatagctattcgatgagagtatgttaggtagagcaagtcgtccgtcaggacgttttggtaaaagtctttcaatctgttcgactcaatcggtccttggaagatctcgggtagaggcggtaggggggtctcgtctttcggcgccacgacggtcgtcgccgccttaggttttggtgtccgagcggagagagtgggggtagtgccaaaagctgctcgggagaggacggggagagaggaggatgatacagagggaaggaaggaggagagcgagagggccgagcgacggaaggccattgctaggatgaagtaagaggcaaaggaaaagagagggaacgagagacggagagggatgcagcacaatctgtattgatgccaaaggtagatggaaatgccagttagcgagccgatctgtcaaatgaggcaattcggtttcaccaggaaagaaataaaacactgaaggaaacagcagacccaaaagggtttaggaaaaaagaaaaagaagaaaagaaaaagaggtttgatagacctcgaagcgagcgacagaaaccaagcgttctcgagagatctataaacctcaaagatgtaaacatacctatgagcgatccaccaagcgatgtgctatgtatatgtatgtgtatgccgcaggtgagtgagagcagagaacacaaaacacaccgacagtctgggctggttgatttgcttgtcgagagggaagaagcggacaatcaagagaactctgggtgctggcctggttacaaactgatggttacgacatctcacatcaggcacaagatggctacgacgcttaattaggtaagcaaagccgaatcgggtcctccccttgttccgtctgcacgtacctcgttcctttcccacagcctttactccttcaacacccatcgtctctttctttccttccttccttcctttcttcatccccatctcacatccaggccaacaaagagtacaccagtttatttagaagagagacagacacttctacgtttgattctttccagacagccagttgatgtttagcaaccagctaaactctgtacacaacgtatgtggtctctctttctcgggtgttggacggagttgtgcctgatatttctttctttccttccttcttgtgttcgtctgttgcatttcttctgctctctctgttggcgatgatgatgatgctgctatcctacttcatgctggtcttgctcccaaacagcctcacaggtgagaaaaaaatcactcatctacttcttccctttgatcaggcctatcctttgttgacatctgagctcactctctttttttcttcttctcttctctacctctccttccgctttctgtcaaacagaggacgaactgcccactccgcccctccaacagctatacattgagagcccttgacccaccaaacgcatttaacttcaacttataaacaacattcaaaagagctcatactggctatagccttcgagttttttcaaataaaaccagaccacttcccatcttcctcaaccttacccttccaccaactctcctttcaaacacaaacaaaaaagaacataaaacaaaatcaacaatgagcacctcaaacagattttctgctcttcaggtgtcgtcagactctgatcttgataccaagactggacccggtgggctcgactcacccgactcacccggaacaccctatgaagacgatactatcggcattaaggccagtaccgttcggagggagattgacgaaaatgtagtgatcgctgagggcgaagaaaagtgagtagactgacacttttgttgatatgtttttctgtacaacaacttactgaccgtcgtgcgggtcactgtacagagtgacattatacgtatgggcactcgtcaccactgctgccgtcgccggtcttcttttcggtatgtacacctcaacttccttggataatctgagcatcctgctgacgcgctaaattctttgttttaatgattaataggttacgacactggaggtctgttgcctgcttctctcatattatccaaataactaatttagcggttctgacagtaagatcgtctttacatgtgtcaatagtcatctctggaactcttgtctcgatcggtagcgctctgggaccagctgtactatcgagtggccagaaagaattgattacctctgctaccactctcggtgctcttctcggaggtcttgctgccggactttcgtctgattggatcggtagaaagatgtatgtccttctcttcacgtccgccgagggtcttgctctgtgtcttaccattcttttttgtctgatctacagggtcattgctgtcgccaatgtcatcttcattgcaggtgctgttggtcaagcctgctgtcacactggtaagctctgttcccgctaggatcatccacggttccaatcatctgtactcatgattgaccttcttccttctccctttgacagtctggtcgatgatcggctgccgatttgtcattggtctcggtgtcggagtaaggatttgcttacgttttttgtgttgataaaagtgctatcctgacgtccttctgtcaatcgtttcccatctatctaggttgcttcctgcgtcgttcccttgtatatcggagagctttcccctaccgttatgcgaggtcgatgtgttaccatgtacgttctgaattctttcggcattttcagtcagagtatatctactgactcctcggaactcttgatttgttttggaaccgacagcaatgtggtggctatcactcttggtcaaggtatgtctcgagagttcttcgttcatacatatgccatgtactggacgtggaagagaaattgatcgacgcactgttcctcgattctttctccagttatcgcctacgcaatcggagccgctttcgccgacgtgcacaacggttggcgatggatggtcgtacgtcttatctcttgagtttccactctcaggaacctatgttctctcgctcaaccaacacttctacactttcacttcttcacagggactcggagccgttcctgccgggatcgatcttattggactcatctggcttccagagtcaccccgaattctacttcgaaacaaaaaggtcaccgaggcggagagtgttcttcgaaagatgtacgctcaggcgactccagctcagcttgaggcgaagcttcgagtgctcgaggcgagcgtagagcagagcagagaagtcatccggaccacgacagtttgggacagaacaaggagtatgctggttgttggtgccaatcggagggctctaagtgagtttcttcttctctttactttcagttgccttcaagttggccaacttgagaacttatccccctctcttcacacaactagtcatcggctgtggattgcaggcgttccaacagctctgcggtttgtgagtcttccttcctctttctatgtgattcgggtagatcggctgagtccgctggctctctttctcgccttttcttcactatagtaactctctcatgtactacgtgggtgatattctctctttagctctggtaatctaccttcgctactcacctcgttcatgtttccctcttgaccgatataaaacagtcggccacgctcttcaagtctgttggatttgacaactcgaccgccactgggctcatcatcgccgctaccaactttctggggacggtacttgctttaaagattgttgacccggtgggaaggagacggatcatggtatggacggcgcctgggttggtcatcagtctgatcttggcctccatcagtttccattgtgcgttcttttccctttctctgtttcctctcggttatctcgttggccatcaaccgactggacatgggttgtgcatatatttctttgcagtcttgacaatgtcgaccggaggcgtgttggttgatggaacggattatcctaaaaagtggtcggcgttggtacttgtcttcatgattacctacacaatgagctatgcaaccggactcggaaacgtgccgtggcaacagggcgagcttttcactctcgaagtccgagggttgggaacaagtctttgcactgctactagtgagtgattctctcgatctctttcttctgtttgtgatcaagagagagtcataagatagctgatcgagacactgctgcttctagactgggctatgaacttggtgattagtgctacattcctctcgttgatggaggccatcacgcctgctggcgcgtttggagtctatgccggattctgctttattggctggctcttttgcttcttctgctaccccgagacgtgcgtttcctctttaccacttctttctctctgttttcaggacgaggtcttttatctgactgtgggctttacgctttgttttggttatttaggtctggcctctctcttgaggagacgttctacgtgtttgagaacgactttggtattaaacgatcccagatgctccgggcggagaaacagtcgattaagcaaaggcaccagcagcaagctgatcgggtttgagcctttcaaccagaatagaactaggacagaaactgttatatattttttgtttgctcttctagaggaactttgattttttcaaaagaaaaatagtataggaaatgctcgtgtaaaccctgtagttgtcatttattccttatcctttcctcatcctttctttctctcttctcttctctattctttatatttcattcattgctataataatctttacctactcttgcgtttgcctctctctctctctcgtttagatgccctttgttccattgtgatagatgcgccgtatgcacgcgcccccacgcgtttgaaatcacgtaaccagatatgcaacaaccaccatgccaaagtaaaagagaacatgaagagaaaaggagaggatgcgggtagctcggatgaacccaacagacaggacaccggcgatacagagaagggcatgaacagagaacgggattgtcaacgggttggacactctatcatactgtcgctgttggctatgtgacaacgatggctgccttctcgtctgtctttcccgatgcgtccaggccgagcagaaggtacaacagcaagtgtgtatatatgtgtgtgtgtgtatctatccatgtctatgtctatgtccatgtctctatgtctctatgtctctatgtctatccatatccataaccacttccaaatcaagcaccagaacagaactgaaacaaaaccgctctgaaaccttgtcacgccgattgtcacgctgttacaatttttgttcgtcacagaaatccctcttacacccacagtcttacggtcaccacgctcttacaaggacatcttacagacctcgtcttacgcccgtataatggacctcgcccatctggatgaccccgctcacttccatccatctcctcatgatgtggaggatgagtcccatcatcaccatcaccaccaccatcattcccatcactcacatcatatagatcaggtcgtagacgacgtggatgacggcgtggtagacccgtcgacaggacagaccccgccttcaggttcaatcttgatcggtgagagccatccgtcggatgggttaccttcacccgctttggattctctgggccatcagcatcattcccaacaccactcccatcctcatggccatccgcatgcgtccatcgtggacatggatgacgacggccaggtcgtctcgggtgtggtcggctccggcgtgggtggtgtcggcattggagatggcggtcatgaagatctcgagggtccccaaggcgcttacccgatcatgggtgatatggttccctcgggagatcagtcgtctcccggcaggcaacaaggtcaaggtcaacaaggccaaggccaaggccaacaaggtcagcaggacggtcagcagggtcaaggtcaacaacaaggtcaaggtcaaggcgatcagaaccagcatcaacagcaacaaggccagcagtacgttcaactcgaacagccagataatggctcaggttcatccggagactacagatccaatggcgcgattaacgggatgccgaacgaggaggccacgaagaagaagtcgagagcttccagggcgctctacatgagagagtatagaaagagaaagagtctggggaaatcaccaggaggatctccaaagtatgttgcgtttcttctttctctctctctctctacaacagcttcgttcgctttcttttctccgagttcaaccaacccagctgcttagtacatccaattgatgtgtacatacatgctgaccctttcttcgttccgatttcttctttctcccgtagcgctaaaccggacatgcatcaaattcaacaatccaccccatcccgtttatcaaactcgttctcttcatcctctctcaacttgtctcatcaagatccgaatttactctcgcttgatgatggctcccccggactgtccgaccaaccatctcacaagaaacaaaagttgggaggccaaaacggcacgccctcgccttcgtcgaccaccggtggtggacccggtggggacggactcgggaacaacccgacagagaccccatcgcccggaagaaacccttactcccagcttgcgctctctatccagcaagtcgccaacaaggttccagatctatcagactccttcaccgatccactcttgactgcaggtgatccgtccggcggccagggcggtcagcaagaccccccgtacatccctcagtacaccacgttccaccatcctcatcatcttgacgtcctgcctttcccgagaccacaattcttgttccacctcgagtgtaggtttctgtcttcttcctctttccttctccgccttgccctggtataacagttgattaaaaaacttgcgcgcggtctctttctttctcatttccttcggtaggctacatggagacatttaggtccatcggcaacggtccttatggtgaacgatatagtgtagtcgtatgtctcttctcttgtctctcatatctagccgatctctaaacgccctgtctgtttttcgaaaatgtagttcaaaggaggacagttcgaaggtcctctgatgaggggaaagattgtgtatgtattcttttccttttccttctacatcttttaactcatccaagatcggatgtgaactctgaactcttcttctgcgatcgggtaaacttaggccgggaggtggtgattgggaacttgtggagcccaacgggaccgctcatcttgatactcgatacgtccttgagactaacgacgtacgtctttctttctctttatcttggttcttctcaccgtcattttactccctccacatttactgataagcatgtccggtgggaatcgcacacatatgcagggcgcatcgatttacatccagacaaaaggaacgagaacaggaccaagccatatcctgaaggcattgggagaagacaagtcgatccgagcgacggattacctgatgaggttgcaatgtactttcgagactggagaccccaaggtttgtctccctttttcttcttcttatgatctcctctttccctgttcctcaatcgatcaccaaaagcaagagatagaagctgacatggattctcttggattcacagtaccaatggttaaacaaagcggtatgcgtcgctagtgctgccagatgtggaaaccaaggtctgatcgttcttttctattactctgttttggtgtacgaattcgcactgatgcttgatccgttcgggatatctcttaatggaaactagtcgtctatgactgttaccaaatcctttgatcctctgctcttttcttgctcttcttcggatctgtcttttctccctgtctctttctatattcttttcttggtcctccctctttgtctcgttcgatgccccttctctttctctttctctttctcttgttcttgattgcgatcgagatcatcttatacacgaaacaagaaaaagagaacaaaaaacataacacttctttcccaatcccctttctctctctcttgtcttcgtcttttcttttcttctcagacgatcgctactcttcgtcggctattcttcacctatctatccgtcctttctgtttctttctcctcttgatacaataaattcttattcgatcgttcgatcttccctttccttctctcttacccctgtattctttcctcttctctccaaatcttgtcttactcttttcggatctcagacctctactccgacccgagccgtctcgacctgctccccttctcctttttttctttcgcttttcgtctttttttttcctttcttttttcgttccctttgtttccgtgtcctgcttttccttatgctcgttccctgtcgatgttaatgtcaatgccgataccgataccgatatcgatatcaacatcaacgttgggctgggctgggccgggccgggccgggctggactgggattaggcgatagggctagaagccgaggc

SEQ ID NO: 2527 - DNA, 35506 bp, Xanthophyllomyces dendrorhous
tgtgtgtgtgtgtgtgcctaagccgctcaaaagaaagaacaaacatataagcggcttgcaactccactcgaaagaccagatgaacagagcttacaataatgactgacaagatcgagagcgatacgtgtttggaaggaagaaaaagaacaaaaacaccaaaaaaaacaagagagagaagaccagaaaggtcattcttcccggctcggtcgtctgacctgctcgacctcgacctcacctccattcgtccggcctctatgcctgtcctctctacctctctgaatctcatcatacatcggcggcagctcaaccatctcaccttccaactctggtggcccatcggtttctactggcccagcatccctatgtctgacatagccactcattgagtggattctgtccgcctcatcgggtggttctctatctgagttcgacaaggccatcatcgcttttgtctgtctgacgacagaaggcgtaatggttgctcggtctgaacctggtcgacaatgatcagaaggagagaacgggacagaagaatctgtcggatatgatgatgccgaggtcaagttggaataagacgcataggtgggcgaagacggagatgggtctgaatcagtatatggtgggtagaccgccaaggaatgcgaggtggagaatccagagagagacagaggagggtggctgatcagaggtgatgatatactctgaagctccgtcccaaggggcccttcacgtagatagtccatacttcgacttccgttggcgcttctacttccaccttctgtgcctaccaagagatgaccgtcagagttcccactcgcgctttggtctgacccccttcggtacatgcgtgcactaccaggatacatgtaaccctgttcgtctgtgaacggatcgttgctctcgcccgtctcatcaccatcatcgaggaggagcaagtttcgtcggccgttcttaggccccattccattggatccagaaggagttgacggcgatggatcggcgatgtatgggtctggttggaacgacgacacatctccatctttccggccgaagagtttccgacgaccgctcgaagtaacaggttgaccaaccacgtctccttcatgtttcttatcaaataccaaagttcgtctgaaccggttgccacaaaagtaccagaatatgaacagctgaagcccgacaagacctagtaaggcagcgacaacaataccggcgatgacgccagtactgaacacaattccttttctgggtgtgcttgattcggatgattttgaggtctttgtcgaagaaggagctctacaaacaagattaagatgtttgtgtgagctaggaagattggccagatgaaaggggagaacaacagaagggagacgtacttggcagtagtagcagcctttccttcaggcgttcccccttatggacaattcaataaaacgaacacatatgtgttagcagattacattcctcacggactatatgtacggaggagcactcacatgttgatccaggtgtctgggatggcctgtttccatacgaagaaagaaggaaagaaagaaaagaacaaggaacatatagcctcgacatgatcagtcgatcggggtggaatctggttgtgtaagcaaggcgagagtagagataacgtacgaagcggcgtctaaacaactactgtccgtgcttgagccgactgtgaggaagttggaggatcctccgttcccaaccggtcccgcatcaagcatagtgaggatgtacgtggtggatgatcgaatgttgacagtccagtctttgttgcgagaagaagatgagaagtgaagggacgatcagagaaagttcgtcgaaggcagtgaagagagtaaaaatgcttactccagtaaagatctgtagctggaaggacaaaggcgtttccgttcgggattacacctataagaacagtaatcagacgagagaagaaacggcgagcagctcggatcagtagcgaccaaagaaggagaaagagggaatgaaagaaaagacggtcggacgaacctatcagttgaactgggttggtagcgttatttgtccagccgatgcccacttttgaatgagaaaaagagaagacaaatgctcatgaatgagccaaacgatacgcatgcgcgcgtactgggaggaaaggaaaggatgagtgatcctcacaagtatcgcattggttgacactaccgctttcgggatcgagatagaagaagaagtcagctttctcggacctaatggtacagctttctgtctggggagttgactgaatggtcataatgcttgacactcctcctgtggcaagaccgtttgagtcagacatgacggctacgtatcttgtaccaacctggatcaggatgcggcaaagtttggacgagagtaggatatatcaggaacagggaaggaagcatagttaacctcatggggatgttatcaagcggaaggataggaacagacgaacaggatagttggcatcccaaatatatgaccctgtcgaatctgagctatcccaggttgaattggacaacgtgatttcggatggataatcgtacgcaggctgtgtagagtgtaaggacgaaagatgacgaaagaggctcagcgcacatggcacaaggtcggaccgagaagacaaatatggaagaaaggcgtacaattatgagtagcttgaacggaggagatcctcctgaccactcgaccaacacacgatcgcaaacggatgggattgtattattaaatgtaaaggtaaaggcttgcacgataggaaggacaactagtgtcacggccaggacaggcaagaaggcgcgcgagacggatgcactagccatcgtgacgagcgatgagtgagtagctagagaaggatgatggctgaagaagaggaagaacggatgcgagtaggaggaaaggtccaaacgagagactggttggttgatagactgattggttggctggctggctggttggttgcgaggcagcccagttgatagggtatatgcggtcccgacctgtatttaaagttcgataccaagcttgttttgatgcacaaagtttggtgttaccggctctggtgggaggatgctcgaggaagtaccgacccaggctggatgttgagatagaaagagagacagagagaaagagaaaggaagagagtagaatgccagaaggagaagcagagcacgggcaaaagggagatagtctgtttttcaccgatcaacatacacacacatggcacacacaagaaagcgggccgaagaagatgaggaaaacatcgatcagatcgtttctctgcactgattcggcctcctgtagctctgtccttcagcatcaggggcagcacacacagatagagaaggagaagcacgtacgtagtcgatcagatactctccgtgatgattgacagacgatgagggaatccctagcgggaggtgtagcatgctaggaggagagaggggggacgtgcatctgcgtaaccatgtggcgacaagtacacgtgaggttagattttgcatgaggcttcgccgcgatcacttacgtcagcagctgctgtgcaggctgcctgttatggcgcatggttacatacgttggttacgatttcttccttccgcctttcttttttccgctggcctttacacagacgaacgccttcttccatccacaccaccaaaacagtctgttctttgcaatgtccagtgctactcactctttcgatggagcgttcgacctccgaaaggttatgaaggttgtgagtgtcgttgtttttatcgtttggtgccctcttttcctatgtcttctacttttttttcttctttttttcgtatctttttccttttataaaatcaaacattcctcattcttcctcgtaggatgacgaaagcgaggaaaaagaggaagagatgagagaacgaggatgatgacgatgattctagctctcgttgctagttctacactacgtgtgtattcttgatttggtacccttcagctaatcatgttgcttgtctttcccatggaacgatcaattcttcaacccaaccatctagatgaagcctgtcaacgccgccctctttgtcggcaagttcctcctcttcctttctttgagcatatccatccatcgataattcgtgtacacctttcgtttgacttgtgctagacctaacatgttctctctctttttctcgtcctatgcttctttttttcttccattcgttatccctctatcttctcttcatcacctcgggatgattcttcaaaaaatcacttgcgattcgtcaattcctcgcttttataattcaacccgatccgacactgctctcaactctcgacgcttaaaaataatagtctgggtcggaacgtgctacgtcgccaccgccgctgagaaccgaaagttgaacgagaccagggcaaagtacgatcttcctccccaggctcctcccaagtctttcttcacttgttagtagtcttccttccttttttcccccttcctatcaacaagtcttcccattcaaggaaaagctgggttgcactacacgatgctccagactcaaggacagatggagggttgtgtcaatcttttcataagacgccgttttttgtgcttttcagattgctgaccatctttcatctttttttttactttatcacttctccctcccattctttttgcgttcttttcttgctgacccacccctcatctcaatccaaactcgatacgcgaccggatcttaaaacacccaaaccttctcgctctctcccggttctccgatttctctcaaacagtcgccaagtggaaccccgacgctaaggaataagccttccatctattcttccaaccgtcttccaatggggagcgagtgttgatggatagggttgaaaccaaggaaagcagaggagactaggtgagggggagcagaggagaggagaaggaggaggaagagagagatagagtggagtttctacacatgacctttacctttttttgaaactggttcgtcaaaccgaggacgtgccatgaggtctctgactgttgatacctcgttctctccgtcccgatgaaacctcttcggtctaccttggtttgtgactcttgactctgtactcaatactctctcggtcgtcttgcactctgctcagtcacacacaaaggttcttacatcaagatgaccaaaaataagaatgaaaagaaaactcaataggaaattaaactgaagaggagaaaggacatagagcaaggaaggcgacaacgagatgtttgaacgttttgtaaccgaacaacaacaagatttaagcggcggactcggtgttctggttcgaagaccaagcctaagataacacagaaagcaacaaagatgtgaatatcattcatgcgagaagaaaagggaaaatacaggaggaaaaaaaaagaaaaagataatcatacctccatctcggcgtccaactcggcctgagtcttttgcggccttcgaccggtgtccgatcgagctgccttagctccgggtccagactttttgggtcctcgacctccagctcgacctcctccttcccgtcggctactcgttcataaaataaaataaaaaagagtgaacaagcgaattagccttttgtatttctaaagaacaacgaagaaacgtaaacattaacacatacgcagcaggagcggtggcagcaggagcgacaggagtggcaactcgggcggccaggggagcagcaggaggcttagcgaatacaagctcgaccttcatcggggttcctgtttaggaaagacatcaaggatacgtttcgagtggcgaaggaagcgaaggagaggtcggaaagccgttggccgaaggagatattgggcagcgtcgtcaagttgatagaacgatgagggacaagatgggagaacggcaagaggaagggcagagggacaggtttgaggagcgatcagccggtgtcatcggaaatcgcgaaaggcgaagaatcgaaaggatgttgagaaaagcgacaaatggcaagcggagatcaaactaaaaatcgaaaggggggcctggaaatcatttgccgggttactctgagtctttttctcgatccaaccgaccggcgtgtctaaagacaggcacgatcgtcgaggctgtcgctcaagaccgggtttcaagtcactcgaaaaaggaaaacgagtgacggcaaccaggccactcggatcgagttgtctagggaagggagaatacgtgcccttccagagatggatgcgaaactttttactgggaagcgaccaaaggcgttcaaaccaggaacctaacccaaagaaaaggctttgccaaggccagcaggaaggtcttagattgaaggtgaggcagacaagatagatggcgtatacgcggttgctgaacaactgggcctgggttatgggtctggcacgtcgtcgccacaaggggaaggtacaaaaggttctcgacaagaatggcccatgtggggggagaaaagaggagcagaaccagaaaagagagagtgagagaaagaaaatactactaacgtccgtcgacaagtctgttgttgtctgagagaagcaaagaaaagggaaaggagggaaagcgggaaagaacaagtcagggttgatcagagagtagggaaaagatggctaccgggaactaacaagtcttgaaagctttctgggcgtcaccctttcgagaaaaaacgacagtggcgacacccttgtgtttgccgttcttgtcatacgcgaggtagcactccctggtcgggccaatagtagactggaacaaatcctgtttgataggaagaaccttgattgtcagaatgagtcgcaagggagagaggagaaaacacgaagagaaagaaagagagaaaaaaaaaacagggagaaaaaaaacgcgaaccttgacggcctggtcgtcgacatcgagaggcaagttgctgatgatgatcttgacagcgtggaaggaagcatcggcaccagcagcaggagcagctgcaccctgggcctgaactcgggcagcagcagcctgctgtctactctggacgttaccgttcttgttagtcggtacgtcctttgcgtaccgttctcgggcggctccaccggcaggtttagcgtttccgttagcgggagcccgaccgccggctcgaccgtttcgtctgttgttcgacttcttgttggtggtgatgatctaatgatgttgtcccaggaaagggaaagggatttgaaacgagggaagaacgagatggaaagtgtacagaggaggcaggacgtgagtgaacgggccaacgaagctgtgggaggagagaattggatggacctcgtcgagactcatatcgatatccatgctggccattgtgtgtgagtgtaagtttgaggtaggaaagtgggagagtgtgtggatgagatgatgtttaggatggatgtgggtggatgtgggtggatgtggatggatgtggatggatgtagatggaaacaagaaggtgatgggtggtacgcctcggtggcaacaagaaaaaaaaagagttatgtaatatttttgtccacgtactacgaatgggactaggagtgttttgtagtgttttgtattgcttgtgtttgtagtgtctgtgtcggattttttgtagtgactttgtctagttagagtatttgtagtcttttcgtgacacttttgtagtgttttggtaacagttttgtagtctttttgtgttgtcagtctgtaaccatgactggcactacgaacttctgtattgtcttctgtcacacgttgtagtcttgattcgtaatgatgcgttctgtacggatttcctagtcgccttcgtagtctgaatagaaaactcttgtagtgaaaaccgtaatgaacactcgcctattcactccatagtctttctcgctccgttttgtagtctcttttcgtaatccctcggttcgctcgttttccatacgcgactctgttcgctcctctcaaacactcacatccatcccatcccatccctctggcatccgtcttctcatccaatcctccgaacaacacagtcaagaacagagcagacaacacagcctggatgccagcagatctgtatcttgttggtctataaactcatactctatcgctcttgacgtttcacatcggttcgtttcttttcgtgtcgtttggttttcgtctctgtatattctttctctctccttcttctcttcgattcttcaatctcgtcgtcttccggctgctttgccgtaccggtttaacatcggatcatacaacaacgcgtctgtctctggccaggtctgttgttctgctgtgttcggtcctgtttgacacgtgaaaacacgatcagtcgattcgtgttttttttcttcggccaggtctctcatccgacgatcctatccaatcttggagctgttaagatgatggatagcacatactcccattcgatcctatctacaaaatccactcggtctcgctaacgaaccgtccttgctttcctttcttgtctaacctccaattcagcatggcatccaggtcgccctcgccttctcgctcctggggccgaagcagggatccatacggaggaccctcgtatgaatcgtcttccaaccctccacatcgatttcattccgggcctccttccttggcccatcctcctcattcaccctcgaatgagagcggtggcttcaagtcttctgccaggtggtccacctattccaacggggactacagaccagaacgttcaaaggacgattatagtgtacgtccttccgcactctatgtatatgcctttttatcttcttcttcttcttcttcttgcacccttttccccttggacaccaagcctaatgtacttcccttgtctccctcttcaattcgtatctcgtttgatcctgcctgcctttccttcttctttcctcttctcccctttttagtcttcatttggatctagatcaagtcatcctcgctccttcagctcggcaagtaccgtcaatggatcgaattcctactcttctcccgcctaccacgaacgagcctcaggtcgatatcccctccctccaccgccttcctcgttcatacaccgtcggtcgctttctcctcccccacatccgtcctcctcctcggcccatggccatacacattcccgctcccaaccgtcatccagacccggtggacagatctaccctcctcctccctcctccttacctgttgccgccggcccgtccttgccccaacgtccaaacttctctccgccaggtgcaggcagacgatacggcgactttcgggaccgagacagagatcgcgaccgggatcgtgaccgcgaccgagatcgtgaccgagatcgtgaccgggatgccagctcgagggcgagagagatcattgccgttccccaggcagggccgagtaatcgacccagacagcgcttatacgtcggctatcacgacagggatgatatcaccggctccgtcgctcccggtccgctgacgactcgagaaagagacacctggcttccggccgggcctcagagtagaccgcccatgggaatgatgaacactgggtcatccagtatgggatggagggaaagagattcatgggaggccgaagaacgagatcaaagggaacgcgactcggacaaggtcggagcgtctggagaacgagaacgagaacggtccaggttcggaagcgtgcctgccgatcgaaagaagaacgcctggtcggacgcagacttgtatgtttgcactctttctcttttttcttctcttcttcatatcttccagatcgcatctcgctcattgtttacttctttgtcctcaatcattcaagaccggatcgttctctcccatcaagacagcctcctcctcatcttgcacacgatctgtttcctttgagctctcgacattccacccctattgacatgccatccatccgacgggatctcagctctcgaatatcttccgctccttctcctaataccaacatcaattctggatctggtccgatgggcctttcgttacaagctccgctcctccgtcctttaccttctcgaccgccgtcccctcgtagtagacatgcctcgatctcattagactataccgatccagaaccagatctagaactcgataaatcagcacggttgagatcaagatcaagatcaagatcgaactcgatttcaccaccgccggcaaagaagagaatcccaggaccgggtcaatggtctagagctccatcacccgtgagaaaagatttcgcgcttgccaaaagtccaaatatcaatggcggaaaccatggaacggcaaaaccaccgaccgtaggtaggaagagtttgctggaccgggttgacttgaaacgcgcgcctgtagactcaagtgcaagtgaggacgaggatgagggcgagggcgaggatgggatggaggcagagaagaaagagcaagtagaccgagataccgctgcccggtctactgaggacaaagttaaaagggagcgggatgtacaggtcgtcttggccactttgccgccttctccaacattaccatcttcatcatcacaacagccgttacctcctgctttcttgacctcaaacccggttgttcaagatgttgattcagctctcaaacctgatctgcccatcgagtcaacaatttctcctccctctccatcttcaaccgccgagggacatattcaagaaaccgagccctcgatcgtagcgccagctgcagaacagtctttgatatcgactcaggattcagtcgatcagcctaggcttccatcctcaccctcatcctcgtctacgcctacgtccacgtccaaactaacacctacgcttgcacctacatctacaataccagaggttataccgaaatctgaaaatgccgggccagtatcaatcttgacaagccatatcgtccctcctgtacgaaaacgacagaggccttccagattttcgtccccaatcctgacgactttagtaccagcgattccgtataatcaaatcccaaatacaaccttgaatgggctagctcagaagcaggtcgaacatcaacctgtgatcttggagcagactgaagagccaaccccaagatcgtctgtcccctctcctgcaaaaaagccaactttgtcttcactttcgccttcgcctccgcctcgatctgctccgacagatcttcagacgacccccttggtctctgccaagcagtcgacccctcctttatccgtatcgttctcggaacctgaacacccatcgtctgagaaccctcctgcgccaccatctctatacgtcgaactcgaaataaagtccaaggagcgttcattggatgaagtagctcagcctgtggatattctcgaatcagatttctcggttgtcagccctgctgctgtcaaagttccggtctcactagtcagcgagacaatcacgaaccagcctactgaagaagattcatctcagaaagcagttaggaaggaagaggtcgtacagatagaaaaagaggaaaaggtgaaagaaccatcgacagttgctttagaggatgtcgagatggaagaaggagaagtccgagacgatgagagcaacgtcaacgtcgagtcggttgccattgaatcgtacgaaacaattatgtccgacgtgatagaatcgcccaggtcgcctaccccagaaccgatataccccccatctgccattctttcgtcctctcctctcccggcgatcgtgtccgaccgatctatggtttctgaagtaccacctcttgtgctctcagaaccatacaaagtcgtccctctagcttcttccatcatcaaggaggctgtatcttccacgattcaaaacaaacccctaccatcgccactgccactgccgccttcttctttggatgctgaaccgaataggaacgacccatcaagcagctcgatctctactgtcgtcttagatgtcccgtctctgaccgggagcgaggtatctagaagtgaactgtcatcaaaaagcgaatcagcaacagcggcgctgccgcttggcggacaggcgactatcgttggcgatcaggtactcgttgtttcgaagaatgctgtcatggaggagaccgtcccggttgatgttcctatggtcgatgccgaagtttcaaagccggtgaatggagagcaagcggagaaggaaggtatagtggtggaagaggaagaaacggaagaaccagtggaagggatgaaaaggacagacaaggaagaggagagtaaggttgttgatctttctcagatacctctggaaaagatggtagagtcactcagcgaggaggacgtatacgcactgatcaagtcccgggttcaaggcgaaagcatccaacgttcgcttgctgaattaaatgcaacgatcgtggtatccaaccattcttctcaacctggcttgtcgaaaaagatgtctcccgaactttcattgttgctccgatcgtctgagctcgaggccgactctgcttcacatcgccaaccatctttggatctccctgagtttgaaggacggccttcgaggacggagagcgcgaacgttcggtcatatgttcaaacgcaacttcaacgttcagctgaaagccggctcaccaagatcaaacgacttcaagacgaatatcggatgttcaatgatgaatggcagacaaattgtcgacgactcgagcgggcgtctgagaaacaacgatcgaaacagcaaccgactggttcttctttcgcccgtgcatcgaattattcttctggcgcgctccttacacccagcgttccgttcttggatgatcttcgaccgtccagaggatctagatcgacgagaaacaacaaccaggaccttggatactttgcagccgattcggttcggtccgaagcagaatttcagtcgatcctcgcttcattggaagacgctgattatagagatcctaaccttcgagcggccaggacgacggttcaggtgccagatatgattcttgatgatatggagcgaacaaaggattcgtacgatgattcgaactgtcttgtcgaggatccagaaagcttctttcatattcagcagtccccggatgtctggacagaagaggagagagctatctttgagaagagatttgcatcccatccgaagcagtttggttagtctcgttcttctcttttttttcctgttcgtctttctttcttggctgatcacatttgtcttattatttttacaggtaaaatcgccgaccatttatcaaacaagacggcctctcagtgcgtcctcttctactaccggacgaagaagacggtcgattaccgaacgattgtcgcgcagcgaggaggtgcccacaagcggaggggtggtcgacgagctgctaccaaaggatcttccttgcttgcaaacctcaaccacaaacggacgaaaccttctagggaggacactgtgtccggaacggctagtcctcgtggggaggcagataactcggccgcgctaaacacccctgtcgaagcccctcttgcgacgcctgtgtccgaacgtccgcccacagcaaaaaagagcagagcggggacatcgactgaatctttgatgacagcaagttctgcaggcttgatggactctaagctgggtgtctcgtcgtcgaatcaaccgaacgggtcgaacagtcgactctctttagaagatctggcggatgtggcttcacttaataaggaaccttcttcgggtaatgacgcattggcagctgccgagttgctcgctactttggctgggccagcccatcaggttgagaacgatccgtccttggtggaatcttctcggaagaaacagaaacgtcggaaaccagggttggagggggtgtctagctctcggaagaagcccactaatggtgagggtggtggaggggccgatagggagaaccgaaagatctcgctcgatcaggttgccaacggagacggaccaggaaaggataaagcccaacgaaagaaagccacggtcagctcttactggtcgacggcagaaaaagctggcttcctacaaggtctagcaaagtttggaaaagagtggacggcagtatcgcagtatttggggggtgccaaaacagcggttcaagtcagaaattactttcacaccaatcatgaggccctagggttggaagctgttgcccaggcggcacctgctatttctagtctcccaatgggtgtaaagaacggaatggacgagatggtatgtggctcaaccttctttcgattcaatctaaaatcctggaaacaaaacttatgtaaccttctgctttctgaactttgttctatttcattttctctaaagacccctatgaagtcgcatctgtcccaacctacgttctacacctacccgcacagtgcgaaccttcataaagccgattccgattcccagtcacggcctcgatcaggtataaatatcatgagccttcttaatacgccatccgaccaagcaacagaggatcgtcaacgaaaggcctcgctttctacctggttcgacgacgacacacccgtccgaccaatctcctctggctcactcggacggcccgctcttcagcctggaatgaccgaggggcttattcagttcccttcttcgtccacgaccgcatcgtcgacttcacgaattggtattggaaacggtactccgctcgatatcacttccagatccaacgcgatcgcttctcctggcggggtgtttgagtcggccgccacgttaggaaatcatccgcacccagaagcaaacttcccgattcctccgatccactcaggaactcattcatgggggctgacgtatccaacatcggctattcaggaagaatccttcagatatcaccaccacccaatgcattcgcctttcggttcacgtccaacccctcctccttctactactgcgccgacatcttcatcttcttcccaaccgattcatcaccatccctccggaaccggcccagccgcaagtggaatagattctaaaaacggacatcctatcgctggcgggttcagtttatctacgtacccttcttctaatcatggtcaccaacctccgaacgccaatcagaacgcgagcaaccctttttataatactggaaggtatgaaaatggaggttctgcaggagggacaacgagaaaaccaagtccggggtggtttgaaccttcgggatctggtttcggtcctagtcttggtcctggcgtgacacctccttccttacgttcagcttctcccacacctgcttccggtcctggtcttgggcctccaaccccttcatcgcctacgaagacagcgatggcggcagcaacctctgaagagaagaagaaatgaccgttcgatcaacatccagattgtttcattcatttgataaacttctctttctcgctgtttttccataagttcctctactccttcacttttctcatcccttcttcgttctatctggtccgctttcttggtcttctttgatcgatcttgtttctgccttgcttcctcgctctagtatacctcaacaacctttcttcctttcgttttctgtctcttttcttgggtctttcaaacctccttctgggattatatcatcgcctatctcgtcttctctgatttcctccactatcaaaaataaatgaagacttcgttccctttgttctcgactttggtcctgatgtgtactcggttctttttttttctttatcgcgccagcaaatttaactcagtcgccatattctttgccgattcttgttcccttcagaaccacttagtcacagttcatctgtccgtctttttgatctgtccgacatttctgcttgttcgtaatccgctcgtcaagtaaacggaatgggtagcaagaaaaagaaaagtctaccttctaaaagagaattcatgagagaacgatacagacggaagaaggggtaaggaaagcgctgagacgtgcagcgatagagaatgctacaaaacctagggaatccgtagtgtcttccctggaaagaagaatgatgtaagatgaaatattaaaaggaaaggaaaggaaaagatacgctcggtgtagatgacatctcttagacaaaagatggagacagagacacgagtggaaggagggtatattcacggccggccagaatcgatgatcgatcgatggtggatagccgaatacaagagagtgacgatagataaataagaggattacaaggacagggccgtgtagactataggcgaggacatcaatttcgcggacgagaataagaaggaacagacaagactataggcggcggagatcggaagcgacaatgaggatgatctaatgggcgatgcaggaggtgtgatcgtcagaaaggatccaagagtcggaaacactgatagtagggtcaatcacaaagttaagttagttgataagatcataaagactgaaagcaaaaggatccggttaaatcaagtcaatgaacgcaccaagcctccacagcgcaaactccagcggagcaagatacactatcgttgtatcggtggtagattgagagaggtatcagatgtgttcggtctcatgcttaacagtcgcgatagagttacttacgtggaaacaccttccaagaccgagcaatcgactccgagactgacaggagcgaccgagacaccaagagaaatagaagcaagaagctcatcggaagcagggcatcctccacctaaatatcgaaaaagaaccaacatacgtgagaacgagttttcttgttctaccctgtgtcctcatgagaaacagaagaaagatagttgacgtacaagtctcgagtcccttgaaagtgttgacacactcccaaccattgactggggtcttgcccttgggcaagagccccccgactgggcaaagctcaaacccgggctggttgcagagctcccgctgcctaaggaaagcccttctgtctgggctaagcgcccgagcggatggagcgggggtagaacacacaccggtggaagcgttgagtgttgatccagccgggcactatgagagacatacgccagaatgttcttgtgagcgtcgtatccaagggcagatatgggatatgggagaacgaaccttgaccccacagatttgggaccccttggcattgcagactcgagttcctcgggtcagaataggacaagtctgtctttttgtttgatttttgatctgttgtattcacgaggcggcgcagaagcgtgtgtgaacatcattgttagatgggatacccacatcaacctgcgtgacggagcttcgggacaccgaagatgaatatagggtctgtacaaaccatagtggtgtaaccgtcgatgaccttctgtgtggcagccaactgactcaaccccttcttctgggtcagaaggttgacgaacttctgagcagtggcgtcggaggcgacaaagtctgagtaaccaacacatgaagcgcagacgaccgaggggtgagatattcaacagtgttaacactgtactaattaactgcattgtttcggatagatctaggatcaataaagtaaagaaggaaacctaccggcgacgagcgagacacacaaactagaacagcaggaccatgaacacgaacatatgttgagtttatcgggtactgatgcggatatagtagaggtaacggatgaagacataccagatgtcaatgtcgacgtgcagagagattcccaacagagtcaacaagatttgatcgaggtcgagtaaggcagtgagctgagcagcaatgtcgacctggtatcattgtgtgatcggaggggtataggtcagatttagagtgcctgaattggaattcagaagaaaaatagggcataccttggtgacaacacaaatgtccaattctgcggcgacagcgaccgtgtttcgctccatcagggcaggaaggtcgttgggcgtagggcggagaccatgagcgacagaggcaagaagcgaggtcaaagcaacgatagggatagcaatcttcatgatggttatcaggtacggtctgttatgtaaatgagagtgtggagagagagagagaaggtgtttgtagtttcgtaagaagcaaaaaggaaagtgggctggtcggaatagacagacacagagaaagagagcgaggtaagaggtaagaggtaagaagacagcgatgaggtataggacagagaagaggaagaggaagaacgataacggagaggaagggaatttctggttcgccctttaagaggtattttgaaagtagtaggaccgaatggtcgaacggttcctttgttgacgaggaaaacagtgaccatcaggaacgtcggcaagaaggaggaaccaggggggcacagtttcatatgcgctcggcagagataggcaaccgacccatgagaaggataagggacgctgagaggaacccatctgctgtttgtcagtaagttgagtcagtcgggttagtcaggtcagtcggtcggtcggttcttctaagcctgggcagagcaagattagcgttggacgattgacacagccggttgacaataaccacagttgcttcgaaggatgagatgtagacagggagtttgtcaagatggaatttgtgttagtagatgaatgtttattcttcttgatcagtgagtacgtgtgtatgcgtatatgcgtgtgtgggagaaagcaaggaaaaggaggttagggagcagagaaatcgatagaatttctacaatccacgtgcatagatgtagcagagagacgactcaaggatgtactacaaacataccacagacatagtgcaaacacactacaaaagcaggccacaagattactacgcacccatcacagaagaccacaacagcatgacacgttcagaagagcctagcccctttaaggggttactgcgtaaagactaaagccagttgatgatgtcaccgcacgcagtttatccggacccgcgcagcctcacgccttacacacacactcttacatccaaagcgataccttttttttctctcctcatccttctctccaacactcagaactcatcaacacccaatttgtgtgcacgtataccctagcgcgcataaagccttacacatctgctcttccataaactctgcctgaactcacatttctccagtcatgtctgctttgaaacaatctttggccatctcgtcgcttccttcatcgagttctaccacggccggcaactccaccaaaggatctaacgaccagccattgagttcgccagcctcaaatagcatccctggatcccctggatctccatcagatatccatcagcccaccacgtttaaccttgggaagcgttatcgaccgtacgtctctctttatcacggcccttccgcacgcctttcttgttattcgtctggctaaccgtcgagcgacttttcttctcttcttcctttctttttctttttctttttttccttccttctctggcgtccttcgaacaggactcctcttccaacaccatctgtcgagtcttccaacatagaacccgcatttgggagagatgaactgagcacattgacttcggtcgacaactcttcctcgaatgagacaaactctgcgccctcgaacgcctccgctgatgcgcccttgaccgccgcagattctccattgaagaagattctggtccggcggtcgaccggcaagggatttagggtccaagaaccagaggataacagttcgaacccagaatcaacctcctgcccatcgccctccgtcctcaactctagttccagcgccagttctgatcccacgtccctagctctcaacccggactcgaccgttccaccggaagaagagacgagtgaggctcggaagaagattgattcgtccaaggagaaacacaaggtgctggccgctgcagcagaagacgagatcatcgctcctccttcgcttcctccgttggaggccgagccgactggtccagtcgagccagaactgtctcctgggtggtctccatcaaccgagtcagagtcgatggcatccacggtgactccctctccgtcggaacactctgagccttccgaattggcggctcaggtgtacccgacggaacacacgctcaccaatagtaacatcggtacaccagaagaggagaagccgataaagaattataagcgggatatgcaggcccatacccaacggatgattagccagttcggtgggttaaatatcaggaagtaaaacacctcttccgaatactcgagctgggctctcttttattcttgtgatagatcgtccggttggaaggatcatcttttgagttgttccccttttggctgtctccttccctctgtctctcttttttgtagcttttccacgacgaccaacgagcttcatagatcttggattcgcacgagccatgttttcgttgattttttcttcaggttgaatctatcactatctcttccagataaatctgtcccttgtgatttctctttttcttctctcattaactctttccttgtcctgatcctttctccggcgaactatactgtatatctagacaaactcttttctttttcattcttctttccctcctttctttcctccccttcttcctatacgctctgtccgtctgtcgacgcatgaaagcgcatatatcttaatcctctaaacatcctatagagcctcgatggaagatcaaattttcccctcaaaagtcatcgttgctatcatccttatcgccgttgtcgttgtcattatgtttagtaccaagaacaagggctgagaagccaaagaagagaactatcaaggaagagtcttccttcgctggtcagttaggtgtgatatcggtccggtttggtcaaggaaccctgcttgacgtttccttgggaggagacgtggagggacttataatcagccaggatctatgaagcttgtccggtagatgaacatgatgatgaccagaagaagataggtgatgggtgtgaatacgatcttacaaagggcttcagaccgacgaaggcccgatcacggtctttttcctctactcccggactcgctttcggactcagccgatcgaggataggggtaacagcgtgataaacatgagacaaaaaaatagacagccaaggctggctggatacatgtcaagacaacaaacgccttatgaaatgttgaactcttgttttgttttcctttttgtgaacgaccatgttttctaacgtgtgtcttgtttggctgcatagatcgttgtaaccaaagaaaagggagagaaaaactcatgtctaagcggtatagaatatgaagactttttgtaaaaatgtgcacccggtcaaaaatagaaacgacgatagaaggaaatgaccaaaatgaaagagcgaaaccaaaggcactcgagcgaagaaaaaagaagcaaacaaaagttttacaatgaaccaaatatggaaaaagagaataaaataagattagatgcagtggggtttatttcagatgttttattgtagaagtaatgaagaggaagcatagagatcaccggaaagagattagaaaagaaaactgtggctgaaaagagagtaaacaccaggcgcctagtggtcgtgggaagaggagttgacgtagtcctcatcggactcgtttgagatatcctcgagggatcgacccatggtctcgggaatgagaagggtggagaagataccggtaagcatgaagaaggcgaagagctccatgatgtgcttgacgaattttccggttcctccgatatccttaagtcgggagaatccaacctgggcgacgatggctccgagcttaccagaggcagcagagattccgtgggaggtagctcggtatcgagtggggaaggcctctccggggatgacgaaggtggtggtgttgggtccgaagttctggaagaagttggccatgcagtagaagaagatgaaggccttgctgccggaagcggtcttgaggagagcgtcgtaaccgaaaccgagaatacagaagatgatggtgaggaggacgaatcccatgagctgaataggctttcggccccagaaatcgatgaacgcaaaggtgaaccagtaaccggggatcagaccaccagcagagaggatcatgtttccgatggcgttatcgtggagcttcttccaagcaccgaactgaggggtagaacccttgggggcggctcctccgtagccgatagtggtcaagatgatggacgagttaagaccgagaccgtagaaggcgacgtcaagcgcgaaccaagaccaagcgcaaccgaggaggatcttgaggttcgaccacttggagttgtgccggatgaaatcccttcgggacgccttcgggacctcgactcgctcgacgacggcatcagggtcgttgtagtaggtaccggtggtgaccgaggtgtgggcatcttgagcggccttggcaacatctcgttcaacgtcgacagtgtatctgggggattcagagatggtgagtcggtagtaaagggcaatcactccgggcacgcaaccgagtccgatgagcaatcgccagcagacgtcaatgtggtagtactcagtggtgctgtcgttgaggatctgcttcttgtaggcggaaacaacgatgaacgagaccaaggcggcagcaaagttaccgaaaccctgggcggcgaatacggcggtcatcattcgtcctctgatcttggtggaagcaaactcggaagagatggtggccgagagagggtagtctcctccgataccgagtcccatgatgaatcgccagaagatgatgactccgatgacgtggctggaaggaccggatccggcaatggcctgaccaagggtggcaatgatgataatcatcaactcgactccgtacatcttctttcgtccaaccctatcggcgaggtaaccgaacaagagctgaccgatgagggtaccacatggggtggccactggaaggagacatcggagagtacacacggtgagcatccagggttggaagagaaacagaaccaagagagggcgcgcgagataacagaaaacgtacccttgataccgagatcctggttagcggtgagggcgtggttgtgtccgtagacgtatccgatcatagcagaggccatgttgatggcaaagatatcgtaagcatcggtgaagaaaccgacaccggcgacaatacaggtcttgacgtggaaccaactagaaaaggagtaataataagaacgatgagaaagggccagtcagtcagctgagaaccattcggcgccatttaacaaaagctaaagaagaacgcacgagaacgaagcctcgtcgagctctcggagggcagccaaacgcttcatctccggggactggtaatcagagcccaacttggactctttgtgcgcatcagaggtgtactcgatgtcggtcgacattttgataggaagatggggaggagagaaaagggaggagggagagagggagaaaacgaccagggaactaaaagaggcagaaggaaagggtttgggtagagcctttctgagagaggtgagctgctttctgatgataagaagagaagaagggaggaaacagaatgtcttaacgagttcttatagcacaattgaatccgttctggaatcgatcgtgtggcatctttttttttttgccttggaatcaattttttgcgctgctttgtttgatataatccgtcttgcaacgtgcaaagaaaaacgagcgggatgatctgaaaagagaaggcgaggagcgaagaagcgaagaggatcggaaggaagaagacgtgcacagagagagagcgcgtagactttggcgagacagccagagaggcatcagtctatttttagtaacaacggcgtgagcagtaagcggtcagtaggtgggtgggtagatgaggtgtctgagcaggtgcctgtgcctatgaggctgatcagtaggtcatccatgggggtttaagccgcgagtgagtgtccaaagccaaggttaaacaaaaccgaaaatgagggaaacaggagcaaacgccgtgtgagggcagagaaaaaaggggaaagggagaagagacttggcgatttaggaacgttcgtcagtttatctctgggcacgttcagtctctctctttaaatctccttgggcgcagtagataagttcaagaacgtgtttgagttgttgattaggtaagtgatgccttcttgtcacgtggctttcctccagctgcctacctggcctccaccgtgcgtctggtgtttttgctctctttgtttgaagcatcataggggacgaaacggaagagacctggaacgatcttgcttctctctcttcgaacggtcttgctctgttctctgtgtgcgcgtgcgcgtgcgtgtgcgtgtgtgtattcctgagtctccttctagggccgttctaatttggaagatcctctcggttagggttctgccgaagatcattacctctccttatatccgagaatgttgtaaacattactcattattcccaagttctgtcatgtatgagttcggatttttctacctcttgccttattttctccctcatttgcttctccctctaccttgttccttccctcctgtctctcttcttccttccatttctttctctctctacaatgagagacagagaacaagagaaggaaagatcataaaagacgtggcttattatcgagacaacttatccaggcagtaagaagggaggaggaaatagtcaggccagggagttttaaagtggaaacgaacaggaaagattcaacaaatgcatcgatgacaagtgagaaatgagacggacagacacgccctcaaactaaagcatgaatggagttttggggtaaacaaaaaacaaaagaacggaagcaacaagaaaaaagacaaaggagaaagcggaatctagatgtcatcaatatcagaatctcctccgaactcgactccgtcgtcctctccgtcatcaccgaacgtctcggtctcgttgatcttggccgtcgtgggcaactctccgtagttcttcaagtttcgagccttggggttttatttatttgcagtggcaagaacataaatccattcagtcagtatcctgtgcctcaggcccaccgagagcttaaacagaactcacctcatctgaagtgtacttgacgagcacatctgctttctcgtcctggaaatctcgaagagagatcagaatgatatcaccctgggtgatccagacctatatagagcaggaaaccgcaagaacagtaagaacaagacttttcttctttcttctgtaatcaccccctctattcgttctatcaacccaccttctttctcagtcgacctcggatctgagcaattcgagtctctccgtcaaagcacagtgcctcgactcggccgtttccgagcatcttctggacctgggcgtactctgaaaagatcaagaaaagtacatgagaggtgttagcgtttgaagtctattctcaaacggtttcttttgattctttcctccttctttctcgttcttccttccgtttccttttcctcgttctcttttttctttttttcctttcccttcctctttctatcgtcacgcgacctatatttctggtaataggctcgggataacttcgagatcgcttctaggaactattctcgcaaggtggatggatcgcaactccagcaaacatattcgactagcttcatctgcgtaaaagaaaagagaacccaacagaaagcccactcccgaggaagagacgggataaagaagaggagtagagatgagacaagagagaggaaaaaagaagataaacgaaccctgtccgtcctccttgaagacgagctctcgcttatcttcatcggcctcgttctttcctctccttctgttctttcctccctaggtagtcgaatgaaggtattccgtaccaaaggtggtggagtgaatgagcgatagacgataaaacaaagatcgaccgatggaaaacaaggatgagacaagacgtgagaaaaaagagaggtatcccgtcagtgcttgtcctcttatagtccattctcttgcccttcatagactctgtccgtttcgcgttctttcaagcctgccacttctctttgtcgaatcaaagatcaaagaatgaagaaaaaagaaggaaaacacgaacttttcctttggcctatttggcagtacacatatacatgaagaagaagcaagcacgatgagtaaatcaaagctctatggaatcgaccacaacatacgattcctcagaacaaacgaagcgacctactttgggcatgactgatagtgtctagagactgtggaagagaggcaaaaaagactgctcgtggcgaaagatagaaaggacgagtcaaaaaggcaagacgtcaactttttgggacactggcacggtcatcagtaaccgagttgacttggttacatcacatgttagggttatcgtcagacgcgtcctccctttcattgtttttccatcctctcgccgtcaagacttgcctcgtttggatcaaggcatttgtcttcttttgttggacaaaatcgcacacgcacacgaacataactatacacatacacagtttcttctgagcggaactatcacaagctcacactctcgaatacatcacgatgagcgactctgaggacgacgacgtttttgagatcgaggatgacgattcggatgcctttgtggctaacactcctccggcaaagaaacaggttggtcttctatcatttttctcttttggcgcgctttagtttcttctttccaaacgtatctctcaagggtaccacatccagagagaagagggagtaagaaattacctcctggagactacaatagttcctaagaggctcgtgttctgtgaagcctgggtggctaatacgccgaaaggtttgaccccgttcgattctagcttaatggtttgactgatgctcgcattgttttcttcctatccaatcgcttctcctgtaataccatgtcggacgttcatccagaaagttgctgctgccgccaaatcgaagtctgtcgctgctgctgcatcagccaaagcgtccaacaaacctaaggccgcaccaaagaaggcggctggatcgaaagccaaagctgccgtctcctcggctgggcaagataccgatacggacgatggcgacggcgatagccctgtttcaaagcccttccagccgtctttagaaaacaatgggcaagcaggaaaaggaaagagcgcaagtgaaatgtatcagaaggtttgtttgtttgtttctccatataatgatctccaacccccttgcctcggtctgatagagtatcgaagattgactatatgcggtttggcccattcgaggttctctagctatctcaaatcgagcatatcctcaaaagaccggattcatacattggttctgtgcaatctctcacccaggacatgtgggtgttcaattcaaacaccaaaaagatggtttataagtgggtccttcttcatagctcttctccattgacctcgcccaaacactcatatcatctacttctcgccttttttgttaaagaactgttacatttgttccaggattcttcaagatctttgacgaaattcttgtcaacgcggcagacaacaagattaatgattcctcgatggatactttcaaagtcgctattgaccgagagaagaagtcgatatccgttatgaacaacggaaagggaattccgatcgagatgcactcgaaggaaaagatgtggatcccggagatgatctttggtcatctgtgagtctatccggttagcgaattccaacttatctgtaacgtactccgactgattggatgactcgtggtgcgcgattcaagcttgacatcatccaattacgatgatgatgagaaaaagttgacgggtggtcgaaacggttatggtgcaaagctcacaaacatctactctcttgaattcagtaagtctcagtttattctcgaattttttttcatttctttttaataagcattactaacctcaatttacatgccacgactgaccacctctcagctgtggaaacggccgataagaacaccggccagaagttcgtacaaacgttttctgagaatatgtcgaaacggtctaaaccgaaggtccgtctctgtgctctcactagactctcgacactcgactcactaatgttcgagaggcgtgttttttagatcaccgcaaatccgaagaacgaagaatatacaaagatcacatacaagcctgatctcgccagattcggcatgaccgagatcgacgacgacaccttttcgttgctcacaaagagagtgtacgatatggccggtaccgtccgtggagtacgcgtgttccttgacggaacaaagctcaaggtagacggatttaaaaaggcaagttctctctcatgcgcgcgcctataccctcttaattgaaccaggtcgttcattgttgaaacaatagctaaccctgaggtcgccgtatttgatggacgcgtgaattcttgaaaaaccccagtatgtggaaatgtacctattcgctgccgcagatgctgcgacggaagccggtgccggtgcaggagctgtctcgaagagcagcgtcgttttcgaacaagtcaatgaacgttgggaaatcgcgttcgctctcgcacccgaacaggagttcactcaggtttcgttcgtcaactcaatctcgaccatcaaaggaggtacccatgtcgagagcattgcctccgccttggctgaaaaattgtatgtatctcccttattactttgacgttctttaaattccccaaacaaagaaaagaagaaaagattttttcactcatctcaaggggagggccattttcttgtttctgttctcaggctagtccctattctcaagaagaacaaagcagccactgtcaaggtctcccagatcaagaaccacatgtgggtcttcgtcaacgcactcatcgagaacccggctttcgattcgcagacaaaggaaactttgaataccaagaggtctcattttggaagcaaatgtcctatcagcgaggattttgttaagaaaggtaggccagaaatcatcagctgagcattgtgtaccagagctaacgcaagtttgacaatgttttcagtcatcaagactggtattgttgatgaagtcttgtcttgggcaaaattcaaacaggagaaggatatgaagaagactgatggtggaaagaaagctaggtacgcagcttgtcatctatctttcgtcgccatacaatctacccaacattaaatctcattctccaccacaaaccagaatttccggtattctgaagcttgaagacgccaatctggcaggaacgaagaacgggaaggactgcacattgatcttgacggaaggagattctgccaaatccatggttgtctccgggtttgacatcgtcggcagagatcgctttggagtttttcctctcaggggtaagctattgaatgtgcgagaggctacgggagaacaactgatgaagaaccaggagatcaagaatttgaagcagattatggggctgaaggaaggtgttacatacacaagcgtggacaagttgagatacggaagtttgatgatcatgaccgatcaggtatatatatactctcttcctagttctcctgtcttcaatacatattgacatttattattcaacacactcatgttcatctcactcgatcgaaatgcttcaggatcatgatggttctcatattaaaggccttctcatcaatttcctggatcatttctacccttccttgctgaagattcctggcttcttggtcgagtttatcacccctatcatcagggttcggcttacttgttatatcttgaaagatcttgacctgtttgtgctgactttgagggtatcgttgttgatataggcagttaaaggaaaagtagtaaaggacttctacaccttacccgagttcggggagtggagagaggctaataatgatgcaagggggtggtatatcaagtatctgaaggttggttgttcactattcattcctggcaattcatcaatacttaagtttgtgtattcacgcatgtctttatagggtttgggaacgagtgacgctgaagacggtaaaaagtacttctcggatctaggcaagcatatgttgacgtttgataccatcaaggaaggggaccgagacttgattgatcttgcattcaacaaaaagaaggcagatgaccgtaaggagtggttgagattgttcaaggtttgtaaatctcttccattttcttttcgttgcagcatggctgcaaacttttctaggtcaatcaattcttacaaaaaattatatctttcagcctggaacgttcttggatcagtccatcaagaccattccatattctgactttatcaacaaagaacttatcttgttctccatggctgacaacatccgatcgatcccctctgttgtcgatggcctgaagcctggtcaaaggaaggtgctctacgggtgctatctaaagaaactgaaaacagagatcaaagtaagcgcctagatcttgtttaagggagataaaccagatttataaaccagcgtttgtccttcaggtcgtccaacttgcaggtttcatttcagagaaggccgcatatcaccacggggacgtgagtctgcaaactaccattattgggcttgcccagaattatatcggatcgaacaacatcaaccttctcgttccctccggccaatacggtagtcgagcagaggttagtaagcatcctacaacagataagagaggaagaaatcaagtttctgatgtgcttgcatcgggctctcatcaaatattcagggaggaaaggaccacgccgctcctcgttatatcttcacaaatcttaccccaatcaaccgaaccatcttccatcctcacgatgatgctgttcttaactatctgacggatgacaacgacacggtggagcccgagtggtatgttcctgtcatccccatggttcttgtgaacggagccgatggtattggaacaggtgagtctagtttcttcagtacctccgatcatacggtcttccgtacttctgctgccttcattgagaccgctgttgattttcggatctgtgattctcaattaggctggagtactcaaattcctaactataatcctgccgagatcgtggacaatattcgaagaattatgagaggcgagccgcagaagaggatcgatccttggttccgaggatacaatgtatgtcttactgaatgttctgcttcaacgtacgtatcgactgacatggtctcatcatcaaactatctagggaactatcaccaggaatgcagacgacaaatacactgtgtctgggcgtttggaaaagaccgacgatgagacggtggtggtcaccgagttacccattcggaaatggacgatcgactacaaagcaatgctcgaagcctggatcgcaggaactgataaaactgagcctctaatcaaggtctgtgcctcttctagtgcatccccgctaatacgccggtactaaaatgcatggtttctttcaagtcttatgacgagcttcacacagcacaatcggtcaagtttgtcgtcaagatgtcttctaaacagatgaagtctgccgaagacgaaggactagacaagcgattcaaaattcactccacgcttagtgttaccaacatggtctgcttcgacccacaaggaaggataaagaggtatgctacccctgagcagatcatcgaagagttctatggtgtgcgactagagtattatatcaagcgaaaggtaagccaataatttcctcgactaaattttgatactgggttacttatgcatcacttgtatacttcgaattcaaggaaaaactcataaatgagatcaatgaccagtacgagaagctgtccaaccaagcgcgtttcgtgcaggtatgtctactcactatcttgattcatcatccatcaacatacttgatctaataatcaatctgtgacagatgtgcatcgacggggagctcgttatctccaaccgaaagacggccgccatcgtcgatgaacttcgaaagcttaaattccgacctttccctatcaaaggggctgctcgcgaggcgggtgaagatgaagatgttctggacgaagaggatgatggcttggccagtgattataattatctacttgggatggccatccgaagtctaactgccgagaaggtgcgtctaagctgtcaactatgtctcgaagacccaactgatctgtagttgagtacaatcttctttgttctttggggaattttgcatattataggttcaaaaactcctgaatgctcaagaggagaaacgatctgaattggatgagctccttcgaaagaccccgatggacttgtggaatgttgatctggatagtttccttgcagagtgggaggtcggtctgattcaattctgttattgtccttcagaaagttctcgtgactcaaatgcatcttcgtcgttattcttttcacagctcattcttaagaaggatgcagagattgcggccggcagtaccttccagagatccaaaaccaaaggaaaagccctcgccactaaggctcttgctaagatcaagaagggcaaggctctggacgacgatgatgatgatagtggcgatgactttgtagctccctccaagaaggtcgctgctgtcaagcggaaggctcctgcgacaaagcccaagattgagccgaaagtagaagaaatgtgagtgatcctaggtacttgatatccacgtcgaattctctcgtattaactacctgaccgtgcgcatctttggtcacatacagggatcttgaggacggtttaataaagaaagaaagtacgtagttcttgtttctagcggacaaaatatggttgatctgatcgggttatcttatgcaaatctgatagaatctgtcaagattcccccagcaaccaagccaaagtctaagtctgctgttctcagcgacgatgaaatcgataagagtgagtgaacatttcctcttctttgatccaaaccttgactgagaccttgtgagtctttgttttagaacctatccgagcacccactaagcctaaagcaaagatctcggctgttctgaccgacgatgaagaagaggaagaaccaagtgagtgtttgatgatctcctgtcttctcggcgatggatgttatagacaaggacgatgtgcttactccctttttctgtagaacctgctaaagctgttcccaagagcaagacgaaatcgtcgatcgttctgagtggggatgagaatgtcgaggatgatgatgatgattatagtgttatgatggctagtcagtcgatctttttctcttattagctatttaacgcgatgaaaagccacattgatgaagctgttctggcgtcatgtaactgattgctaaccaaattttttctgtccctttacttccggttttgatgtctgtctgtatgtgcctcgaaaatagaatcaaaagccaaacctgtttcttccacctcctctaccagcaagaagtcacctcgggcgacttctaagccagctgttaagaaaccaacggcagcggcctcaaagaaggcaggagctgtgaagaagaaagcggaatccgacgaggaagactttgatctgtgagcattctccttctactgtcttcgggaatgcaagaagagagcgggaagtgaagacaaaggtgagctgactgagaattttcatcagatcaatggatatggacatccctccgccggcagcctctcggtctaaacgagcggcggcagccaccaaacctcgatacgtaccggcttatgtagatttgtaagtatctctctttcctttcttttttaaatttccctcagaggttgaataatgggaaaagataggctaatcttgttcttcctctcctggatcaatttagatctgacgatgaatagaaagtcatgctatcattatctggtcatcctgtctcgctcccttttcacttcttctatgttttctcttttttcctttcattttcattttgttcagttcccaagccttctctccgatttccctttctcctctgatctggacgatacgtgttgatatccctttccttatctccctctatatctaactctctatctatcgaaccgttggacctatcaagccgactaccatgagtctacccgacggggatgaagaaccactagcagacagtaaacaaggaaaataatgacgagactgaaacagaacaaagaacaacgataaagaaatttagggctacaatatagaagtgatcgacgagtgatttcactctgactcgtcagtggtgtccccgatagagactagctcagagataggttttttgtcctccacgacgcttttgacatctaccaggacgtcatcgaatgagcggaacatcctatgcttgattttttccttcacctgtgagtgtgtgagtgtgtgtgtgtgtgtgtgtgttgtatttggccatatagaggagataaatttctttagtaagtccagggctaattcatgaaacaacagagagaacggtaattgacgcacgcagtaagccctcagatcattctctgcacctttatccttgacgaacaacatgtccgcatgagaagctgcactaagatctatagtcgtgggcaaggggaagaacgatcagataggctaatcccttttctaagaacgggagggcgatcggctggaacataccagacaccccgtcacccatgaagaatgtggtaggagggttcggcaggtttgcgtaaggaaggatagctttggacttgtcgtgtccgaattcactaggttgtgatttgacagatgtggtgaggtgatagcgcgtcaaaagaggagaatccacacaaggagtcaaacaatcaaataggtaagtatatacctctcaggatgcctaaaaactatttcccatgtatctccctgctgcttttcgtcggtaaacttgacatcgtttgcgatgatctcaatcttggacgcttcctcctcgccgatcaagttcgatagcaccgctcggactggttacagtcacgatgacgacatggcaagagatcgtgatcagagtcatatactcaaacgcaagtcgataggaatcgtccggcttactgagaggagtcattccactatagaaaacgaagcgaagaagagaacagaggagtcaacactgatggtttggcccatagagaaaagtaggacaaccaaaagaagagagcctgacgaagagacaatgatcacaggaatcttgttttccttgcagtatgcatagaagtttttgaacccagggtcgagccgaacgttctctcgaagaatttgagcgcactcagggaagggtatcttgactgattccaacatctgtcggaacgagtctctgtatcagggttccaatttcgatgaattacgaagtgagttatattcgaccgggcgaaggatgcactcataatgatagagaaatgtgactgagaaggacgatgacaaacctgaagccaatatggcccatgagacaacttgtgttcagctctcgcctcttctgtttcccaaagcctagattgtcggtcagataatcgttcgagtccgtgttggtgatcgttccgtcccagtctgacagaacgacgctgttcgtttccgggcgaggtgaaataatcagctccagcgctcaaggaagggagcgaagaacaagacttacaacggagcatcagtatggagaggaggcagaggaagaacagacatcgtttgagaagagcacaatgaaag

SEQ ID NO: 2528 - DNA, 42091 bp, Xanthophyllomyces dendrorhous
gcacaatgaaagaaaagatgagaacgagagaaaggagagaggaagaaaaaacgtagagagatcaagagatggaatctaggaacaggaacgggaattagaagcaggaacggtcatggttacatcttgaacgtatctctgacaaaaaatgccgtaatgccgtaactgaccaggcctagaatgcataaccgaccgtagccgatccgggtagatagccggacgaagagtccttatcgatcctgttattccctgaccgacgtaatccgaggcggacatgatggtcggttgtgtgctgtgttttcgaaacagtacaccaagccatagtcttctttctctagccgcggctcccatcggtgacggcgatggcggtgatgatgatgatgtccatgacgaagacgacggaaagcataccgaatggggggatttatcctatgcgttcgaatggacgcgcataagtgtatagacgaacgacaaatcgatttcacgcgcacatgtcgcgcacatccaatttatctccttctttccctctaattttttttccttccgttgttctcagcgatcgtctacgggttctgctggctctttcagtttacgtctagacgatcgagttgttggaaaaattctgcaagaagatagcgagaaaacgtttacgtttagattgccaacgtctctctggtcgatctcgatctgatcccccttttttccctgttggcttctaccatctattcgtttctcgcgcgctcacgaagtgccctcactctcccctttatttttctccttttttccttatatcattccttgaacccttctctctcggtcctcctctcttcctctctttcttcttcataacagtccagccatcgaagtccttgtaactctccttctttcctctactcacctatccaaccattcttctctctgcctataatgagaattggcgcaatcaaaaagactatgcttcacctcggaaaccttcctcccaagcctaaagaggaacaacttctgagtgtggtccaagcacaaaagacaaactcgtccctggtgagcgcgtgcttgaacagaggggcccaataccgatctttagatatccggtggcccctcttcttatcatcgcttgtcttgacgtatagcacagatctaatcatatcctttcgaattcctcctttgataactgatagcctcctcggacgccctcaacgatcaatcccaacaaccctccttggtacgcttatcgtcctccgtgtttctgttccttgaagaatagcgtccctgactgaccatcaatcgtcatccccttccacaggccagcgttccgaggcaagttatgctacttatcttttcagagagaaacctcaaaagtgcaacattctcgtgatagccgtatactaactcattcgttatctctaggttaccacgaatttagtttcgctcatgcggtaagcgttaacttctttgacctcttgatacaacgcatctgagcaaaaggcattgattctttcctcttgagacactcaggtcatgggccaacggttacctaccatcctctccaaaggaatggatgataccatcaagactcttaatgagcaggtttgtctgtcaatatctatcaattcatgcgtcaaacagggctaataccttaacaacgttgcgatcgatcggttaccaaaaagtctgatgaggacctgatcgtcgaccttgttgcgtgtctcaacagaatggagcaactgatgagtgacttgtctaaagtcgctctgattagacccatcattgacgacggaacggatacggcgctctggaacaaggtattagcgcatataatcggatagaatcagctcgcgggtaaccattaatttgagaatagctaataagatgataactgtttgataggctatcgccagatacttccaagggaaagacttcatgagcgcgccttgggcaagcacttctatccacccgatctcataccgctctcaattctgatagctgataaattcttctgtctgatcatttattcatcagctcttcgccgaggcttacaaggtaaatcaagtttatcacaaacacccactaggctatgacctcttcgtgcgctaacttatcttgcgatcaattagtaccgacgactcagagagtgtttctctgtttccaagtactggacagactacgacatctttttcaggcagaaagtgtgtgagaatacttggctacaatcatcttgacttcgaccacttaccctttgtcgtgtggtcatctagtgtgatacgttcgctcgatcagccgatgccgtgtaagcctgccgttcctgtattgacttagctcaagctgtcatgccgctgtatggaaccagcagatctcacttctttgttcactctcatctctatcacacgaagctttgagctctctaccaggttctcctctccgttcgagtatgaagaaggcatgtctgaggaagaaaaaaaaaaggcaaggaagttgttgttcctagagctcacccagggtaagtctctctatgcttcatgtcgagatcactatgagttttttcccccttgcctaccgactgtatatctgctagtatgtctgtggggaaactcgaccgatctttccttgttgatcgacatgacggaggaacagatcaagagtttgcagtctactggaggggcttccctagctgctaccgaaaagaacattcgttagtgttcaaagtcatcctaggatcacatgttatgtattcagccatctgatccatccttccctggctttgtgctttcatcagtcggaaatgacctaggaaagatgtggaatttgatttcaaagaccaagaatggccgaattgactttgtacttgacaatgccggattcgagctgtacaccgatctcgtttatgccggttagtgttacaccttcgtctgagtatattaacggaagactgatgtttatgtgcgcttatggcttgtgttggctgttcatttagattggcttgtccaggctgggtaacgtccttctgatagcacattctttgactgatggcttctcaagattgagcctgctttccatctgtttttacgctcctcaatagaatcgcgtcatctgttcatttccagtacgtttggattgtgttcatcggagactttcctttctcagagcgtagatgtcttatgctaatccaaatgcgccatactctatgactatagtggaaaacgattgccttgtatgttcacctctcgacattcgtctcgagataagaattccatctcatattctttattcgcttgcatttttttgtcagggtttgtctctgatgttaccaagaaagattgggattggcgtaagtactttctgtcgatctcagtttaatgtattctcagatcttaccctcttcctgggcttttagtcctcaacagctgtgtctacggccaggttagtcccgctccacgtcaaaacccaatacgaaatgagctgaactctacataccgccttcatattcagctcttccccgaagcctcgcaggttgagatggagagcctaaggatcatggggaatagatggaagcaatatgagaaggagggcaagtgggtctacgaacgtgagtgtccgtttcgacctaagttctctgtttttctgagtgaggtctgatactttgatggtttggacggtcatgacatcccagagcatggtgagttttaaccttccgttttcggccgtcataggtactgtccactcatccacctgtatatcgtgcgctagccttctggactactgggtacacctttgtgagttctatcacatatttttcaggcaaattcttgagtagcctccacgacacttgggcatggatgactgacgcagcactggatgtgtctttaagtgggagctcatcaaagaagctcctgatctgttcctccacttgtccaagagtgatctcgtcatcttcaaaggagtcggtatagtttaactattatcatcgacgccacactcaagaccactgacagcacatgttctactggtcgttacaaacacaggatctcaaccaccgaaagctcacttatgactgccagtgcgtttggctttctgaatacacaacagatactttctctatcggtaatgaccgtttttttccttgtgatcttgaacagagcaccgagcacgacgtcctttgagaacgctattgggcccctttcgactgccgctggagcaccacctatcgtttctctccgagttattaaagctgacgtggtcgtcgggtatgttctttctgctactttttgtaccaaagggcgcttgtggctatgcttatgattgtttctatgatgactatccatagattgcctgagggcgtggccgatagactggataaggaagagcctgggtggttcgttaagctttctttaaacgagtatccaacggactgctgactttcaacaaaaattcccttggcatcacaggcgaatctctgccaaatatgccgtcgtccttctctccgaaggtaaacctgtaagccgtcttgtttgttgtctttggcctccatgccagaactctcctggtataaacaccgagagggttgatttgatgtcaataactaaagctgcgtgtggtgcttgaactgcctgatatcggtctttagggagagaacgtcgtatttgcctagatagtgctgaatcattcgtcgacgtcgtcccactaaacattgagcgagatatatttaaaattgattctctcatattctttcttttcataatcgtcctggatgtaaatcctagatttcgtacttttctccctcctttctctctcctctctgaatgtagtctttgtttgtactcgatgattatgtcagttatgttattatcgagagttcaaagatagagatcctcttctctaggtgagagttaggcgagaggggcaagcaaatagacatgacgcaagcgcagttgtttgcttcgttcaacgtcttttcattttggctcaatccggttagagtacacttaccgagcgagcactcgtcctttccttctcttacgtccgctcttccaacacactccctttctccctctcgtgttctttgagtcttcagcccattcagatgactcctcaactagccagcttgaccagtcaaatagcggctcgtctttctgcagaagtagagaccgacacagactcgtttactcaagcgaccaaccaggtccccagctctgtcaagataccttcaggacctacccccgagaaaccagaagcggttgccaaccaagacgggaacgttcctgcgcagcatgataggtctaattcttcttctgctggctcttcatccgtaggagcagatggacggaagggtgatggggtcgaaagagaacacgtaaagaaaggagatagagcaggagggatcgttcatgaacaacatacaaacggacacgtcaacggtcacgcgaacggtcaaatgaatgggaacgtacttgacaaaaaagaccacgataatgagactagaccaggagcgaaggaaggtcgaccggacgttcatcttcctgatacccataactcactcgattccgtctcacatccaccggacgacctgtctccctcaagggatggagctgacgagaaggaagaggaccgagccaaggatttctcggccaacacttacagcttaaagttccgaagcttggccggtggcgggaagggagtcagaatggagtcctatatgagtctgaaacagaacggtagggataagaagcttgacttgcagccgcctacaacagaagaacagggcgattcggatcttcaagaagggaacgaagaacaactcgaggagagaaaacaagcacagcatggccaggccaagaacggcatgctcacgtcgtccgacatcccaaaggtcggtcaaagtgcggaaccgacttcaccacaagtcgttcgaaaggactttgtttattccccgaatagtttaaccccttctgatggtcccactgggatcgatcaagaagagctcgacactttacctcctcttcatccggcttcggctccattcaaccaacataattcttttcgaacggccgatccagttctcacctccgccattcacgtgcctcacccttctcgatcctactcaatgccggtatctcatacttcgaacccgttcgatcgatcaccgtctactcagtttcatcagcgtcctcctgcgcgcaacgctccggcatcacagtttgaaggttcgaacgcttcggccgcctcacgttggggaacgctcagacagagacttcagctttcaaagaaagaaaaggataagcagaacgggagaagtgaggaggacaaggccggaataagtctgacagatgagctgatgatgggtaacctaggagtactgatcttgaaattggcgatcgagactgatgaaaagggcaggaagagggttcccgtatttctgcatcatatcaggtaacatcctgtctgatttcttctgaagcctactttcgatgtatctgcaaacgaaactactgatgttcatttggcctttcttttcttgtctctttctctatgttcaacagattcaaggtctctgattctatcggtggatcaggaaatcacccggtgttccgagtagaatgcgagtacggaaacggagctgtcaaatgggtgagtgcttgattacttgacacatccgacgagcatattctgagttttctcgtttttttttgcgcccggatctataaggtaatctaccgaagcctaagagacttcctctctctccatgcgcactataaagcctccagtctgactcggaacgtccccggaagaaataaggggacgaagggtactgtcgaacttccagagttccccagatctagtatgtacttttccttcttatgatttcctggttgatgttcacatcatagtattgacacagctgcttcatccctccttgcctgtaggtatcccatacttccgtaataagagaaaagcttcttccggtccgaaagaaaaagaggacgaatcgaccacgccagtatacccttcctctcaaatgcccaaccaccaaggtgcttatcatactccagatggtccatcgaggatgaactcggaggttgcctcgttcaaacatcttcggaagaagtttaggcccaagtcggaggacagtcattctagagctgggtttgtcgagaatcagcgaacagcgttggaaaactacttaataggcgtcgttcatgctgtggttcgtcctttgttctattctcctgactcttgccaccttctgattgacacgtcctgatctactgtcgatcacctttctcttggtaaatttagatgtatcgacccgagtcaaaccatctgatccgctttttagagctatcggccctgtcgctctctcttgcacccaatggagggtgccagggcaagtctggttacctaagagttctttctgccaatgtgtcgagcaagaaggatagaccagtcttggcacctttggcttggaaacgagcacggaagtttagatggtggattgttagagagagttatctaattgcagtcgatgagcccgatcaggtacgcgattgtttgttccttcctctcagctgaggctttctaataaactgtttatatatctgctacctggatcgttttacgtctataacctgacctgattggttttaatcagctcgaggtatttgacgtcttcttgtttgatcaagattttgctatcgaggtacattctcttcagttggctagttggctacctcatactgtctctgtttctgatattcaggacttcttctcgactcaatatttagcgcccgaaccgagtgcttcgaaaggggatctcaaagttagagaacaagttcggagatgataagcacgacggggcatcgatcaccgagatgaacgctgaacagacggaggaaagcagactggccgctatggagggtgaccttcacggtatcgataaagctacgttgggtagtatgaacgaagacagtgccggcaatgtcgtgagtttatgcctcttctctttccttcacctcttcaggcttgacatggagaatcaatctgttgatgttgttttcctcttttgtgcttcattcttcttaagagcaaccatacattctacattaataactctcagacgaggctcaaattggtggctaaagcagtcgtacgttctgttacatactatatgcaacgaacagcggatcaaacctgacaaatttccctcatattcacttcctcttcaaatatcatccatatcttctcgtagcgccaaatgcaacagttcatcgcctctctggaaaagatggcggccgaaagcatctgggctggtagaaatcgatttgactcctttgcgccgattaggctgaacgtttctgcccagtggttggtagacggacgtgattatctgtggaatgttagtcgggcgttactcaatgccaaggtatgtttggtcctatctatctgggtattgtgtttgacatgtacagaagattccgtacttaatgatcttcaaacccgcgtgccatcttgatctccagaaatgtgtttatatccacgattggtggtcagtctgaatcctctcctctcattgcaaattgttccatattaatccattctgctgataaaattctaggctatctcctgagctttacatgcgacggcctgctcaggccaagtatcggcttgataacatcatgaagaagaaagccgaagagggcgtcaagttctatattattgtatagtgaggctagctatcatctatctccttgctcaatacgcttctcatctgttcttacgaccgccatatcaatctttccagcaacgaagtgtcaaacaagactacaccgacggacagtttgtatgtttcttggtcaaggtcatcaaatgtcgaacccagaagctgactatagcctggttaaaaataaacgcagctacaccaagaagagtcttcgaggacttcatccaaacatcttcatccaacgatcgccctcccactttgcgaccggaacgttctattggtctcatgttagtcttacttacataatttccaaaccttgttcgtaacaagctgaacctgtctcaaccaacgctctctgttgtttgacagcacgagaagatgtgtgtgatcgatgaaaagattgcgtttatgggtggagtcgacctctgcttcggtagatgggtgagagcattcaataagtttgttttcatcacgctctctgcatccctgctgatgtagtttgttatgactgggttcgttgatttgttccacaggatactcctcaacactccctggtcgacgatgactttgatcccaacgttgtcgagggcgaagatgggccggtttggccgggtaaagattacagtaacccggtatgtgcagctgggtcgatcattagtctcaatcgattcccttatctaacgtcgctcgagattctccatatttccagcgtgtactcgatttccataccttgaacaaacctttcgatgatatatatgatcgacaaaaagttccccgaatgccgtggtaagtctgttgtattgacctctctttgatcaatcattatgaaacttcttatattaattatttactctccaataggcacgatgtggcgatgcagatggaaggtcaacctgctcgagatctgtgcagacatttcattcaaagatggaatcatctgctgaggatcaaggtacaatctaaatagttgtgatccttgacacaaatctgttttactcagcaaccacctttgtctcatcttttcccgtccatagaatcactctttagcaatgcccttcttgatcccggcgcccgactttacagtcgccgagcttgaaaaagaacaactcaccggaacgtgcgagattcaggtctgtcgatcttgtggtccctgtgagttcctttctgtttcaattttgtgtttcgcttatcctacccgactagagttgcgatttcgttcttataagatctaaggctaaccggtctacatcacagggtccatgggcacttccaacaggattgagtacgtcatatattttaacctgtcgttctttggatatcttattgaccgattccttgtagacactcgattttgaatgcctatcttaaaggtaatgtttgtttatcaaaacagagcgtagtgagctcgaaactgaatacgatttctgtttccaccttggcttcatcagctatacaacttagcgagcatttcatctatatagaaaaccgtatgttttcagccttttctaattcactattgttgctcctgccagttcgatcagacaaacttaccgtacaggagtttcttaatactatattggctgtctaatcagaggtacactctttcgacctctacacatgatttacatgccaaatatcagtttgactaatcccgatgtcatttttagttcttcatcacgagcacggttgtcgatggaattgcaatcgaaaaccagattggagaagcccttgttgttagtatcattcctattctcactctttcatgaaacgatatctgaatactaccccttgaacagaatcgaattattcaagctcatgaagaaggcacagcctggcgagcttgtatcgtcattccgctgttgcccggatacacctacccaatagattcagatgcggcaagctctgtaagtatattcagtttttacgctatcaagtcaagtagatattcaacgagtattacttcaatctaggttcgactcatcgtggagtgtcaaaacaaatccatttgtcgaggaccaaactctatctttggacgattacgccaggaggggattgatgtgagctattgtttgactgttatattcaaactagaaactgtactgaacataacgtcaactatagccggaagactatatctcgttcttttcgcttcgaggttggggaaagttcaaggatggctcattgaccaccgagcaagtgtacattcatggtgagcgtgtattcataatcgcggctgagcataatgaggagtgtttgctaattctctttatttccttgctccgcgtgtttgacgtgtgtgatctaggcaaggttggtccaagtcttccttctgtgtgctactgtgtgtgatgcgttcgcctcacgcttagttttcttattaccagacatgcatcgtcgacgatcggctcgttatcatgggtttgtttatctatttagatctcgataatacagatgtttgatgctgataacgccatttctgttgttcttaggttccgccaacagtaagtcctcgattctaggttcccctgctttcgtgtttctgacatacgtgcatttattcgtctatctctatccgtagtcaatgagagaagtatgagaggagacagagattcggaactcgctagcgtgattcgtgatactgacatgatggactcgacaatgggaggcaaaccttataaggtcggacggttcgctcataccttaagggttcgactgatgaggggtaagttccacaacatatatcttgaggtccttgtcagatttggttcctttttccctaatcagctatcttctctttgtacgtagagcatcttggagtcgatgttgacgccatggctgaagatgatttgatggcgagaaacccagttgttcctgagaaagagatccaggtttgggatccttccgaagagcaacagtccactggggagggtcaacatggaaccatcatttctaaccggacagtcaaggacagattcatgatgcatgcaagcagtgtggcccataccagtcagtttaggattgtctttttgccctacaaagaaaaaaaaatgccggctaacactatccacttgttttttagtcgctcactctcaatctcaggcgatcaatcgagcagcccgaaaggtcgcagatactatcacccgcagtactcatgaggtcgctatgcccgatgatgatatcgagattttccgtctggacgacggacggctcgccaaaggtttcgtgtcctcggtagttccaacagtacgtccgcccatataatctgctatatcaatcctaattaatagcccttctctccttctatgtttgactcattcttcaatagatggaagaacggcgattggccgagcacggcttgattgatggtccgctgcgcagagacgagattcagggtaaggtgggagatattgctggtatgttatcgcttttcttgcatgctatggatatacccttcctcgagtcctcactttttgcctttggatatcaagatgccgtcttcgacgcttcgggcaaccgaatggatcaaggtaaagacgctgtgtccagccaagctgctttggacaaagttgagcctagggtcgcggaaacgttgactgctgaggaaggatctaagatgaaaaggcaagcaagggatccgctccctgttgttggacctggtggaattctctatcacctcgaaggagaagatgacataagaatggaggataatgccaagcttggtggaaaagaacccatctcctcaagacgacgaaacaacaagacctcgaaccatccctggtcgtaagtttatgccactcttggtgacctcttgatgtttctgagttaacgaccgctgctgtcaaaccaatagcatgcctcttcccacacctcacgtcgatcctgaaggtttccgagatccattggacgataagttctggaaagacacctggacatcagttgccgtacacaacgtgagtagctctgccttcctttttaagcttatatacaattaactgaactcttttttattttatttttatttgcctttgactgttatagaccgaaatcttccgtaaagttagtcatctcctcgttttctaaaaggctttatccataagtatcgatactgacatgcgtgcgatgatgtataggttttcagatgcattgtaagtttctcctactttgtatatccagatgtgcactgcttacaattcttggcttatctagcccgatgacctagtcactagctggactcattgtgagtactcagggtttgattggatccttctccctcttctatcataacacttgagctgatagtcatcgccttccttgccttgatgccaattcagatcgagaggtaggcaatctttgatccgtgcagcatgttctgagaagaagtgttataattactgacagatgacgacttttttgtataaaagaactctgcctatgctgaaaaattcaatcggcctcctactcatggagctggtggaggaggctccggcggaggagttgtcggagccggtcaaaacggatctaaaggagacgactcgtccccttccggagaggcatcaaaggctgaaaagattgagggacatcttggagtcggggatcatgaatcggaggatatctcaaaattgacgagtggtcaatctgagccctggacgaggtgggagcaggaaagaatggaggatctcctaggagaggtccggggccacttgggttcgtctctcttctcgtccaattatttgaaaaattggtccttctgaacgaagcactcagtgctgatgtcaactgtgtctgtctctagttgttttccctactcgattcttggaaatcgaggatctcggaaacaacttcgtaagtgcccctcctgattcatgtcgatctctggtgtttgcttactgacacgtgcccttcctttcttaccccaatttagctgttcaactctgacaagcttgtaggtctccagttctcacgacaatcacggcgtctcgagaaaggcgtttgactgacacctagttctatctcattacgatgtagcttcccttgcctatctacgattgatcggggtttacctgacctttctaggcaagatcaaacagttatgcttcttcttctttctattattacccgtatttattacttatttcattaaaattgttcctcaaagatcttatactgctcaccacaaacgaaatcaacatatccttcaagtttactgtgcatcaccttcctgatgttttgacccttataacactcattacttgccattcctcttagtttttgcacgcacgatcagccttcatgccttttcttgttttcatatacatatacaccgtatatactatcgctcattcttcgtagatgtctattctgttcctcaggttgcaacatataaatgagatctaattcttcctatttgtgtctctttcccccttttgtttctctccatctctcactcgattgcatgtcaacgcccggtatggaagtgatctagagcagacacacccagggccttgaaacaagagagatttaagaaacataaaaaataaaaacccatcctgacctcttcccctgattaagaggaaaagagaaagggacagactgcgtccacatccagatgcaccctcctctacatgtattcttcgacccttcatacaccacccacatactcacatacacacagcaccactctcgttctctttttaattaaaggagggaaagaaaagtttaaacgacaactacccgagttgatcttacttgacctcaacagacggtgccgagtcgacctcgacaggctcctgctttctcggtcggttagcgttcgaattactgctgttgtttccattgctgttgttgttgttgttgttgttgcttcggtttcctcgggggttggatcctccactcttctgggtcatagcccagttcatcgtctgtgcggattcagcaaggtctcgggtgatggctaggatagcttgcgaaggagggttaaacggtcgagtgatgtgaagcatgttctgtttgtcgtttgagccaaacgagaggtatacaaacaagcgcgataaatatggtcagtttatagagtcctttaaggggactcgacaggaaagaaaggcagactcacggcgttaaggtcaatctttccctccaatcgggtatccctgatcaagttgacaatccacttctcgccctcctccctcgacaagttgagtcgctgggaaaggtcgctttgcaaaggaaagaattaacggtaagtataagaatagaagtgtcagtcaatcgattacttgcgctccttgttttctgaaacccatcctatgcttttctccttgacaaataagagatacactcacttgatgtcaactcgctggtgaatcttgcagtatgtctcactgacgaggtacctggcgttatccaagaacaactccgagcttccctcggtggtggacaagaagaaatcgtttgcgacgacctgcttgacggccaagctgagactctcttgagctccctcgaaatcgaactcggtgtgcaacctggtgacaaactgggtcaacggatcctcgtactggtaagcttctccctcaacagccttgacaacctccttgagcggatcgagcttcttctggccaggcaccctgggagaagggggcaatcggtgggtgacgatgacggcgaagacaaggtatcgaagcaagtgggggcacgacgttcggatggttgcaaggtaggcgggagagaggaaaaggtcgagcaaggcgggcagaccgtcaggatggttgaagtatacgaacaacgaccagtgaagaagccagcttcgggcctgaagctgggcaaggtctccaccctgaccggcggcaccggccgatgaagggctaccctcggcagccgttcgggaagtgtttgcgaaggcggatccagatcgagaatcgaccaaatccttgatctcaccaacctgcttgagagcttcgtcccaggatccggtaaggatatccgaggcaagcttaccccagtgagcggaaaggttgacgtcctgatcggtggaaagaactaggaagtggtagaggtactgagaagagccggcgtagtctccgtaggtgaattggaattgaccgaagtggtacagggaaaggatattgtcttgggtaagctaaaaatgaagaatgccgaagagcacgattcagaatggtcgaaaattaatacttcccagccatctcttctctctttgccacggaacaaaaagttaaacggaacatacctggtagttttccttgagccaagccatgttctgctccttatcctgcttgagctgaccagcaacatcagggtttccgatgacctccaaaacctgctcagcagcctcgttaagcttctcgtttttggcagacacatcctggcgtcgggaagcaaactctacgtttgataaaaaccgtagggttcattgaaagcaaccagccccacataaacaaccaaccacccaagacggtatcgcgacgcagggtccagaataagaaagtagaaagtagaagattatcagaagacggacgagccgagagatcgggagcaaactgtcctggctgatcagaacgaatgaacaaagagaacagcgagaagacataccggcaggagcctcctttccggggtgaacagaagagaacaaggtctgagcgtagtcaaccatgttggtcttcttgacgagctcgtactgagcggcgtagagagaagcggccgggaaaagcggactgaatagtcatttcgacattgatttcaaggcaagaggtcgagattgatgagtatgtagataagagagccgacgacgacagacacgtatgtttcagatgaaatgacgcagaagaagcgaggacatcagaaggaaaagaaagaatgaggaaagaaaaagaaaaagaaaaaagaccagtaagtttcttctgtcatactgtgtcgaccctcatctctcagacagacgacaccacaaaacagaaacacgtacggctccaaaccactgaggtgatccaagagaggaatggccaagtgccggtccaggaaggggaccattcgctatcgatgagaaaaggcaagaaagagaacaccagacagaagaaaccaagcaagaacgcgtaagtcaggaacacattctgtaaatccgatacgagtgctgaaggaaagcccaaaacgagaaacaaaaaaagcaagaaaaagacgggtcttctctctctacagcacacacatacctgggtgagatcgtactgagccatgatggagaacgaggacggaaggagagaggagacgagagaaggagagatgtgtggactcgattctgttctagagaaggaaaaaggaggaaaacgaaaaagagacgaggcccaagcgcacgaatttttcgatgagccctggttacgggttgtcttatgtaagcgctatcggttacatactttcaggctggacactacagaatatgtccaaattgactagatcaagtttctaatagttggatttcctgctgtaaccactcccactcacctccactccgacgtggttacgatccgttccacccacgcgcccgtccatcttcgccttcgtctgctcccctacagttaaacgaccacacctaagcgaagccctactaccatcagaatctacactctcgtcctcatcccatacacatacccacacaaatacacatagcaacttgctcagttatcatggctcaagcaactcctgatcctgttgctccttcgttcgttcagcttgttcttgctcatctttttcttcataatcaaaggataagatctctcgctgttcctgttactcgtatggctcctagtcttcaggatcgagatcaaagcgctcatcgtccaaccgttttttcttctttaccttgatcaaatcgacaaatcacgatgtgaatgatcacttatatatacaggcccacatctgatctcgaaacgagctggggttacctcgaggtcggagtggagagagctatgatacagttcgtactcctaccttttcctacagtcaactctaccctactcgtcatctttcattaaaactgcttttgtcgttcatctttccattccatctagcctagaggaaggtatgtctccctcgtactacatggcgctttacactgttgtgtacaattactgtaccaactcggccagggcaagctcatcaaataatactcgaagtacgtttcttacgtcttctctatcgtctatgttgtcaagtttcgtgaaccgtttgatcctttatccggattcaatatatgaaaattcgttcaattctttccttgcatcatccactgactgcatatcatgactttccttctccgatctatacattttgatatcagctggtgcacaactgcagggcgcagagctctacaaatgtctgtcgaagtatcttgctgatcacctcaagacccttgagactgtacgtttgccacccacgggtcactttcgtttctgtcacttcaacacattaagactcactttcttggtggtacacacatacgtatttacctttaggcctcggaaccacttcaagacttggcactgctacagtattatgctagcgaatggactagatatacgttcggagccaaattcatcgatagactattcttctacctaaatcgacactgggtcaagagagagagagatgaaggcaagaagggtgtctatgacgtttacaccgtacggtctttccttttccaagcaatgccttcctccaaattcgttgagttgacctacgatcaaccttgctttcttatctcacacgatcagatggccttggtccagtggaagaaccacttctttcaaccggttcaaagtaaaaacagaaaacttgccggcgcactctacagacaggtcggaaagcaaaggcaaggagaagagattgacacgtcgctcatcaagaaggttgtcaacagcttcggttagtgcttacgacccatcttggacgagcgatgaagatagaaatctgaaaggcctatgtgtgtctcttatatcaatagtctctctcggtatcgatctgaacgacaagaatcgatcgaacctggatgtttaccgggagcactttgagaagccgttcatagaatcaaccagggcattctacagggcggaaagtgaggctttcgtaggtgcgcacagtgtgagcgattacttaaaaaaggcagaggagaggttggcggaggaggaagaacgggtcgagcgactgcttcacggggacaccagaaaaattgttcgttctgttctgttctcttcattttcgaaggtgtcgaaagtatcgggggctttcaacttgaagtgttttcttactcaataccttactgggtctcgtagatcatcaacacatgtgaagacgtactcatccgcacacatgctgagctgatgcaagaagaattccaaaacctgctcgattacgataagacggatggtatggttctttctttctttcttcaactctatctcgttgtgtagaagctaaacgcactcattgtttctgacatgttacatatctgcaccgggtttgacggacgaacacaaaaatcaaaagatcttacacgtatgtactcgctcttggctagaatcccccagggtttggagccgcttcgaaaaagatttgaagaacatgtcaagaagtctggtcttaccgcgatcgagaagttgtcgtctgccaagcctgatggaacaatcacaccaaaagaaggagatgatgctaatggagataacggagctgctccagtcaagaacggagaaatcgtgcgtcgcccccttacttctccgttctcttctttctcttttatcttactcatcaactgttcgtcatttcttgacgttttgtggagcaggctcccaaggcttacattgaggctctccttgatgtccgtaaaaaaagcgaggagattgtcaatacatgcttcagaggtgaagccggctttgtagcttctcttgataaggtaacgttccctctcatcacccgtgctatatatttattgcactcggcaagaattcttgaaacgcaatcattgctcttaaacgcgcgagtgtgcgtatgtactttgtcccgtttgtaaaacaggcttgcaaggatttcgtcaacaccaactctgctaccaaagactcggccggaaatcagagcgcaaacaagtctcccgagctgcttgccagacatactgatgctctgttgaagaagaccaatcgatcagccgaaacggctgaattagaggaaggtctaaaccaagtcgtgcgttgacatatgcttttgtgtacccatatgaatttacagtggcgatcgaaaagatcgtttatatgtgtttctctcttctttttattgatgcctggctctccgtgcatttagatgatcatcttcaaatacatcgaagacaaggatgtgttccagaagttctattggaagatgctttccaagcgattgatcaacgcgatctctatctcggatgaggcagaggccagtatgatcacgaagctaaaggaagctgctgggttcgagtacaccacaaagctgcagaggatgtttactggtatgatctactcttctcatttctgcctatccttctcctctctattcaagaaacatactgtctttgagcaaactgagattcgggctgactccttgatcctgctcatctgttcggtctttgctgtgcggcgcataaagatatgcatgttagcaaagaattgagcgagaacttcaaggaaaagatgaagcagactcacgatgctaaggaattggatggtcagtcatcatttacatttcttaaattcataatctaagaagtgcgcgcctcataaatattatcttttgataaattgaacacaacatatctagtcgacttttcggtcaatgtgcttggtcaaggtttctggccattagaaccaaagacgactgagttgacgattcctgtagatgtctctaagcattatgactggtttgtacggttctaccagtcccagcattcgtaagtttcatccaaatattgcttgttctcagaggcctgattgtctgtgacttgatcaaggttcgtgaaagaaaaaggcaatgttgattgtgttgaatacttcgtttcacagcggtcgaaagctcacttggctctggcacgtatccaagacggaacttcgaacacgctaccttggtcaatcatacatcttcatgacttcaatgtaccagatggctatccttgttcagttcaactcagccgatgccttcacctacaaagaacttgccacagctacctcactgaacgagggaacactgaagggtgtattgggctcgctggtcaaagcaaaggttttgaacttgatactggaagatgatgaggagagttatgaactcaactacagtacgttcggttgttacttttattttcgacttcgttcttttctcctcagcttcaaagactgacccggttgaattcaaccatgcgggcttgggctgaattagacttcaagtcgaagaagatcagagtgcagctcaaccagccgatcaaggcagagcaaaaggcggagtccgctcagctgatgaaggatgtggatgaggatagaaagtatttgatccaagcgactattgttcgaattatgtgcgttttctttcctgaggttctctttgagacattttttctctttgtttacaagatgtttcgtctcacgggatgttcatctgcttacaggaaatcgagaaagacgatgaaacacaacgtacgttcctctggtttcctttctgacatctttcagcctttctgttgcttttattacagtcaaaataacgctttatctgtatggttcctgtagacattggtgaatgaggtgacacagcaggtctcaactcggttccagcctaacgttgtgatgatcaaaaaggtgcgccctttcctattctttccctcgctggaaacggtgtagaataaatagtttaggctggtctctggtctgagttctgaattatggttttggttcatcgtttttctctgaacatcttagcaaatcgagggtcttgtggagaaagagtacctagaacgtcaggagggtcagcgagatacttataattacgttcgtcttgctttttccttcattcattaccccctttctactccttgttagggcttgctggactgacgtgatatgtgttgctggatacccccttttgtgtcatccagcttgcctagccagtttgtccgttctgctctcctttcgccctcgctatctccattacatcctgctttcctttctctacagaaagagacgacgtctgttgtctttggtctcctcttcctcttcactccctcttcatttgacttttcccttgtcatttagaatcacatgtgggcttttgaccacatcgccatttgattcgttatcaaccctccttgttttccacactcttcttaccctccacccgttcatcactccgcaacccatttgttacatgtcatggtccatgatctcttcttattcctctctcgatctcctgtactcaagggcgcctggggggtctctacttattctatctggttacgttttcctctttctcaaacgacccagtcgtattcagtgaggaagaatttgtacgataagatggtctcccgattttagaacgattcctgcaaacagagaagacagaaccataagaattctgaggagagcaggaaattcaaaagaagagaaactgtagaaagttcgggaaaaagtatttgactagatcggaccttgaataatgctaatcctattggggctgagcgaagatgcgtttgcccaaatggaagttctctaaatttagtctggaaaatgcttcgaactaccatcaccaaagcctttcaaaaacccatccttccttctacccgattcttctctgtctctagaaccaatatgggagttactgttgagacgtaagtttatagcttgccccatcccagatgttgtgttggctaggagagattttggttttcaacctctttttttcctctccgttttaatctatctccatctcatctgtctggggacctgattcttcttttctttcctttcccatctacgctatcttcttgacatctctacagcatttccgccggagacggcaagaccttccccaaggctggagacaccgttcacatgcactgtacgactgttgcatcattttctgcgttctttctgtgttcatctttcctaatcgtacacgtttgtgccttctctcttccatctcttgtgcctctcctgtagacgttggaactctccaaaacggaaacaagttcgagtgagcgatgtttccctgcaaagagatctgtttgtttctcgcctggatgctgatagtttccttgctcgccctgtagctcttcccgagaccgaggacagcccttcgtcacccccatcgttcgtccttgcttcatttttggatacttagaaacgaattttgatctgtgtactgattactgaatatcgaatacaatctcaaatccaacagggtgtcggccgagtcatccccggttgggacgagggagttcctcagctctcccttggacagaaggccaagctcagtcagtcaatcattccgtctctttgtgtcttctcgttcgaaagaagggatcctcatcatatcttcattttctcttggcgctttcgttttccacagtctgcacccctgactacgcttacggtgcccgaggattcccccctgtcatcccccccaactctaccctgttcgtttctttctttcttgtgatccatgaactctctgatgttatgtcaagtgtgatttctgtgactaatccgactcctactcaccgtcattaatcctctcaactctagcatcttcgaggttgagctcctcaagatcaactaagaacttggttctagatgctttatgaatgtattcaaacattgtcgtttcgttcccgtttggtgacttttatgtatcgaggatgtatgaaatgaaatcgtctatatcactgttctcagcttcgtcacaacggcagaaggagatagaagatcaaatgaagagatgaaaactatgagtggtcattggttacatgtgctggttacaaactaaaccgtgccgaatggccccgcatccatccgtccaatccatctcgtcgcgtttccatctgtacccaacacatacggagacacaggcatagacacattctttccgtctgtatcccgttgggtctgtatctctctgggtcgtttttctagaccgttggaggtcgtgtactttcagtctcatcgtgggttcttttcttggctctcttcgttttgacgccgtgggaaaacactaaccgatcttgactgtttagccatctttctgatcacctctatacatcactggaatagaaaccaatcttttcatctcttcatctctcttttttctaactactcttcttcttcttttccttgtaagcaaatctgattcacctgtgaatcaaaattttgaagattgagtttgctatactaacaatcatcaatcgatgtgttgttgtctttgacagcactctctcttgaacgctcttctcggtacttctcccggcaaccttgatctctcgttcactacactcgttcgtacgatcttttacgcatacgtttctcaataaactgagcccatcatctaacatcgattaacgagcaggagtttacagcaatgcaccatgcctctcgagctaccaaagccaggatctttgctttagcagagaatgtcaatccggtcctccttccgtgctttgcttcttggtcaaagccctgtacaagctcttctcgttcaccaaaatccaagcgatccgttagttgtactgtcaatacagagggatcatcagtcagtttcgctcttcgtttcaacaatacccccgacccgacttccgccataccaagagctctcggaacccgactttcctcggccatcgctacctactttgacgagccagcgaccaacgttttcgactttggtccctccatattgaataagcgcgaaccttcgccaaaacgtgactacgatcgtactccaagatacaatccttctctcttcaaggtcgaagttaacggtcagatgtgggatcaacgatcaatcctgctcagttatctctcggtcgatcgaccgactcgacaagctcatctgaatggacaggacgacggatggaactatcaatcaattgtaccaggagccggttcgtggctgccagaggtcctgactcgacttcaaatggatggagacctttttgacactctggttgatgttcttcaaacctcgaccgtacggcaggcacttggcttgctcaaccaacagacgtctccggcctcaatgtcaatggacggccgtcccctttggtcaccctggctcttgaggtccgtcatcgaccggacagagacagctacggatgcgcatttatcgatcgcagcggtcgctcatcatttaccgtatcttcccaagtcccatcaagctgggtttctcaagtggtgtgtgggtgtgacggtcaagtatcgaatggaggctgccttgcctgccttggtcagaatcactctcgatgcatatccacagcttgtcctcacgtccgcagatcagaaggaacgatctaagctccactgcagtctgatccttgctatcgtccctgcacattcggatacactctccaacgcttctaacgttgttcgtgaacagctcgccttaattctgagcgacatgaatcagaatggtttgattttgtcctcggaggcgctaggatcgctataccagctaaaatacttgatgtatcctcctatccgagaggttctgtttcggtattggtcaacatacagatcctctcgcaaactgcatcatgccaagatttggctccaggcggcgtggagagagaacgatcgagccgaaatggaacgttggatggagtccatcgacaaattctcggccacaaagcagagcactctccttgatggtttgcagtcaaaggaaacgctgcactctatcgagcctgtttctccctgctctgaaaagtctacaaagttctttggacctgtctcggtcgcttatctcaagacacttcgggagagcccacagcttgctctggagtatcttgaagctttcgatatgcctccttcccccctcgaatcgctagctaccccgagtggcgattcggattccatcgatcgggcaagacactttacaagtgatgcatggacaagtctggtcgagatcatggctcactcgaattcttccctgacttccctacgacgagcatttgacgatcctcgatcatctattcatgaccgaacattgataactacgatcaacacttccttggatgtcgtccgtcattcttcttcatctccatcggccgtgttggagatttggtcagagtacatctgccgtcggggtgtagtgcctacatcaatgagtttgaacctcttcacgagggcgtgtgagaagaaaggtgtgctcggacaggcgttgagagagatcgaccggtgggctgtcaagagaggagtacacgaggtcctgccggtagcaaagaacattagggaaacaccattccatttaggggacactcaaccaggagagtactcgtatgctcgatctcaagtgttggtgcaagatttggccttccagccaggatccacccgttctccaccagtcctccgaatccagttggacggactgctccttcgtcgattgatggactcccttagcttttctgctcttggttcatgtaagaatcttgagcttctctttcgtttatgggatgcggccccttcccgatggggtgtcacccaaacggacgacatgcttcgttccatccttcttgccgcggctcattcattctggaaagaagacggaactgtgtttcaaccgatgacccccgaacaagatatccaaactggattaggactgaccgctcgtttcacaagggaggacggtcaggtcgtgcaagatgttgatcaagtcgattgggccaaagatccggtagaggcattcttgcttcctagatcaagtcaagaacgtgcgcctcatttgagagcaaaagagttgtttgaaactatactgttctcaaactggccgggattcaagtcagtgcctcatccttgggatgagtggcaaagtccaatcattgaggatagcgaagaaagttgttcgactcactctagatcgtccggccaagacgatttgaacaattcatctgaatatctcaccgatgaaccattcatccccttcttcttttcatccaatccaccaatcttatcctcggtcgaaaacatcacacggtacctccctgcaccgtcgatttattcacatctgcacccgaccgctgcttctttcaacgcatactactatctgttggcccggcatgcgttcttcccagagattcccctcgtgtttgcttatatgaggtatctaaacattctaccggagaaacaaaccatggtggacgccctcgctcgtctgtctgcctgggccgagaagggcatgcgtcaacgaaggaccccgttcgggctcgaagacgtcagttacgctacaggaaaagcagagcttgaaagacaggttacctgggcttacaaagatgaccgaagtggaactagaccggatcgggatctttgggagtggttggtgaactggttaggaaaggatcaagtcccgacagatcaagaaatccagcagaggtggagcgcagttcgaaagttcggggagttttcgttggttgatggtggatggtgtaatgaagagagcttggagttcaaggaaagggaaccgttgccacatctgaaggaatgagcgactgcccctacaatcatgtctcatttcctttcctctctttctattcttgttttctttctcttcctttttttgtcttcctttagttgtataccatattgtcaagttgaaaactcatagatagttgtaataagtttatatatttgtatcaaacacattctatcgggctcgaaatatcacttcaaagcccttttgacgacttcctccaaggtcaccggtttaaacaccccagctgaatctccactggactcgtgaacatagacagcatcctcggagacataacagaccacaccacctgttcttccgtctttggagattctgaagaggacttgacctgtgttgacgtcgcttcgacctgtaggtacccagatgagatcccgttgagtgacataatcttgggcgatcgaccggaaagtgatctcgtccacgtgggatggtgtctccatcgacgatggcttgacagtcgccgtcggtgctgtcgtcgatgacggtagtcgttttgatctcgagtcggacgaaggatgagatgggaaaatgggtttagcgagccgggtgggagcagaagaaccaagagccatagcttggttcatcagatctaaacctgatttgaacccagatgtgatttctggcagagcgagaattgattcggggaagactgatttccaatacgaatacctgccaagatatcaattaatagaaaaaaaaaagtccgagatatctttatgttcgaatacaaaagatcagaaggcaagagggagaagaaggaacgaaccattgggtgatgtcatcaaagttgggttttggttgaatcaaccagatgtatagcacatccagccacttggggaagaaaccggactctagaagttgagccatcatcgtcggtcgaagcacaccctgccaaggtagcacgttctctagttcggttaggatttggtttcgtgggttaactcggaaatcatctcgaagcgaagcaccgagtttgggcaggatgtatttgaggatgagcgaatcccattcgttgggtgtgaatacctggatttgtcaaaaaagaggtccaatagaaaattcacgttagcggtgtcgttcaataaattagaaagataaaaacgtacctcgcgccatctgggtaattcctcaggcactctttcttccactttccaccctttgagcaatcctctgattcttctctttgcgtcctccaagatctgatcgattctcttgcccaagaagggaagccatgggaaaacaatcgactgtaaggatgctccaccttttctgggtttccattcggttattgacttgttgagttttgggagaattagttgatcgaggatgttgtcgtgcatgaaaagaggtagaagaggagtccaggatttgatgagctgcacggcaggctcggcattggtaggttgccaatcgttgctatgaaaatatgagaagtacaaacaggcgcgttgagcgaaaaaaaagaagacatcaaaatatgtgattagaatgaaagcttcttgaagacaggaacgcacttgatagccgatcgaactttcggaagccaaacgttccacatcatactctcgtacggtgtcattacaacatctctttataatttatggataagaaaggagataaactatgagtaagtcgatgcttggcaactctgaataagatgaggtcaaagagacaatcacatacagatcaaccattttgcgcaattttcgaaccctagcctgtccatatacgtccaccgccttagcatcctcctccttttcggcgtccgagaacttgaaagcttttttccaaggcctgagagaagccaacagctcggttgatgattcgagtggttgccactgagagaccaatctccgaaactactccatatggtttagcgaaaaaaaatgcgatcagaagctagaaaatgaggagagtaaaggaaagaaaagcgagaggtcaatacttacgacaggagaaacagcgcccacaactatctcatctagtgaataggttgagtgctcttccgggaactcgtatagcaatcgatcgaacggagggatgaacggcgcgagtgagggctcgtacgttgatgcaagtgtttttgagattccggatatctcgttgatgactacgtgaatctgttggagtcgcgaaatatctgattatttccaaggtaattggaggaaggaaaagaaagaatgagaacaggctatagattagcctatctgaaaagcgcgcgagaacaatgaaaagggtacggttatgaaacctactattcgcttcctctaccaactttacttttaggttctcatcttccctgattaaccactttcgcttttccctcactgccacgccctctctcgcgagtgcatcgagatcgccttttgtcatatcacaaatcattcgaagattatgccttagctcaggcagtttacttgcttcactcgttggaccggacaggttcaaagcagacaacgagctgacttctcttggctgtttacaaagaaacgaaaacgagaggagttggaatcaagatatgagtgttctgtctgtaacaccacttgaacgagacggatgagataagacacgaactgtagcaccagtagcatcaatgatgacacccactccagccgattgacctcccggcccagcttcttccagaatttcctcgtaggacttgtgttcgactctgatcttgacctttttgttgtgtctccaagattcttggcctcgttttgaagagctaggatgattgtctgacgagggaggggctttgccggccgctttagctttagcagcagcctttttggcggcggcctcgatagccgggtcaggtaaatctccttttctgtattttccgaaagagggaggggagaaatcgatgaggacaagaacaccagatactgactcaacagatgagaccaacaaaaagaaacggatttacctgatagcttccctgatgctttgttccgttcgctccgttccacctgctccgatacccatccccctgcctctcagttttgtcgttacaggggtgatgatacctgtaccatctgatcccaacccaacaccagcctgccatccttgcttggccagcattcttgctccgaatgagccctccatctttttgaaggccgctgcatcttctctcgtcaatggctgagcgttcggtttcggcggtggcgatgattttcgaaggaatgatttctgaggaccttttgctttggacgcgccgaacgcggttattaggaacgaaggtctggtgcttgtttccggagccgcagattcctcttcctcatcagagtcatcttcatcagagctagagccatccgactgagatgacccgccacgtgttgaattatttttaccgtctacttctggttcgtcaggcggagacatggctgaggtaggagcgttagcgacaggaacaaacgcggggatatccagtccatgaaaaaccgattcagactgtgaggaaggaggttgagcaggggcagggttggctgatgaggaggcagtggtgaatgtcggagctctgtaacaattgaaagaagagcaaatgtacacgttgagaaaatgcggaaaagccatcgaaaggaaaggcgaggttgattagaagccctttttgaggactaaccaagaggtgatagcgaggcgagaagaagagacaagcctactcactttgtccaatccgtagctctaccgctcttgcctctatttgaacccaaccctgcaccgccacgaccgttcagatcctcatcatcactttctgcgaacactccatagagcgcatcaatctttccggtctttcgcttctttctcgcgtagagatcaccgtcctcgatgtcgtcaccttgctgatcgaacgttcggtcgtctacatcgtcatctgaaagaccttcagatgaggaaccgtccgagaggaatcctttattggctttccgtctagccatggaggagatgatggtggtggtgttggtagtggcggtagtgatgatgatagaatgggtcgctcggagttgagggttgcagacgcgcgtaatggcggttacggttggctacggttggttacacgatccttcgactccaggtttcctcaccgctgcacaacggtggtcggatggtgtgttctgcgctatcggaggtgctctatcagaatgactgacggaagctgaagaggcgatagagacaaaggcaggaggtgtatgtgtcggattcagagggaaggaaggttgcgcgaagagtgtcggtcctcagaaacacttgtacatcaagaggtccagtcaccagctgcaactagatggtcctgttcaagttagcttgttctatcacttgatcaaattcttggtaggaaggaggaagaccggtctagagtttggaaaagcatgcttcgaagtacactcatcaagatatcatttcttgtcgaggtggttgtttcagaactgttctgacaaacatacatatacacgcacttgtactttcatgttccatttgatctctttctctctctgtgtacaacccaggctgcctgtagagatcacaaacatccagattctcaacgctgcgaagcttggaaagatgcttcttatacatgttcccccgctacttgacttcatcttctgttttatgtcaacagccaaaatttctaccctgtgtctcatccctcatcgaacatcttctcgcaaccacccttggttgactcccatcccaacttggatactgacactccattcttgtagtccatacggtcatgacgctcccatgccatcttcgccatcgtatatccatcagactaaacattgcgatcggccgtcaggtgactgcaatcacgtgacaccggcgtaaagatcggccgtccgttcccggccgggcgttcttataaagccgggagattgtcaacattatcagcccatcagattaaccatctcttgtttctttctgcttctcccacactcactcttcttcttactcaaccaggatgtcctctcttcctccactacgtcggatagtcacaacacatgcgccccagtcagactcttcggccgaaccaccggtgaggatcctgcacgacggcgactacgacgaccccacggtaggtcgatctcgacgagcctggtctggcgattttcctgctgttcagaatacggatgacgactttatcgcccacgacggactggtcagaagaggtggaactagctgcaggactactaccttgcgccctggagaggtcacccccatggtgagagagaactcttcatcacgcattcattcttgttctgagcaaggaccagtctgttgacttgggatgtattttgacaaaacagcaccgaacgtcttctctggactacaatatcataacccacggaacgatcaccttgctgacgccgaaactcccgtctaaacctgaacaatggcctccttcttcgattttgcatacgagggatgatattcaagagacccaagtcaacgttggcgaagtcgtcgtccagaggggaacgtatgtccttcacttgaactgccactgattttcttagaattctgctcaactttcgggacacaacaacaggattcacgcatggagaaacgacacaagtgaactagtcagatggaccgctgttctctctgatgctcaacctgctcttgatcttgaagaagcatgggtggaggagggcaagaacggagatggcaagggagatgtccggactggggttaagctctgagattcactttatgtaacagcacaggattggatgtacaagtagctctttcccatatcatagagaatatgcatacaacattgttacagactcctccttttacaagaaacggacaatcgattgagagattgataagaggtcgaagatgccgacgtttctaaatgttttccaactcgtcttccaactttttcgccgtctgctctcgatccagtcccagcgttcgctttctcctgttcccttgctgcttcggttctgactgtgaagctgaccgaggcggtcgagacccaccatccgttacagccttcggtctttcttgttctgaaccctcgatctccaacggctttggttcataaggcggatattgtcctttgggaaatgtctgtacgtccgtgggtcggtagtttgcctcagcgaacgaaggataccgagttggaacaggcggagttggatagaagtgtgctgtcgaagggggagatgagtaagttggtggtaaaaagctaacaaaatggggatgctgttggagacaagaggatttcagttcaaggtttagatacagagcgagatatcgcaaacagaagagaggcccaccttatagatggcctcgacccgaccgatggcaagaccgaagtgaccctcgactccttccggcgtgacctttgctctggctgcatcctctggagtcgccctgttgggatcagcccttggcgcgccgaggagagacagaccgatcgtctttgtccttgacagatctggttccacctgacggtctgtgattcttccaagatgcgtatgcacgagagaagtcagaggaatctaaaacagatcaagcgagagaacggaatcttcagcgatccaaagatgtaggcaagtaggaacataacgaggacggcaccatacctgacactcttcccaaccacctccgagggtgcctctaccggttatacccaaccgatgactccataggtcttgggcgacccaaccatcagtctgaacgttgatgaaccaatgaggccataatctgggatcacccatgggtttacaaatcaccgagagatgagtatgtctagcgatgtcgattgtgttgactgagaatacacctggttgaggcttggatgttgaatgttgaatgttgagcaaacgatacatgtgagtaggagaacaaaagacaagacgcaacacatgaacggagaccacttaccttggtacggaaaccaacatatccgcctctgattttaccgtcaatctcttctctcaccgccagcgagatccgaccggaaaggatagcgtgaggaaggccttgcatgtcccaactgccatccgtgtactcgtcaccattattgagcgtcagatcgatatgggacgatccaccgatatcagagtcagatgccagcgtcagattggctagctcatttggcgtggcaaagttgatgagagagagtgattttgggtctttgaattcagagtctgctggaccaagttgggatgctacggaaaccaaaagagattgagaggcgaattgaggggtccggaagacggcgacgagatcaagaaaacaggcaaacagatgatattacttaccagcagccgtccatttctgagtagccttcctagcgagcaaaattttgtcgaatactttattgagattcttgctcatcggtgtgtcgaaatcaaggcgatgatgttgatgatggtggtgatgaacgtgatggacgagagatgggagcaagcgaccgtcttgtgcgatcgaatacaaatattttctaatgaagactacaaaacattcctaatgaaagccgaactacaaacgtgttgtaatacacgactaggaaacatttctaatagttttcggccacacccgatcatcctcccaccttctctcgtcgaccatcaagccatcaccccaaccccatcgtcgttggccatcacctctggtttggtatcaatctcggtctagtttgtctctgtagcgatgcctcccgagtcccgttccgctccgggaacacccagaagactttctcatctgccagccgcagccgctccttctgctctgccacctcacttgacgagagaaatctcttcgctctcgctttcgctctcgcctcaaccatcatctccgtcgtcctgctcgtcttcttcctcggtctacaaccttcatcatgtcgctccgtttgcttcgtcttcccccatctcccggccaagttccacaagaactccttccgtatacagcgatatcgacgtcgatatcggtcctcccccgtcgctgccacacacttctggatccggatcacagagtgatgatggtcatcagccgtcatccacaccaacagctcaacagcaaactttaccgcctggtcaaatcagcgaacaagctagaatcatgctcagaggtcagcttaaacgtagtttaagtcgaccgacaattcacaaggccccctcgaagaagggaaaggagaggacgaatgccttcgaaggtggtaagcagtctcttgtgctcactatgtatcctcgatggctctgtttgtgttctgaccatcagcacacaacattctagtcatacaacagacaccaacattgcctgatcagtctccagaaaaaggtccttcctcggtcaacattcctgtagagagagaacatcgttagttgcgaccatttgcttctgactttcaaaattgacgacccatgttcatcactgtcatctcttttcaggttcatatccgcctaggaaatatttcatcttgacaaacgctggaaagccagtgtatgcaaggtcagcgctacagccgattggatagctttcccgctctcaagtgcaaatatgatctatgtctgacaccgtccggcttgccgttctcttgttcgacagtgaaacggacgagaccgagctcaacacaatcgtcggcgtcatccaagcactcatctccatttttctcgatcaggaccaaacggataaacttcgaacgatcaccaaaggggacaccaagattgtgtttctgctcagacaaccgttgtactatgcctgcgtgtcttcttggggtgaacctgaatctgtcgtacgtatccaaacgaactacaagagctcgttcttgaactctgaaaccaatcagatgaccacgatgatcttaattcgctttctttttatctagcttcgactgcatctcgagtatttgcatcttcaggtcctcagtattctgactggaggacagttaacccgaatattcaatgccagaggaaactttgacctcagaaggctacttcaaggttttaataatttccctgtcaaattctattgctcgtatctatcgctgacgcccattctctctcgtcttcgggcgactgtgcgccaacttttgaacccataggaacagaaaatttcttcactgctctcgtcgacacgttacagtccgatttcagttacctcacatacagcctacaacctcttcgggtacatcccgcgttgagagatgcggccggacaagccttgttgaccgcttcgaaatcgaaagtgtgtgattccttccgaaaaccccttgtatctatctcaggctgaattatctttcaatgtcccaactataggatcttctttacgcgctgattttaacgtctccagacctacatattctcactctccttcgaccaacaaaacactcaattcacccaaccgatcttcacatactgctcaaccttattagatcatctcctgacctgacgcatccagaaaacgaatcctggcttccggtctgcctaccaaggtatgatcaggacggttttgtttatgtgtatgtgacattcggagaagacgggctcgggtttgtaggcgttggaaaggcgaaagatggattcgaggagatgagagacggacggacaagggtcatgcaggttggaactctttttcttttcctcctgctgcttctcgtgttccttcctattctaattgtgtgtcttctcgtgaggaattaccaccattaatagaaattggaagaggacaacaaacagagcaagctcagtcgatcaatcgctctacatccatactctgtctgtgagttcttcttgttatttatttatttatttatttatttaacatagaatcttatagaaaccttcaaacaactctttcacgatcacgttctcaccttttttcttgaattgacagccgatctgggaattccaaatttacttcacttcatctataaatcatgtgtaaacgttcagcttacacaacctcgatgggaaggcatatatgaaaaatcggaagaacgtcgtcggtcagttcctcttctctttggcatcaatcttctctagtttcgacagacgatttcccctgactttgagagaattcgaaatcgacaggttatcaattcactaccaacaagtgcatgatgcccttcacgcaagatcctctccaggagcagaacctttgacgttgttgtttgttcggactgatacggagtgtatcctaggttgggtaaatatgatttccttcctttgttcgagataatctcttctgtactctcctaacatgaatcgctgacctatgaacctttgacgttgaaatactatgttgacatccaaaaaaagttcacacaacctttcgagctttacatgacactgtccccttcaacccctaaatcaggatgtatctcaatcgccaatagagtcgctcggtgggtcaagaaagaggagcgttctttgttcttacatcggactcccgtcttttgatacgctttataatggggtcacggtcaagttcatgaacgacaagataacatggatatcaagaagtaaagacatacgacatctaaaggaattatgatacgattataagtgagaaatgaaataaagcaagaggcaatgtgaagctggttacactaaaaaggagaaatctaagtcgttccttccaagatggctttcatgacaggcgccatcgtcttcctcgtcgcccctgcgtttccctgtttccagattcttccggtcgcctctttcttgccccaaaccttgcctgcaccctcaccttcttcagcgttcgccacagccttccaaggctgtagatccagaacgtcctcctgctccaatcggctcaccaagtcctcccacacaagctcgagtccaccttcggtggtaggagcgaaaagcaagagctctctcctgctcttactcttctcttttcctccgctttcgcctcctttcactttggtcttgttctttgacttgaatgtagtcatcactccaagtagatccaactgatgggtcgtcgcgaatgactcaagagattggagaactgaagaccagggcgttcgaggattgctcctcgtcaaccaagaatccaatccaagcgggacggaggccaggccaagagtgatctctttagagatgggcaaaatcggagacctgaacgagtactgtttgtaatctcttgccagaagatcttctgtcgagaaatgggaaacattcttcttggtggttgagagtaaagccgaccaggccaatagatcaggaaggagtttgaccgatccttcgttctcgtcggaggacgaatctggatccgactcgaggatggaaagatcatgtccggttttggcaagatcatccgggttcagatgagagtatgggtacagatactcgacggctttccaatctcggtcggtagcttttccgttctctttcaggccggaggtatcgatcaagatggcgctcaacaacaacgtggcgagttctttgggtataagcggctgaccacctaaaccgacagtcgacattgacgaaggcgacgacgagcctgaaggggaaggcaagactgattgaaagtaaagcgcgacgagagaagaacaacttccagctccagtgttgacgatcctaggatcagcttctttgtaaagcccttcgtctgcatggtgatctaccaccgcttcaatctctacagacccttccgtccctgtaggtatacttgagccaagttccgggatccatttagaagtcactcggttgtggtcgaccaaagcgagtttgactccctgtcgaacgagctcggccggttcgataggcaaatcgtctacgcaaagtaaagatgagctctcaatagacacgttggctaagacgagcgtgttctctggtcggagagacaactccgctcgtggggtttgaacgagagcaatatgtttcggtttggcgagcaaagttgtgctcagaaatgcatatgtcaatgcgcaagccagcgaatccaagtctaatattcaatttaagccaagagcaactgttagaaagacagaatttcgaaaaagtggaaatcacacataatgagatttttcgggaatagagacaaaagatggttaccaacctccggcctcgttgcccatgacgatagtccatccattcgccttcccggccttgatgtcatccaaaaacatctctctcaaactcaaaagtgagtccccaaccaaggatcctttggattcaccattcttgttctcttgaggaagcgtgatattgttcgtggaagtcgcggtcattgctgttgtcgttgtcgtcgtcgaggctgtcgatagcggtcttgttattatcgaagaaggtatagaaaccgtttgaaatgatgtaggcttgacaaatattttggatgaggacttgagagttgatttgaccacaagagcctctgtagctgtcttggctgtagatgatcctaggatggagaccgaggaggaagaagaggagcacaaagcgtttggaaaagagcaaagtgcttttttcatccactctgggtcaagtatcgaatttgattcctgctgcaagatagccagagcgagcaaaattccgactgaaagcaggaaagaaagtgcgatgagaacaagtcgttttggagatctcatccggtgagagatatacacattcagaaaacgtttggtcactttgctggacgactgtactgacgagagttcgatgaggttgttgagagaatggaggagaagcaggcgagagttggaaggacaagattggattttctatttacgtttcctctagtgacgtaagcaaaacccgaagggtttttcggaacatggagaacgaacgttgtaatcttgatttcatacccaagcatgatacgttgtattcacatacacgcagacacatgaaggagaaaaattgatagtattaaggacagagctgaaagaaagaggaagatatagaagaaagaaggaagaagaaaatgaagggaaatagagagagtactagaaggaagaaaggagggaaggtccgattttttaaatcggacaaggcaagatggatgacgataaatccccagataaagaacagaaagagagaggaaatgccatagagaggtctcctccagagaaaggtctttgtaaatgtgagaaaacctcgatggtttgacttaaggtttttatttttgctttgctagtttgtctacctctctaaccggtaatcattccactatccaatccgagcgcatgaaggaacaaatcaacgttggcaaccttacggacggcagtttcctcgtcgactgaataaacgtccaaatccacacctcgaaaggtcgtcagcatcttctgccaactggcaagtttaatcacaaatgtgacaaatgatgaaatcatatacgtaccccaaccctgtttggcagcgactacaccttcaatgaccttatctctcaactcggccaccaatgtctgctgctgatccatgtttgcatgaagagcgaacgagctcaacatctgccatacaggcatatccaatagatcgatccctccatgattcttggccatgtagagctgggggacgaacgcgcttgaaacatttgcagaggggaaaacagttggaaggtaggatgctatgcgaacaaacagaccatcgaatgcttgttgcctagtctcgtcgatatcaacgagaggtatttaaatcgaatggtcagccaaagagaagagcaattgatcgtgaagaaagaaagattaggaatctcaccattgttgaatatcagacggatcgggagattgctcggcggttccatgcttgagcacctcggctcgagaaagtaggacagtcaaaagaacaactccaggctggtgcaagaaaaagacaaaattgagtcaatttcaatttatatgtaaacgacgctgaatgcaagacaaacgtaccctagtctttgcgatctggacgacattgcatctctgaacaactaaaccaaccattccagctaccattctcaactcgcatttgtccaacacactcaagaatgcaggaataacgctactcaagaacgcatcagtatctttctccctggcggcctgttctctggtgtaaggtgggagcggaggtggagcgtcccatacgacgtcgatttgagagaaacaagcgagtagcagagtgaacacagtcaacacctgtgaggggttcaggtgtcgaagtaaacgggggaacagcttttttcccttgagaggacccaggattgagataaaagggtgagggaaactacatcgagttaaagaaaagacagagattaggacgccgaaaacacacgaaaagaaaggtacttgaaaagggaccatatacctgtgatccacaggcaagtcaaccttgagctttgtccagagttcttgaacaccagctctgtaggtttcctgccattccaatgcacgctccttgtcttgcgggtcaatgtcttcctcgtcagagaacaaatgagcgggaggagagtttcttcgaagttgctccaatttcaagattacatcgtacagctgctcgatcgcgatcaatgtctctcgtcggttcaaaggctggccttgctgctacatgatcgataaacaaatagtagagccatgttagcatgttgaacttgaccagcaagaggtgcaaaacagacatacatgctggttgggatcaatcggctctccgttggtcttggacgcatcgacctttgcatcggtagagc

SEQ ID NO: 2529 - DNA, 9023 bp, Xanthophyllomyces dendrorhous
acctttgcatcggtagagctgtacgaagcctgcaacatcggtcgaggagcagttttagcagaccgaacggtggtctttcccaagacaccctccaagtgagctatcgatccaaggcgtgtcgacacgtgacgtcagtctcgatcaaaaagagagcggcacatttgggaaaaaaagaagaggagatgggaacaaacctccagccttggtagtctctctctgtttggcagcatcaacaattctcttgacttgagcagccatcttctgcatcgctccctcctttctgcccatcctgttcatcccgacgttgcctcctccgtttctgggtccgccaacgccaacgccgacgcccattccatcctgagtgagctgaacaactgtagccggcccgtgcggtgcgccgagtttggacctcaagatggcaccatacacttgagcataaaagtcgtcggcgtaagggtcctgggtgacgagctgtgagacttgaattcgagtgataaaatccttgtcggatcgagtcatgatatcgttgtactgagcctggttggttggaagtggcaatagaggacaaaaaagaggataaagggaatatgtcagtaaagctggtcaagacttgaacttgaagacaaagacacgactcaccatcgaggcaatctttctcgcttttctcatccttcgttcatcagctcgctcctgttctcgaatctttctctctagctcttccttgacaaacgcctgttcctgctcgttcgatccgacgagagctcccagcagatcggttgaggccgcgacaggcgcatccttctgtcctggcaaagcaggaaacatttcagacaggttgaacgctccccccgcaccttgctctcgtggagggccaggaccaagcccgggtggaccttgattggagacagcctgttgcgggtcgatctcgccagggaaaccatgctggttttgctgttggagctggatatgagcctgctgctgggattgcaaaaggtgtggttgagcatgaccgacgaaaggagatccttggggagtatggacgttgtttgctgcgactccctggaaaggggcttggccctgctgctgtatcgattgaggatgagcctgaccggggaagggcgatccatgctgctgtggaagaagagactgagcctgttggtgagtagggaagggggaaccttgaggatgttgaccatgaggaaatcctccgtgaggtagctgctgatgaggatggggagaaaaatgaggaggtatggctgagaatcctggatgctgctgctgctgctgctgctgttgttggagagcaataggctgaggatgtcccatgaatggagacgcctggctatagccgtgatgtggatgagatcctccgccaccagcaccagacatcatttctcgttcgatctcttccatcgtgagaggtcgaggtttggacgaagcaaatcccatcatctcagcctctatctcttcgagcgtcttgtgacgatgttgctgttgttgctgctgaacagatggctcatcaaacgaagagaaagcggcccgaccggcactctccacaccttcagggaaagggacatatccgatcagttgatagcctgaggtgtatttcgaatgaagatcatgaacatacctcggctatagctatcagatcgcgtgggggtaccccagacgtcacctttgccatcaaatgtgccacccgattgatttgcaggagcccgagtgggcgatggtgaatcagcccagagatcttccagcgagccggcaatcggaattcgacctgaatcagatacgaatccgagtggaataaggaaaggtagaagtcagcgggagtttcgactttagttccatgaccgccagtcttcacaacatgacatatcaatgtgtacctttgatcttggaggttgaggacttctgaggaagaagcgcggtcgtctttggggcggatgaagatcgaagaggagcaacaggagtggtcttgtacactggcttgactcgatcatccagacgagcggtctgcccggaaaagtcaaagtttcgatctacatgcacgccaaggaatgggcgtaagaacgaacagaaatgagctattgaactgatagacgttgaggagtgggaatagtctcgttctactgaccaacaggaccgctgtctccacctccgaacgtgtcatcgttgaagtcatcattatcctcaagtagcttatcgcctagaccatcgtatgtatcttctccccagctaggtaaatgtaaatggacaccaaacgaacaaatgcttgagtgaaaggttgaaagaaaaagaaaaaaaagagaagtataagaaaagattgtttgaatgacgaacgtgtaaacggcgagatcttcttcttgaccaaaatcgaacactgaagaagcgttcactggctgtgtagaagagccagccagacggttccttcgctctggtaggactggatggaggattcgaatgccgattggaaaccgaggtatgaacaacggagaaaagagagaaattggaaagaattccaaacgatacaaccatcgatcagcacaagcacacacgaacgcatgccgaatatctcaaaagaacacctgaaacacgaaccagagtcaaactcaaagaaacccatgagaggatcttgtgaggaagacgggtgagagtgtagagagtgatgatcgtcgtcgttgtcgctgtcttcttgctaccttcctggtgatgggcaaaagagtcgacggttggaagagagaacgcagagggttacaagaaagtgtaaccgaggttactgtgtggctggggttcaacgtgacctcgtgaagctgtgcaatctcagccgtccaggccataaatctccatcatagacaacaagaatgatgtctggtgcgcttgctgaaggcttggatgtgttgaggacttcgaatgcttgaagactggcatgtcaagaaatgaggtagtagcattgaacgatgcgaaagtgttctacccgatctcgaacaccttatcgactgtctgaacgatatatgacggatgcttcaaggtcaacctcacttgtcactttctttcaaaagttataaagtcgtgcaacgcaccgtttcttttcctccaacaaatactcgatgatagttgtaggctttgcttcatgtgtttcagtgaaacatatcgagccgccaagaagtgacattgaagcgcgcacactgagtgtctcttgggcggttgggctgaatactcactaatactggacctgtcggttccgataagaattgtctacctcactcacagcgtgctcttttgcatgttgccttcctcctctgtacatgctaacatctgctctcgtttgtcttgaatcttgtttggttcatccagaacaaagcatagggccattgcatgcgatgggcagaggcgccacatcacgtgactggatcgagcaatttaggtactggtaatcttacctcttaccgccgtcattgctgggtacagcgaaaccgatagaccatcctgaccatcaccatcaacccatcacctatctctttaacacatggtccggctttcgcttgcaaggctaggtaggatacgttcacctcctgctgcgccaccacctcctggctactacgacacacctgttccgttcagacctctgcctcaagcctcaacctcggttcctgccttctcatcctcgtctcctctgtcctcgtccgagtcggcctcacctgcagagcctccaccaaatacatcctttgacgagtcagacatcaatcttcctgcacctctgccttctcgatgggatgtattggccaaaagacgagtggtaagtccagtttatgtgcttgaagtgtgatttaggttaaccttgaattctcttttccggggcatatatatctgcagaatcaaaagtttcttgattatgttcacatcgtgatccgaggaggtcgaggaggagacggttgtattgcattcacgtgagtagattcgacgtaacgtttcaactatcgttcgtttctccagagtcgatctgatcacttctctcaaatagcaaacttccccaccgacgggatttgcgaggcccgccttctggtggatctggaggtgaaggcggaccagtatatattcaggcctgcgataccataggttccctctctgacgtcaaacgacggatagtaggtcttcagggttcaactggtgctggagactatcagaatggaaagaagggaggcgccactatcgttcgtctgtttctcttcacatgaggcatgaggtctgcccttggattctcaaaatctttttgtctaccgcatttctccaatttccaatccgaccttcaagatcaaagtgccacctggaacaatgatacgtcagatctcacgaacagtctaccgaccgcttactccggaagaagaactcttaccaccggccgatcgagacccactgatgatgcgtgcgctcttgatctgtcatcctaccgctcgagcttcagaggataatccaccgccgatcacaccggcgcatgtatacggaaccaccatacatggaacacccttgccgcctccgccgccgatcgagttggacctctcggcagcgataaacgaaccgattttgctcgtgaggggaggaaagggtggtgaggggaacaccatattcggcttacacgacaagaaagggaaacacttatgggcgagaaagggggaggtcccggatgaagtcaagttggaactcgagctcaggttattggctgatatcggatttcttggagctcccaatgttggcaagaggtcagtttgtctttatctcttcttatttatcagcagtgtgtcttggatttctgacgagagaaaacaaaattgcatcatatcaatacactttgtcttttcttagcacactacttcaagcattaacagccgcttcacccagaatcgcctcatatcagtttaccactctcaatcctcttgttggtctctgtcgaatccttgacgacggtaccgtcgtgtcctcaccaactcgaccgaaatctctagaggtcccggaatcatctatttcattcgacgaacccgttctaccaacagaacgtttctctctagacgttccactccctgtcggaaaatcgaaccgggctcgagcaggtcccagacatcgaacgccatcgaaagatgaatcccttcggttcaggatatgcgataacccaggactgatcaaagattctcatctcaacaaaggattgggtcatcagttccttctctcggtctccagatcacccatccttgcactcgttcttgacttttcattgtccacggaaaagttactggaacaagcagagatggtcgttcatgaggtagaaatgtttgagcccgagtcgagattgaaagagcgaatcagattggtggtgggcaacaaagcggatgaagtgtcctcgcctgccatcggtagaaaacgtctccgagctctgcaagcttgggtgaagaaacgtctggggacgaccaaagtgtgggatgagtacgccgagcaggaggtcgagatcgaggcaaacgaagatgttcagataaagctgatctctggaaaatggggtcaaggaatcagagaattggctttccggatgggtgagttggtcgttgctaaacgacatgaagatttcctcgctagggaagaaaggaaacgagcggagaaggaagcggaggaggatgcggtcagagaactccagaaacctattctaagaatcggagatgtgccagagaaaaagccagagattggctttggactcagagaggaagagaaagctcgcaagatggacgattctcatataggatgattcatgatgttttcatgtgttctttctgctttcacgatgatgtcttcatcagtgctagccatgaaaacaaaaagaaaattacatgttttattgatgttttatttggcaaagattctactttctttcaatcaaacatatcgagcctattgttttaagtcaggaaaagacggaaacagaaggttttgttctgatcagcatgaattcgggcaagacgaattaacaagaggcatattcacattccggcgccgacaggtcctccaggaagatctcgcagaataaacacgttgaggtctggaaccaaaggcgaacgggatattgttagtctttgattgtttctcttacctatacataggaatgaagatgagacataaaagcaagttcctacctgttcgttggcaggccaacgtaagcttcatcagcttttcttccagaatctcgagatccctcctgtctagagtgcccaacaaactacccccgctctcccggacgtccaccctgttccttctctcgaccaggccagtcacagctcttagctcggcttccttccgttggatttgattggccattgatttgtacagatgagagatcaacgcagtgtaggctctagcgagatcgacatgccagaggtaaaacgttcgagcaggcgttcgatcggtcgttcgcgggacttcttggagttcgagaagggaagcagctgaaagagcggcggtgatcactcggacgtctttaggggagagcatggcgactttagagatctagattcatagacatcaccgacagaccgagcgaaacgaaggagtgaatacgtcagatattgatcctattcttgggcggtgaatacagagagaagagttataagagagagaaagactcacatgtttctcatccatctttccgtatttcaacacgacggcgaccaccctagcagcatcatccccccatcgttctctcacaacagcatccaatactcttctctttaacctcctacacaccgtttcaaactcgacctgataacttcctgccgaatctctcgcggatttagatcgaccgacaaacgcggcctgctggcctgaggaagtcgggttatcttccgaacctagaagggaaagatatgtctggatgaatgcttggggggcggaagatgagtccaaggtagaagagggatcaaagattcctctgaaaagctcgagatttcgagggatagcttgagaaatctgatagattgtcacaggatctgattcggtacgtttgaacaaggcaagaaagcaaggacagaggtatcagctatggttcacctggcgtagagcgtttgacaaaatttgttgacacgaaccggatcgtatctcggatactttcatctggctactatgactggatttcaacatggcagccaccacacttccggcctcgacattgaaccgatctgatgcagcttttacaatgagcttttccagaagaatccggatccaaggtcgctaggtgaataacaaaaacactaggaacaaagacgaaaaggtattttagaaaaggacaaacatcattacggatcaacacattgaaccgatccatgttaacgtagagatagaccgaatcctagaagacgagatacatttttgtattgcatggttgaatgagcgcgcgcacatttggaagagaataggcatacatggcagataggaaacgcacagagattcgaagagcgtcgtcatccaactttggcttttttgttttgcttttgctgtaatcgagacagagatgaaggagtgtgagcaacctcatactttggaagaagcaacctgaaggagtcaacatacccgatctctttcctaagggccattttccagtcagcccaggactctctttccgccgacactctgccccatgctttctcccaggcagcattcctatcttttggcccgataacacctctgatcttggcgagttcttcttgacggagagtgattagcttgtctctgggcgaaattgattgggatgggtgatacggaaggatgaaggattgacgaaggagaacgagaagggtcttttgaacagaggcggccttcttcttgtccactctgaattctacttttggttgaagctcggatgtaggattcgtcaaggaatccgtcccagtctccctttggtccttctcttctctttcttcctcctcttcgtcttgaagcatccgtctctttccgttcttcaacccggccttggcttccttagccttttccttctctctgactttacgggctcgttctttgtctttcctttccttctcgagttctcgttttgactttttctttgttggcggaggtgaggaggaagacgaagaagagagatcgttttcagaatcggaatctcgatctgctcttgtgagatggttactctggttctggttgtcagacgtggacgagtagaggtaggacgtgcttgcgtccgtagcaggatccgctttggctagttcggcgagaatttgtggtagggtgagttttccgtgggtcgacagcaggttcaatatcgaagccgcctgaaggaaaggaagaaggttggataagtgcgaaggaagagagtcaaacgagtgagtgaggcattggtaaagacagaggaaagaaaaatgagggtagagggagtgatatcccagaaacgcagagcagacgcacctcatctccccattcgttcctacccatttctacgaccctaccgactctctcgagcttcaagaccgaaccgacgtccatctcgtaagcctcgatgccaccagtatagtctggtccggtccaccaaagcaggttgtgttgggtgagcacgatgagggctgcttggacttgacgtggagggacagaggaaagcttagatatctgaggcagcgtaagccggcctcgatggagaattggatgtgcgactctctgtattggtgaagacatatcaaaagggtaagataaggaagagacaatgttcccaaagggattgacatagggtttagcttttggccggtctgggtgactattctcgatgacgcttgacggttgacgcttgtaaagaacgaaggaaaacaaaacaggtaaaagacgaaccgcgacctgaggtccaaaatggacactgatgatgtgatgtcccagacggactgcctccttgtccgacatgacgaacgtggtgtgctcttgacgagtggatgatggacggacggatgcgagtggaggaggttggaaaaataaaataataaataataaat
